United States Patent Application Publication US 2007/0067865 A1 - sequence listing, part 40

SEQ ID NO: 252050 - DNA, 359 bp, Gossypium hirsutum
gttggccatgacacaacattactgaacaatctctttttcaatgtttctatgaacgcttgtttcatatggagttgaagatgattgatgttgtaaatcgaaggtgtaatagcccggtttagaccctagtcggaatagtggttttgagaccaaaaatttgaatcagaaaattattttaatattattttctgtgtttataatatgtgaatgagcatgtgtgaaagtttcgtatgaaaatttgatcttttgtgtgcttaatttgtgaaaaggacctaatcgcgtaaaatgtaaaagtggccttctatttgttaaagtgcttattttttatgtcttcttaaatgtgaggtccctattatgttatt

SEQ ID NO: 252051 - DNA, 337 bp, Gossypium hirsutum
atcaaagatgggaaaagactggcaataaacacatgtaaagaaatgctaggtgaattcaaagcaaaagttgcatgggtcaacagtagttccctgaattgatagggaatattggtaaagtgatccttgtttttactttgatatgcacaataacgcttagggtccagctgtcacatacagacctggaacttcatcggagaagggagcagatcgtacagcgcactcttagagaggctcagcttgctgccctgcaatatgaagaggtgaaaataaggaccaagcagattcatagagattctgttctggactttgtcaaagggagttctttgaatgacactgt

SEQ ID NO: 252052 - DNA, 280 bp, Gossypium hirsutum
atgccagaggtggaagagaccagcatgcccatgaccatggtgttccagaaccaggtggtggagctcatcctgcagcagtgcgcggacatcttcccgccgcactgactgcgggcctgcgactggggcggcggccgcgggcctgccacacaagctgggcggaggaggccacgcagcccggccttctctctgggaccttccggcagggcacaggcgcaggcaggtgtgacttttgcaccctcggcatttggggtgccgtgacccctactgtggcttttgcaaa

SEQ ID NO: 252053 - DNA, 395 bp, Gossypium hirsutum
gacactatagaacaagttggtacgaagaagcacgctggtaccgcgccgcaatatccgggatcacaatcatgcgggctagcactctgggctgggatcaacaggtcagagctgctgatcgcacctgagatccctaatggagataaagtaacttgaggacctaaactgatcttaggatggatataggatagcacacactcacttgcctgcaagaagacagcctaacggctggaggagataggttcatcttcatgcagccttttcagcaggatagacaaggcttatacacatgatagctaaaaggtttccagagagtgcaagcaaaagatgaaagacttcttttgttcttggcctggaacttgaacttagacaaggtttcttaagccaaaattattttt

SEQ ID NO: 252054 - DNA, 363 bp, Gossypium hirsutum
gtgatttgtcatatgtgaaaagatagatgtgtgaataagattcgtgctaagataagaccttggcccctagagtaaaccttagaaaaaaatttggtgtatgagtaggatctatcaaatgtgaatgaggtgatctttgcagtttttgaaacttatgaatgaaagtgatatctatgtttcttattaagtacatgtaactcattcttaagaccttatgatctttatttgagaaaagttgaatgtttggatttatggatatatatacatttgatgcaactttgagaatggattctgaatctgaaatatgtaaaagtgcgacatacatgtgtaattgatttgtatgaaagaatagcttcaactccttaa

SEQ ID NO: 252055 - DNA, 339 bp, Gossypium hirsutum
atggccaaatgcaggactctctcatgttattgtcattatgaatatcttatctaaattttagttcatgcatgttcttacttaatcctggtgtttctgctgttagatgttagagtttaataaattgtgatatgcatatatttttttacatgaaggattctagtttctaattttacttttctgatctcaaaaaaattaaacttgaaaaacagggttaaattcttcaactattgcctcaagatcagttttgtcctattgtccttaaaaaggagatttagacttgtctgcctaacaagtattttttagggcatggtcctattccatagaaagagttgagatacc

SEQ ID NO: 252056 - DNA, 343 bp, Gossypium hirsutum
ctttgttttttttttttctttcatttgcttataattatttttttatttttagttttcaatttctgaatggctaaatcttcgaatccggaagggaagcccggtgttcgaatcgtggtggccggagaccgaggcactggaaagtcgagcttgatcgtaacagccgccgccgagactttcccgacaaatgtgcttcggttgttgccgccaacaaggttgccgggagatttctaccccgaccgtgtccccatcaccatcattgatacctccgctaatccggaggatagaggtaaactagcagaagaactgaagcgagctgatgcagtagtgcttacttatgcgtgtg

SEQ ID NO: 252057 - DNA, 382 bp, Gossypium hirsutum
atccatcacgggagggaccgtcacagaatgtgggcaacaccttctgggaaaagatcttaggacagacgcctcaaccacctcaggcacatgttagaaagctacaggaatgtcttaagaatattttgcagtaatgtgtatagtactggatgcagtgactgctgcctgggccagagggtggcagaaggctttaggggcagaaacgttggaagaaagattgtcacaagtcaatctggggaagagaaaaatatttcccaaatcatttttctcacgcactccctctgacacgagagtttctcatctgccttcctccctccctcccgccctccttcttgctttctaaaatcagcatgtcctttacttacatagtttccccacggttgat

SEQ ID NO: 252058 - DNA, 380 bp, Gossypium hirsutum
atcttttctacgccttcccatcgttagaggagatgttactgagatgggtgcgttaaagtttaggcttttcagagtttattttactaacaactgaaaggaaaaaagctaactagaactgactggtctgatttgttttagattctgggctttactaggacttcctactctcagaatctctggattataaaatctgggtggggtgggagctggaaaattaatcacggatgaaaagaaaatcaactctaaggctccagttagaagatttttgaaaatggcagaacatgactggccttcattcaagtcaaaatatttaaagcaatccttgctaagaagaacttgattttgtataagcagtcccttaaatagagttgcttctcaag

SEQ ID NO: 252059 - DNA, 360 bp, Gossypium hirsutum
caacaaaaactagggaacaaaatcaaatttttcttaaagaagagcgaaaagtaaactgttttttctaaaacaacactattaacaataaaatgaatcctaaatatacatgatataatgaatgaatgcttttaagctaactcaaagtacaactacaattttctttaaaatgagtttattttaggtcttcaaaagtaacgtaagttagcttagccatttcggtggttaatgtagccttctcaatctagccataatgtctaggccggatttgggaggttacaattttcatcccaaagttaatatcgtgacacaccaggccttgtgttgcgacataacgaccaatatgctcttttgtagccatct

SEQ ID NO: 252060 - DNA, 328 bp, Gossypium hirsutum
atccgtttcccagctgaattaggttcttattttgcacaggtgcgtgcagtggccccagggatccggaaaaagtaacactgaacctcttgtaacatccagcaatggggcccgggaacctgggcgcactagtgtgccgcgcttaaggcttcagttcgctggcttcgcacttttttctacaaaggcgagtatctcctatctgcgggctcatacttactaccgcctgaggtgccatggcccccaagccgggggccgagtggagcacagccctgtcccatctggtgctgggagtggtgtctctggacgcagccgtgagcacagcccacgcaag

SEQ ID NO: 252061 - DNA, 320 bp, Gossypium hirsutum
taaaaaaaaaacttttttaaatggcgatgaaaaattttaggcgttttcttatttggttttcccttcctcggataggcattactttaagttgctaggtgtcaatcagaaatcatatgcagattgtgcataagctggtcaaggaggtgatctcagttttgtggtgtaagatgttcaggagtttggggaccctaatatcagatacggatgaaaagaaaatcaactcttacgctccctcaagaaaattccaaaatggcagaacatgactggccttcattccagtcaaaatatttaaagcaattcttggtaagaagaacttgatt

SEQ ID NO: 252062 - DNA, 283 bp, Gossypium hirsutum
aatctacttacgagtcagcaattcctactaccgtttgtttccctggaaaatatatgagacttaatattattattttgtttgtttatttatgtgtgtgtttcatcttgttgtgttcattactcagatccctatcgctttttatttctgttccatttttcctctttattttctaattttgggtgttatttgttccatatagatttttaattataattttgaccatctttcaaaagagggaacttatttttgaaaaccctaagcagaaggaagaaatcgaagtgag

SEQ ID NO: 252063 - DNA, 335 bp, Gossypium hirsutum
caagaatcaaagatcttatgaatagatgtttttagaatgcaaaaacacgaaatcaatctccaagattgattttcaacaagccgaatctgtccaagaactaaaccgatgaataaagccccaaattccagcaacttgatttttcccaaaattccaacaacctaaaacaatcagttttgacaagaagaattcgacaagattaattggaaaagataaggttagtcgaatttggctaccaagaatgagtaccgatcgatctttttgaggaataaaaatgggtgtggattcacaagaagaataaacaagtttgatcaaaagaatctgcattaaccgaattt

SEQ ID NO: 252064 - DNA, 381 bp, Gossypium hirsutum
atcttgtagttctgacctgggatggcaagatgtcggcggtcagtcaggattctattgaagacagcagactggcccagactgagaccgtggttgatgactgggatgaagagtttgaccgagggaaggaaaagaaaattaaaaaatttaagagagagaagaggagaaacttcaacgcctttcagaaacttcagactcgacggaacttctggtctgtgactcacccagcgaaggctgccagcctcagctatcgccgttgactgtgcctctgtggaaggagccttctggagacaaggcatcccttcctgggagctgtccgtctggacctgagggagctctctgtgtgggctctgctgcgctgtgagcctgcaacggtaggagccc

SEQ ID NO: 252065 - DNA, 370 bp, Gossypium hirsutum
cccacgcgtgcgcccacgcgtccgaaaatattttttttaaaaattaaaaaattaaaaaattaaaatatatattaaaaaattaatatttttaaaaaaaattataaatctgtaaaatattattaaatatataaaaaaatttaaaaagttaaaaaaaataaaaacgatttaaaagttaagtccataacaaatctggacatatggttatttggatttgcattgaatctggacaaccatgtgaccagattcattcaagaagatttttctaaaattatataaagtttaaaaatattaaaaattaattttctttgaaaattgatggggataatgttttaattgtattggtagcttttaagatatataaaaaaatatt

SEQ ID NO: 252066 - DNA, 379 bp, Gossypium hirsutum
atgctgagagtgcggagtgtgtgctccgggctcggaacacacatttattattaaaaaatccaaaaaaaatctaaaaaaatcttttaaaaaaccccaaaaaaatttacaaaaaatccgcgtctcccccgccggagacttttatttttttttcttcctcttttataaaataacccggtgaagcagccgagaccgacccgcccgcccgcggccccgcagcagctccaagaaggaaccaagagaccgaggccttcccgctgcccggacccgacaccggcacccttcctccccgccggcagacggcagccagcggcagtggatcgaccccgttctgcggccggtgagtagttttcaattccggttgatgtttgtccctctgcgc

SEQ ID NO: 252067 - DNA, 292 bp, Gossypium hirsutum
atgccaaagggcctggattacaggcttgagccactgaggctgtgctgatttccttgtgctataagattatagtcccttccacttgcttatagactctgttgaggcacactatgcactctggtgttgatactgatgtggaatgccttgatcttaactatccaccaactatacctgactgcctgaagtggtgatattaccttagccctaatcctgtggagtatctgtgaccacaagtgtgctctggccttattttaagtttaatgaaaaatgtcgtctatacacaccttctaca

SEQ ID NO: 252068 - DNA, 358 bp, Gossypium hirsutum
tctcagcaaaatcaaaattgcagaaaactttctccaacttcttcatctcttcttccccaaacctcacccacgacctccatcctcctcctgtcttcagccatcgcctccaccgcaccagcaggtaccatatttgtcagtttcctgatgatccttcgagaatcaccttcaacctcaatctccctccacccaagctgtaaccccagcttcagtgcctgaagacacgctactgcttctgcagaaaaaacagacgctacgtcaaagttcactttcaatctggatcctatcggcgcagaccatctgtcaacacagatccgtcttccagcgcagacaatcattctatagaaagccatgggtctac

SEQ ID NO: 252069 - DNA, 385 bp, Gossypium hirsutum
atctggtagttctgacctgggatggcaagatgtcggcggtcagtcaggattctattgaagacagcagactggcccagactgagaccgtggttgatgactgggatgaagagtttgaccgagggaaggaatagaaaattaataaatttaagagagagaagaggagaaacttcaacgcctttcacaaacttcagactcggcggaacttctggtctgagaattagccatcgaaggctgccatgcttatgtatcgccgttgactgagccttatttgaaagaaccttcttgaaacaatgtaaacctttctgggagttgatcttattgttctttgggagctctctgggttgagcgctttgatactgtattgggcgctcttaggattatatta

SEQ ID NO: 252070 - DNA, 339 bp, Gossypium hirsutum
gccaagttcacttcctacaccccttggccatacctcgggatctctctccacgcacgagatagagctttcggaagattatacttgtatcatttctcatggtccgaacccaaaaacaactcgcatttttggtgactgtattttggaatgtcacaacgatgagttgaccaattttgataaaacagctgaacaagtgcctcgattcggtaagaacacggagccatcaactgcttacccttctgatgagttcttgagcttctgttactcttgcaagaaaaagttcgagaaagaagacgacatttatatgtacaggggggaaaaggcgttttgcagtacttgatt

SEQ ID NO: 252071 - DNA, 311 bp, Gossypium hirsutum
attgcccaccgacaggatgggccttatgacctcactgaagggggcagttgagcacagactgctctgtcctgctctcctgcccattggtttctcaagccccttctcctggttgctttcttcttccccatcaagccccatcccctgccagtgccacctgggtagtttacacacatatccctccgctccccaagctgctgaagatgaaatggggaacagaccccgaggcctcatgcaggagcttaccctgcccagacccggctgtcaagcgagggcttctgtttctgaagactctggataccagggagccagga

SEQ ID NO: 252072 - DNA, 353 bp, Gossypium hirsutum
  unsure (1)..(353): unsure at all n locations
cccacgcgtncgctctcctgaaaaactccttatatattaccatttctgaattttcttctcttgcttcaaaatccgaaaatcactcaaaggtataagttgtagaatcatctttagtgatggacagaggcctttcgatcattcctatgtaggcagagaattgagacttgctctgttgaacctgatggcaggttttgatccttcaagtaaatgataaaacaagccggatatggcatccaaaaagccgcagagtggagtggatgacaaacattgtgaagttaaacacacatctaagacaaccctcatggaaaccgatattccttatttgatttcagccacaccttgatccaaaccat

SEQ ID NO: 252073 - DNA, 335 bp, Gossypium hirsutum
attccagatcctgctcctgctcagactgaatgctctcctgctcctccagattcagatgctgataaacttaaagaaaaagaacctcaaacccaaggagagagcacaagcctgagtttagctttgagtttgggccaatccacagatagcttaagttcctatccagctgatccacaagcaggaggagataatccagaagttcatggtcaagtagaagtgaaaaccgagaagagaccaaacttggttgatcgacaagcattcacagttgagtatcttccaagcatgctacattcaaattgccctaaaggtctgctacccaaattctccagctggtcttt

SEQ ID NO: 252074 - DNA, 349 bp, Gossypium hirsutum
  unsure (1)..(349): unsure at all n locations
gcaccagatccagagccggagccgaaggcagagacggaactacattctagggatagttcttatcatccagatttggggggcgatactatttcccaggctcgccaggccacggatatcattcagagtttgacatcttctgcccactaccaccttagtactccagtcatcctagctcgtatccacctcagtactccgctccttccggcccgtatccaccgccatactccactcctgccggctcaagttcatcaatggcatttgagacatatgatttttcatctatgtttcgcacacccctacataccgatgacgagatacgtgatcaccataatcgtncgcaacgtgaacg

SEQ ID NO: 252075 - DNA, 199 bp, Gossypium hirsutum
gaaaaatggagtgccaacaccgaggaggaagctcttcttttgatgtgcaagcttatgatcccttcagtgacagcaatgctgggcaacggctcatgggttaaagcgcctggcgagcatatgaagcctaaaggaaagtcccataaaggtacaataactctgcctacccttgtgagacccgcaaaaatgttggcaccggttg

SEQ ID NO: 252076 - DNA, 374 bp, Gossypium hirsutum
atcgcataacatgggaactattcacatgtcagaaatttgtactgaattaaaaaatttaagatctttagtccgagtatgtgaaattcaagcaactttgcgagagcaaaggatactatttttgagacaacaaattaaggaacttgaaaagctaaaaaatcagaattccttcatggtgtgaagatgtgaataattgcacatggttttgagaacaggaactgtaaatctgttgcccagtcttaacatttttgagctgcatttaagtagactttggaccgttaaggtgggcaaaggaaatgacaaggggatggggtctgtgagagtcaattcaggggaaagatacaagattgatttgtaaaacccttgaaatgtagatt

SEQ ID NO: 252077 - DNA, 355 bp, Gossypium hirsutum
aaatttttaatctttctttttgggtgaaactaattaattcaccatatgtaagttttcatatataaaatacctctgtaattttctcttatttgatttctaactttttctcctagaaaggtaggaaatcctactagaaacttttatttccagaatggttgttggttatcagatctttgcataactctagtcataaagatatatttgtaccatttaaaatcggttatttttttgtattttaaatttgataataattcttaatttctatctttaagatgagaaggatctcctataaagtgcttagagattgagaaaaataaagttgctactgcatattggatttctcttccttgttcat

SEQ ID NO: 252078 - DNA, 356 bp, Gossypium hirsutum
tcgcccacgcgttcgcggacgcgtgggtttgaatacaaaaggtgattttccattttattttctcagtgttcttcattcttagtttcgttttgttattttttttcttttttcctttttctttttttatttatttttcgtttgaagtataaagaaaggaggaagagacttacttggttgccggggtcgtcaagccaatgtcttctccgtcgaaatcggggcatgagcactaggcatgatcggcggcgcaaagagtgggttaaaaaaaaaccctaacagagccactactctcctttaaaaaaaaaacagaatggttttctaatgtttttttctttctgttttgtttatttttgaataaa

SEQ ID NO: 252079 - DNA, 362 bp, Gossypium hirsutum
ctcagaggtacccattagggcacataatcaggaagcacactctcgagccacatatcatgatacttagatgagccatgtaacaggacgtttatccaggctaaacaagaaactcataagagttttaattagggagcttatagagcttaacagataactccggagagttaatatcaaggagaaccgtataagctaacagagaattcaagcgaaccatgtcagaaagcccacaagagcttagattaagacgctcatgtagagttgcgtttgtgtccgaattatctactagatcacaatcgatcaagtcatgtaacaggacactcacacacaactgcgatagtgtgcaacacgtgcaaaatcactac

SEQ ID NO: 252080 - DNA, 231 bp, Gossypium hirsutum
caggggaaagtgggcgcgcggggcaccggcccgacatcccgggtatgcccagcgtccgccacgcgtgcttatgtgcggggttgggatattattgtgtatgaacgtttactctatacttggggaaatgatgcaaaacagtactggagtctttggaccggagaagaacatttggactgtttcacagtgtttaaaaattatttctttaattgtgaaatcatggggagagaaatg

SEQ ID NO: 252081 - DNA, 365 bp, Gossypium hirsutum
gacccacaagagggaaagctggtccccctggtggccccgccccggttttccgggtttgacccacgcgtttcgtcacacgtacgtgttaacatagtgacaaatattcgaggctcatgtactaaataaacttggcagtggaccgattccatgtccgtgtagggactgtagcaaagtcaagtgagatgcaagcacatgtagcccttgcttgacgaataaatctaactctcgcgcatgaactacaagatcaaggtgattatttccttcttagtgttatgagtcttctgtggcatggtgcttcagttcatgattctcggttgatttatgcttcaaatcaggttgcttaaggtctattaacactgacatac

SEQ ID NO: 252082 - DNA, 380 bp, Gossypium hirsutum
atgcatgcagtcttgggaaagatggtgttggtttgagatatatcattaagtatagtaagaatatattaagagaatatgaagctttagaaaaatttagaaactctcattatagttatctttgttctataagaaggagcttctattcacctcagggtcaattgcttttcctgacagcttgttttctgactgagttatgagatttttgttttctttttgcttgggtagtggggagaatttcattgagaagtcaccctcaatgaaattgatttgtatttcattgatttggatcatttaccttactagcctcttccctgtgaaatgcttactttggcctgatcatcctcaggactcagttcaatgtgatatgtctttgtataagc

SEQ ID NO: 252083 - DNA, 339 bp, Gossypium hirsutum
agagagcagagctggctactgaaaagtatgtccccctctcgcccatcctagagggatacgttattttggtagaaaataccgagtacatggaagataattaggttaatagctggaattttggaggcatggtaggctacgttagcttctagtttttggttactttatgatttgttgtgtatagtaaaattcccgttttttctttacaactgcccctctgcttataatcgcaaaaaaaaaaaaaaaaacaatttggaggaaaaaaatttagggtttttaagcgttacttaataggcttttttcaatgaaagaaataatataaaactcttacaatattatagt

SEQ ID NO: 252084 - DNA, 352 bp, Gossypium hirsutum
gatttaacaaaagaaattcaatatgaatattttcaagggatttcccactattttccttttcatttgctttgttttaattattgcagattgtttcatggttgaagcagatacttgcaaacccagtggcaagctgagagggaaaaagcctccgccagggcaatgcgattctaattgttgtgaagacggaaagttttatacaacgtataaatgttcaccgcctgtgtcgagccatacaaaaggaaaattgacaattaacagctttgcagctggtggggaaggtggaggaccgtcggaatgcgacaaccgttaccactcggatgatgaacctgtggtggcactttcgaccgggtgg

SEQ ID NO: 252085 - DNA, 359 bp, Gossypium hirsutum
gtgatttgcattcccgattaatactcttgaagtatgaacctttgcattttggtatgctcggttttgtcaaatcaacatgtgtgttaaaactagactcaactcaccaccaagctttaaacaaacatggcctactcataccagcaattgctagtgtttctgccatttcattaccgttaagattagctattgaaaacgataacttttcaacacaggcaatcctcctatctaagtctgcaaatgaagcttgtcgcctatctaagtctgcaaatgaagcttgtttcgacgatggtctccttttttttatccaaaatccagtgtagactgttggtacaatcgacgtggtttaggctcaagaattg

SEQ ID NO: 252086 - DNA, 359 bp, Gossypium hirsutum
aaaaaatcttacagggactcccttctaggtagtaacatggaaaatctacgccaagtgatcttgtaataggaggttaactccatggaaattaaagttcttagtgatgatggtgaggattctttggaggaaacactagcgactcaagtggctcatatctcgcttacacaaggtgaaaaaggaagaaccaggtagaaacgggaaaaagcgttaattgtgaaggtctttgggaaacctctaggttatcattttcttaatcaaaagctggcttagttatggaatcctttagggattataaaaatgattgatcttgggtgcaacttcttcttaataaattccagcaacagaagtggattatgata

SEQ ID NO: 252087 - DNA, 378 bp, Gossypium hirsutum
atgacagtacctttccccccccctttcatggcccattttattgtctacctttcactactaagtatgaccgttcctgtctcagatcttaataaaaaacaaaacaaaacaaaaaaccaaaacaaaaactcattcaggttaaatttggccttaatttaatatacttgttagcaagcgtgtgtgacagagagtggggaaagctacatcactgaatattttgataaactttacctacttgagtttggtttatttttcccttttcctaaattgactagcactgactgtaatttatttccctgtttcatgtctctctcttccattctgcaggagttttagctatttgagattgtggaccatcagttttgcactttagagagcgtt

SEQ ID NO: 252088 - DNA, 376 bp, Gossypium hirsutum
atcgccacttcagggccgtcccccgcagcttttggcaggcgtccttgtccctgtcaccgccacgtcgcggacatggtgatttcagaaagtatggatatactcttcagaataagaggaggccttgatttagcttttcagctagctactcctaatgaaatttttctcaagaaggcactgaaacatgtgttgagtgacctgtcaaccaagctttcttcaaacgcccttgtgttcagaatttgccacagttcagtgtatatatggcctagcagtgacgtaaacaccattcctggagaactgactgatgcttccgcttgtaagaacatactgcgctttattcaatttgagccggaagaagatataaaacgaaaattcatga

SEQ ID NO: 252089 - DNA, 295 bp, Gossypium hirsutum
cggacgcgtgggtaattttccacttcattatgtattggtttcaaaccaaaatatgcaatgtgtctgacacaatcaactaacatttgccatgtatgtgacaaatcaaaagtaattttccattagttttagatagttttcaaagttaataaaagaggatttgagtctgtatcaatcctaagaacactatgtctatataatgcgaacgcggcccacatagtattttttatacaaattttcaatccaatataaaatgcatatatgacccatagtgagacttttttctgtcacaacacac

SEQ ID NO: 252090 - DNA, 364 bp, Gossypium hirsutum
ggacttttatgaatatgggtaaaattcggcctaacttgggtatattgaaattttgcatattttgtgttttgtgcaataaggactaaattgtaagaaaatgtgaaatgttaggggcaaaagtgtaattttcttatttatctatttttggactaaattgagtgaaaatatgtttgaatgagtttaatttgaatatgtttaaatcaagaatcaaagaaatcagatttggaccggggaaaaactaaagttgtcgattagtcgttccgtaccgattactgttgtccaaggtaagtctataagcaaatagatgttattcatttgattaaatatgaattatatgtgctgaaatgtataatgtgataatata

SEQ ID NO: 252091 - DNA, 363 bp, Gossypium hirsutum
ctagcttatacatgccatacttaaaaaatatttacactttcaaaagtaccaaaataaggtttgatagtgtggtgacaatccttgactatccccgagatttcagcagctttgatatctataaaacaatgcaaatacacataaagtaagcattccaaagcttagtaagctcgtactaaaattatcaacaatatataaaacataaacatcaaaccataagtatataaacattttcaatctttatgttcataccaatccactaaacttcatctaccacctaagtatcatacatacttgaatcttcccatacctattagttttcattcttacctcttgatgaatattttaagcctttcatacattatt

SEQ ID NO: 252092 - DNA, 369 bp, Gossypium hirsutum
attgcagggattacaggcttaagccaccacgcctggcctgtttgagatctttatttgtttttgttctgttacctttattgtgtatcctttggtgataatactttgtgtgtttttgtgtgccagaaggaaaaaaacccatcatattgggctttttttagactgtcaggaagttcgaatatttaccctacttaagtcaatgtgtttaatttttggaaagatgaaccttttctcagattattgtaagcccttgttctttttatcctttagcatttcaataggtgaagcaccataccggctttatcttttggagagcttgaaccctcccatgaactgaagagtccctccaggtttccctaggagtccatattt

SEQ ID NO: 252093 - DNA, 379 bp, Gossypium hirsutum
atgccgggctggcggcgggagtcggcgcctcaggttcctgcctcgcgtccctaggcggcggcggccgggcgtcccgggatggccttcatggagaagccgccagccggcaaggtgctgctggacgacacggtgccgctgacagcagccatcgaggcgagccagagcctgcagtcccacacggaatatattattcgagtgcaaagaggaatttctgtggaaaacagctggcagattgttagaagatacagtgactttgatttgcttaacaacagcttacagattgcaggcttaagtctgcctcttcctcccaaaaaattgattggtaacatggatcgggaattcatagctgtgaaggcagaaaggtcttcagaactatctc

SEQ ID NO: 252094 - DNA, 363 bp, Gossypium hirsutum
caagagggtacgcaaaagcacgctggtgcccctccgcaatatccgggattcgaccctttcgtccggtgtgacactcgcttgtacgtgccttgcgtaaataaaaggctgagggctgactttcaccattactgaccatggagcatgggccttcctagtgagatggatgctatacagacacgggaactcttcgacaacaaactagtcgctaagcctgatactggatcaccaaggtgttctctcggctcgctaacagggactattgcctcgactccgaaggtactggcactaacagctttcaatctttatgttcataccaatccacgggcgcgcgcttcactgctgtacttaacgagtgaattaact

SEQ ID NO: 252095 - DNA, 368 bp, Gossypium hirsutum
ataaaagccagttctctcaggcccctctcgagatccagtgagacaattttccaggggtaggccccagaaatctattttaagagctcctcagagtaattctaatggtcaggtttaggaaccaactgatgtatcttaaaatactaatatcaaaagcataaactagtataaacttgtcactctctcctccccaccccacccttttttaaaaaagatctcaaatcatgttatacccccagaactctcacctctgggcaagtaatttcaattcaagatacagagaaacattttataaaaatgtatcctaattagtgagacttggattccaataataacttaagtagcatttcaatataagatacccaattttg

SEQ ID NO: 252096 - DNA, 355 bp, Gossypium hirsutum
aaaaattaaaaaaaataaagaaaagaagaagaagagataattgacacttttataaaaagtaataatggacccaaaattaatggatgaaatcaaatcatagtttaatttactccatggatgggaccaactcaatctgattcaacccatattaaaacgatttgggtagtgatgggttaataggaatgtagtcgagtaagttgcgaggtttatgtttcgagtctatcatatataaactcgattagattttggtttggatgcatagatggatttaatcaaatgtgtatgatattgataatatatacaataacttgataaatggacaccaaatgagtgatgttgggtggggatgaaggtg

SEQ ID NO: 252097 - DNA, 367 bp, Gossypium hirsutum
atcaaggaactggtctgtatgaaggacttgactggctgtcaaatgagctttcaaaacgttaaatgaaactggatatctaaccaaggacatgtttgataaaattggcctaggcttgttacaacaaaattagtttgtatcttggttattaaacagtatctgggactcgtttgggcagaatattattttgttgccaattattgtttaccaagtataatgttgctatttagcaattgtgcttggttttaaagaaattctccttgggaaaaaagtatcctttttaaattttacttcccataagtgtaaatgcctggacatagctattgtgaaacctttaaataaattggtttgagtgctttttaagccccag

SEQ ID NO: 252098 - DNA, 314 bp, Gossypium hirsutum
cccacgcgtccggccggttaagtaatgtgatcgtatatggagcaaaaacaacttaccgtcaagtagtttgtgacaaatctgtcacgcaggaaatgtgcaatgcgaggtagcaaagaagttatgctaaggcgaacaaggcgatctcgatgctctaggtatctaagcacaatttcagctacttctctgtaccttgacatcatgaactcaccagtgttcctgataaagatgaagtttatgtcactaacaacacatatacacttatatatcatttcatatgacaataaaatatttcctaaatgaaatggataatcttc

SEQ ID NO: 252099 - DNA, 378 bp, Gossypium hirsutum
atcaaagtttaaatacccctttctagtaatgccaaagacatacattgttttaaattctctactttatagataacaaaataatgtttagctcagtaagaaatgaagtaatgagtgatcaatttgaaggatttttagattatttaatctttgcttatgttgctttttcacatgattaatgatgaaaatgaaatgttaaatcaacaaaataacatccagtgtttcataacatttttagtaagtttggtaaactttagtcccattatatacttttgggggacagtgttataaatcagaattttacaacagtttgcagcacactgatttgaaagtttccactgcaaaatgagaaagggttcaaaaatattaattattattaag

SEQ ID NO: 252100 - DNA, 394 bp, Gossypium hirsutum
aacatatcaagaggatgttttatacttgttagcatgctagaatggttaaatcatactaagtttagatgaagatgcttcggtaacgaatgtggcatactatagctcatactcgatgattgtgtcggttaaaaggtcttacacaaaagcttgcattgtaatcgatcgcaactcgtatgctagctgctctattaaaaatgatgcatctcctatcttgcggcatgacattgcttatcaagttcgtgcatgagacatctgaagcattcgcggattcctgttcaacaatagtaaatgctattggtcggatgtggcgagtagtgtcttatgcaactactaacagtcggtgatgctcatatcatttgtactcgagtgtaccatgtatatgcacgaatgactt

SEQ ID NO: 252101 - DNA, 398 bp, Gossypium hirsutum
atgagaaaacaagcatgcaacctgcacacttttccggtctgccccacgtgtagaattagtctagcgatagaaaactggtgactgacaaggatctacacacgtggtcatgcttgaagcaaaaattctgaccttctttgggcttggcatctgggtacagaatattaattaactttcttacttcctttctttctccatccttagttattccttttcaacatttagagttgccaggtaaaatacaggatacccagtgaaatttaaatttcagataaacattattcctttagtgtatttctcatatattttatcagaaatattttcacttaaaaaaagtttatctgaaattcaaatgtaactgggtgtgtcctatatattttttcttaaatctcacagttcta

SEQ ID NO: 252102 - DNA, 286 bp, Gossypium hirsutum
cccacgcgtgcgggttgatgaacaatgccgaacgatgcacgaaaagtgttgttggagatccttcttgctcaagttgtcagaatgttgcagaatctattcttcatgttatgtgagattgcgataatgcacgagaggtgtagacgtacgtacactccttcgaggatttggggcgcatttttctttgttctgttggacgaggggctctagctaaattgaactgatgctagcgcctcggttgttactcatgttgaatgacagtcttgctttggaagtatttgctgtaatc

SEQ ID NO: 252103 - DNA, 168 bp, Gossypium hirsutum
gtgctcggctgaggcgaccggctaattacaaatgcacgttcaatgcatgaacatatataatcaaattcaagcatggaagttaaactcttttggcattgctatttacacaataggattcaaaattatacaaaacatcctcaagcctatacatgccataggatcgagttc

SEQ ID NO: 252104 - DNA, 470 bp, Gossypium hirsutum
  unsure (1)..(470): unsure at all n locations
actatagaacaagtttgtacaaaaaagccggctgggcccgcgtccgcacttccgggaattcccgcgatatctttcttgatttaattgtaagaatctgagttgctttccactaccatttcctaagtccaaacatcggtgtcttcctgggggctaatttgcaagggaaagaatgaggaacagcaggactcttacgagctgcaaaggtaatttgcttatttaactattactaagggcaggaggaacagccaggccaaaatggtctgtgcttttgcatagcaacgtggctattagaatattagaataggggcctaccatcccattttaaaaagtggggaagaaataaaacaggataagagacaaagaaaacctgaaattgagcgcatcttgaagacaattatgagaatagaatagctattgacttagaaaaatcctattcatttcattgctttttctttaaaacattntctact

SEQ ID NO: 252105 - DNA, 352 bp, Gossypium hirsutum
cccacgcgtccggagatgacatcctcattaaagattcactcaaatcactcaaagtgtttaaggttcaagattaagcactcgattgtctaacatgaaaagttattaccataggcttgcatgaaaatcaaatctccaccacttgtaaatgatatgatacactaatcaaaaggtctttgcatggttgttatggggtttaggttacaggtatggatacaagctgaagagacaagggttagaattgagataatttcaatatcttaccccactatcagaaacttaattactgaaccacaaacaaatatctagaactattttacatgagttcatgacaactttagcttgttgagaatta

SEQ ID NO: 252106 - DNA, 269 bp, Gossypium hirsutum
accgaccgcctgtgattgtctgcttgcgatcagaacaccctagctctgtgaatgcgagatataagtactggcttgtgctgttagtcaatcgctttcgcttggccttcacgattcgtgctttgggggcagcgctttctgggaactttcaccgtgattgctacgaaataatttcccttcagaaataacaccttcaactgaaaaaagaacaacgtacggctaggataagtacgaagaacgccgggcaccctaatactatactcattcatgtt

SEQ ID NO: 252107 - DNA, 343 bp, Gossypium hirsutum
atcgtccctcagccatgctgcacttgggccacacagagctatgtactgcttcccaggcgtgcctccaggtccttgttcatgcatgttcctgctctccctcctctgcctcacttccttgtatatcaaaatcctactcaacctgtaagtcccaactcaaatacattttcccagctcaattagtccctgttagagttaatgacagagcacagtctgggttgtgtatgtcaccaactgtgtacattgaggtctctgatagattgagaatgtgaggaggggagagagaccactttgtattcacctttatccttgcgtacctcacatgacacctggcacgtagctcatg

SEQ ID NO: 252108 - DNA, 377 bp, Gossypium hirsutum
taaattgagtatacaaatggcgaaaattttttaacgaaatttttataccataattctaacatgacatagaccataaaataatattaaaataaattttacgatatcaaatttgtggtctcaaaaccactgttccaatttaactgaaaacgggctattacactctatggttaggattggaagaaatttaggaatggtgttgagtctctttgaaaatttgcctaatgctactactagtcttgcacagatggataaatggtcgatttctagatgtttagagaactacaatgattctggtgcttagattcttataattgtctttggcaaccaaagagaaactctaggttaaccttgaactaagcaatcaaagaaaatgttgt

SEQ ID NO: 252109 - DNA, 383 bp, Gossypium hirsutum
  unsure (1)..(383): unsure at all n locations
cccacgcgtccgtaaaaagtaaataaatttggaagaattaaacaaagacttgatgatcaaattagttaaataccttgaatttgttatgtgatgagactggttcgtcgtccttgatatatatatatatggggaagaaaatagatgtcagaagctaactgcgaacaggtccaagagagttggataaaatagtaccgatgaataattgtcacctagtgtcggatttactttcgccgtggtccacggacacacaaatatatataatagttttaatgtcaataatcgagttggagaacaagggcagggatgtgaacgggaggaagcatggttaaggagtgagaataccacntgtttggagtggagtggaggtgatgataaggttataa

SEQ ID NO: 252110 - DNA, 388 bp, Gossypium hirsutum
cggacgcgtgggttggttgggatggttgaaatgaaaaatgaaaaggcctatttatagttgaagttcagggactaacttgcaaatggcctaaaaaattagggaccaaaattgcaattatcccattcaacttttctacatttggtgcaacttgctcaacctttttaacaagttgcttcctacctttgttgacctttcaacacaaaatccatattagcaactatgagaatattctaaaatgataacattgtccaaacttccactgtaacaggacactcccaaagtaagtggtcaattgtttcagctcgttctccacaccaagggcagcttgagttattagctaacttcctatactgcatatttaccttcataggcagatagttccatgaaa

SEQ ID NO: 252111 - DNA, 380 bp, Gossypium hirsutum
cggacgcgtgggtttcattttaactggtctttcaactctttctataaacctgaagaaaggaaggaagctagccgaatcctgacagcctaaacccaatggctaaaacctgtatctcaaactgcatcaatgacaccagggtccctctcccagtcaggccaacctacgtgaacctctataagtggccggaatctgatgctgagtttgtaaggtcactgagctctgactggcgcagtaatggaggtcgtgcacaccccacggttgttgatagcatttcatgcaggcaaatatacctgaggagctacacgtttcataggaacaaccaaaccgagactgaaaacacaaaatgttttggcagatcatcagttaataagaaggaaaag

SEQ ID NO: 252112 - DNA, 381 bp, Gossypium hirsutum
aacaaatttccccacccaaacaaggcattatcatcttcagtctttttcttatattgggggcattcgagaataatcagaaactgcaaagggaagccacaatgttgtcattttcttactcattacctctcttcctctgttttatctcaagctttaacggaatctttgctgccacagagttcgatttcggtacgttaaacctcagcagcttgaagctccttggtgacgctcacttaaacaatgggagcgtcagactcactcgcgacctccaagtacccgcttccgtcgccggcagagccttgtactcgaaacccgtcagattccgggaaccccagactcattctccttgtagcttctccaccttcttctccttctacattacca

SEQ ID NO: 252113 - DNA, 378 bp, Gossypium hirsutum
atcacggctgcagccttggctacgggtgcctgcatcgtaggaatcctctgcctccccctcatcctgctcctggtctacaagcaaaggcaggcggcctccaaccgtcgtgcccaggagctggtgcggatggacagcaacactcaagggattgaaaaccctggctttgaggcctcgtcacctgcccaggggatactggaggccaaagtcaggcaccccctgtcctatgtggcccagcggcagccttctgagtctgggcggcatctgctttcggagcccggcacccccctgtctcctccaggccccggagacgtcttcttcccatccctggaccctgttcctgactcttcaaactttgaggtcatctagaccagctggggg

SEQ ID NO: 252114 - DNA, 371 bp, Gossypium hirsutum
ggagaaactcacagccggtgagaacaccaatttattcctttctagacttgaatttttttgtatataatttaaactcagagagtaactctcaataacagcaaacatcttggtaacagatcaaccattctgaaacttgcatttctttttcatccaagaataggggaggaataaaacatgtgaaaaatatcaaattatgacattctaaactataatttagttagaacaaaatccccctctaaggttcttgtactgagcgtacttggcccataataagatgatttcagaatcgcatttgtattcgaaatacaaattccataatcaagaggcgcacgttggaagaagaaaaagatcaaatgtgcagctatacacaa

SEQ ID NO: 252115 - DNA, 238 bp, Gossypium hirsutum
atcggcgggggaggagaggggaaagacacgtttgcttggtttagtgaaacacacgtgactttatagctctgtggtcagcctacctgtctgttctgagggagagtgcgtgggagggaacccatgctcaccgtggcaaacaccggaaccccatgactagcccctcacctggcatggagctgcctggtttgggctggagcagagctggtttcccagaatgttcctttggctcacatgtggt

SEQ ID NO: 252116 - DNA, 381 bp, Gossypium hirsutum
  unsure (1)..(381): unsure at all n locations
aaatgataataatgatcaactttgacataattttatttattttggtagatattgatggatggcaaggtgggtcaagtacaagtccatggagaaaaggggagttgagttttggaaagctaatcaaaatcaacaaaaatgcagctaatgatatcaacctctctcttatagatttgtaccaaaacctgcttccttttttttctcttcaactgttaatcaagcaaccatcttttttcatagataactttctcttgtttccttttttattttattttattttattttattattatagtaaggttatcaatttcaattatttgaaatttaaaattgaattaatataaaatttgaagctacataaacaacanatcaaatcacatgctt

SEQ ID NO: 252117 - DNA, 373 bp, Gossypium hirsutum
gcacgaaattgcacatactgtagttttatcactttagattaccaaaaatattaacccacttatcttacgagcattcgcacactcgtaagttcccaaaataccgacttttcgacatttcggcttttcggcttttgccgatctagtctataagagggtgtcagttacacacctatttgcgatgattcgttgacgagatccacgcactaactacctgcaattatattactaccacgttaatctaactaccgaaacgaactacatattaaccccttaccctattcggccaataacagcttaggcactagcaatcctacctttgcctgaattagcgactagattaatatctggttgttccccttgcccaagcccttga

SEQ ID NO: 252118 - DNA, 167 bp, Gossypium hirsutum
gcggtgaattacaagattcaggacaggggctttatagacgattctaacactgttccaccgcaacttcgatatctgatgccaaatcactcatttacctgtttggatccatccataagaaaatagactctgcaagcgttgtttatataactcagtcatgcttgaatgcc

SEQ ID NO: 252119 - DNA, 382 bp, Gossypium hirsutum
atctttaaagcgctatagatttggaaaggatactgttggagagcgatataagcataaggaaaagcaccgttgtcacatgtcctgccctcatctctctccttcaaaaagcttaataaacagagaggaacagtgggtccaccgagagccttcagaatctagtccattggctttgggattgcagacacctttacagattgactgttcagaaagttctccaagtttatcccttggaggattcactcctaactctgagccagccagcagtgatgaacatacaaaccttttcacaagtgcaataggcagctgcagagtttcaaaccctaactccagtggccggaagaaattaactgacagccctggactcttttctgcacaggacact

SEQ ID NO: 252120 - DNA, 385 bp, Gossypium hirsutum
tagagctttattttagccaaagacaaatgcaagatttaaaaaaaaaaaatcaagtaattcttcgtgtggtctccgtatgaaaaagaatttctataaatacctattaagcgttagatgttaaaatgcacccatccaacggccaccaatacacacatgaatcgctctatgaaaaacagcgaaagcagacggtaatttgcgtcctcttatttcttccggtccgcggcagcatcttcatctccccttacccttaaaagaacaggttagctatttattttgaacctaaaaaacaaacaagaaaaaggaaaaaaaaagcctatatatgttttaattggttcagttttctgggattttggtgtttctattttcatcctttatttttgaaggg

SEQ ID NO: 252121 - DNA, 249 bp, Gossypium hirsutum
gtccagcagatgaaaagtgtatggttctttcggaagtaatacatagccttgggaggtcaatgtcaacaactagtgacaatcccggtcattcactgtggagatttgctgataagggcttaaattgtgtgctagttgttgatatcaagcaaacatccgtggacagcggaccaaatacaaaattgagttgcctgcaaggttgcgtatatggaaaaaagttgctgatgtctatcaaattttccttgtgggtga

SEQ ID NO: 252122 - DNA, 370 bp, Gossypium hirsutum
cccacgcgtccgatatggtgccaaagtatatacatatgcacttgaatgaagtgatgattaaaactcttgttagacactcgtttacgacggattcaaaccgtgtggccccatctcttaccatatatattgtatataaaaaagtacatacatatacatatatagtgtgaaagtattacataaaacagtaactctgaataccacctgtataaacatgtgaattcttctatatatttgttctaattattagtcaatttcaattaaattaatttttgacttaaatatccagtttaatgcttggaattattgattctattaaagctataataatttttttaaaaaaataagtaatttaatttttctcaaaaattac

SEQ ID NO: 252123 - DNA, 337 bp, Gossypium hirsutum
agaaaatgagggaatccgatgatatagcagtggacaccaacagcagtactccactgcttgaagaatcagaggttaaagataaaaaagaagtaagtggaatggagcagtggagaggagagattgttaagagcatcgtatatgcgggccttgaagccgttttcacttgcttctttctcatttcctccgtatctgctaccaatctctcatcagtggaggtgttggcgctgggcattgcgaacctcgttgcagatgggatatcgtcgagccttggggattttttgtcttccagcaccaaggaaggcttagctatcaaggaaatggcggtgactcaatggga

SEQ ID NO: 252124 - DNA, 276 bp, Gossypium hirsutum
atcgtgcacagtcacctaaaaaaacctttgaagaagtactgaaaccaccgttaccgatttataagtatatgatcttgtcaacctacataattctagacgaagcatggggtataagaaaaggaaagagcaagaaccgttgaatctagagtgtaacaaacaaaaaccttgatgaacgtcagggctggtattgagttaggagtcgggtacgagtacctagagatagatcaacagctgaacaatactacatactctcttgctctttaccaagcaattaac

SEQ ID NO: 252125 - DNA, 242 bp, Gossypium hirsutum
ctgacgcatgtgaaaaaactaaaaaaacctctgaagaaagggctcccaccctcagggctacgacctcatggacggactggctcgttctatggcttggcgtgcttggtcttcacgcgcttaacgagccgccacctgaggcacccaatacggcggttagggtttcaaaaacccttccttttatttgccgattctgaagggtcaaccttatcccataagagttgaggatgtatatcaaagatctc

SEQ ID NO: 252126 - DNA, 401 bp, Gossypium hirsutum
aagaatgccccgggggagctgaagctcaagctggagcgggtgatgaagaacccggacaaagcagtaccaataccagagaaaatgagtgaatgggcacctagacctaccccatgaatttgtccgagatgtaatggggtcaagagctggggctggcaatggagagctacatgtgtacagacatatgcgccggagagaataccagccacaggactacatggatgccatggatgccaagcaaaaataggatgcatagtttcagatgagactgcaaaagaataaaattgctgtataggagcagactgcaaagcgccggaagaagcgccagacgttaaaagagaagaaattactggcaaagaagatggaacttgaacagaagaaacaagaaggaagccggggaggga

SEQ ID NO: 252127 - DNA, 398 bp, Gossypium hirsutum
atgcagaatacagcactcggagtgatcctaaacgtgtttttcagggcaaataattattcacatattgttataagcacatgacttctgatgtttattaaaaccacaaaactaagccctgagaagcaaaatacaaaggactgaagagaaaatttgcgaataaaatgagaaaccagatctcttcagacgtgaaccaaaggagcccgcgtttctcagcagacaggagaagcacaggaggcggcttgtcgacatttcatccatttggcgctggaatggccagatctactttttactttttcttgggttttgtaatacttggctcatgataaagggacttttcagcgttcgtttatactactgggctgggggaacactgctcacatgatccacatgattacttt

SEQ ID NO: 252128 - DNA, 197 bp, Gossypium hirsutum
gcggttgttcatctcgtgatagagtcggctcattttatagcacacacagctgattgcacactacacaagatcgcaattacttctacccaactaattctgagactgtatggtataatggtctcagtagactatgaccgcattacacaggttacctcatcgttttagacgtaagcccatggatccctcggttctagact

SEQ ID NO: 252129 - DNA, 334 bp, Gossypium hirsutum
cggacgcgtgggtttgaaataaaatttcgtttgtatttttcgccggtgcaaatccaatggctgcgatctttcaaggagttggagctgccgcagctttgtcatcctcaccgtccaattctttcgattccaagaaattcgtttcctctccttgtagacccttctccgtgaggaaaggagccagctttgcagttgtcagatccgatggaagagtaaatctgaaccctaagggccgaagggcccaacaattgatttgcaatgcagtcgcaaccaaatctgatagcgccgctgcttcttcatccctcgaaccagggcatgagcttttaatttttggaac

SEQ ID NO: 252130 - DNA, 246 bp, Gossypium hirsutum
acgagcgagcaattttagaggctacacatgcgctaatggatcatcgctgataccgagcatttggcatgattttacaataacccagagctatatgaatgtggcgcttgatgatatgcagatacattttatagctaaaagctatatttgttgcatgtgcatgatttattgaagtacttgtatttgctgatcttatttaatgcatctccgaatatatgtatctaaatatggtacggataaaactcttta

SEQ ID NO: 252131 - DNA, 391 bp, Gossypium hirsutum
cccacgcgttcgcacgtcgcctgcagacctcaagtgcggatatatttctagcatataacctgcggatctcatgtccggatatttttccagaatatagcctgcggacctcatgtccggatatatttccaatctcatgtatatttgatcatattttaacacatctcaatcatcttatcacttaataatcgtatattacattcgaatataaactcgatacgcacatcatcattcacattttagctcaatggttatatctcatatcactcattctcttcaccatttaatcttaaattcaaagtgaccatcaaactataagtcatatacatgcattatctattatccatctgaattcaagtgcaagccaaagatcacaatttacttactatactct

SEQ ID NO: 252132 - DNA, 290 bp, Gossypium hirsutum
cccacgcgtgcgcccacgcgtccggttggactctttttttgctttgattatttattgcaatccaaagcacctatctagagtgtgcaatcccccaaggctattagcaataaacattgggaagagatacctcaaattattgcagatttcaacttttacttcccttaaactttggaagcttatgtttgacacatttgagctttagattatttcttcttattggaagccaacacttatctgcgtggtttgcaaactttactaaagctattagccatagaaatttgggagagaga

SEQ ID NO: 252133 - DNA, 397 bp, Gossypium hirsutum
  unsure (1)..(397): unsure at all n locations
atcaaaaactctataatggaaaacactaatttagagtaatcgaatatattttttccattgatttattatttttgtgttcccttgtctctagggtactctttcttggtatgggagtacccaagaaacagaatcagtaatggaaagattgctcgaggagcaagaaattgaaaagaatggaaaattagtagatgagagacactaagtctgggccacagttgaggctgatcaactagctactgtcttctaaagcacctgccttgctagtggtcagaatcatgtcattccacctaatctgtcttagcatagctggagagacactagcattattacttttccactcttttcctatattccttngggataaaaccctataaacatgagttttttctttgttttt

SEQ ID NO: 252134 - DNA, 324 bp, Gossypium hirsutum
atgttttaaactctaatcctcagaactgttctctgaaataggtactaatactaaagcttattgtttaaggaaggcagaaattaagtaacttggcctaagtttgcataattatgatctgggatcaatatttgaacccatacaggctgattgcagagcctgcactcttaattgagtgtgatatttatgtgcagtacctggctataagtacccacaaaacatttcaaattctttataaaatttgcttagttaaaaaaaagtaccaattgcatagtatggttataagtctggtagtagttaggctttttacgagacatgcctcttact

SEQ ID NO: 252135 - DNA, 215 bp, Gossypium hirsutum
atggggtggagtaggacactggtccttaccttggagatcctagtttgatggaggggacaggttcctgctgtgcagattgtcatttggtgggtagacaggaacatggtgccatgatctttgcttttgacaacattatggtgaccaaaagcagatctatctgtggggactctggcctggtaggagttaggtacatggaccttgaaacccaaagttct

SEQ ID NO: 252136 - DNA, 330 bp, Gossypium hirsutum
cggacgcgtgggacaaaacgtagatagtcattgggctttattgtatcttcaaggttcacttggcagtaacttttttacacatcataatataggcaggagcggatagaactttaaagaaagtggcattgatacatgccttgaaaccttcattaatttctcctaagtttattttatccctacacaccaaaaatgtatgtctgtgtgtattattttcatgaatataatatttttctattgtagataatatttagtcatttttactgaatcagattcattatatgttatattaccttatgtcaaaacctttttgaaaatcgactttttattttt

SEQ ID NO: 252137 - DNA, 402 bp, Gossypium hirsutum
atcatgtgcacgcacaggaagcctttccacatatcacctcatttctaagaaataaactgcaaggtgccaagaaggttttatttcctttttttttttaaagatgacaaatgtacagatgttaatatatttttggtgccaatggcgatgtttttaagagcgggacggagctggcttttctccattcccatgcgcttctatttatcctggacatttcaaacctcctctgtgccttggctctgggcaggggctgccccagcccacccccattctttgtacgtgctgagacagtcactggaagatcttcctccagcggtgccctggatggctgctcctgcaaacagcacgtggcatcttctgctcttccctccaggctctgccctgcacatcctgtcaaggcaagcc

SEQ ID NO: 252138 - DNA, 363 bp, Gossypium hirsutum
atggtgagcctcgccacgcgaatattggaccgcgtgtgcattcaaaacctctggcattacaggtctgagcacctgacccctggcgtcaataattaattagtacttagatgtatgcaaactgtatctattatataagaacgtattgttttaccgttacacacctcctggcatagctagtaaggctgccttaggcttgaaatatgacatactaaaagcattcttttaaagatacagacacggatagggtgattgaaaatgctctatctacaaacaaatagctccttgcgcatatatgtctaaaaccagaacaactggatcgaaagattgactgcatacgatctaatacgatcaagcttatttatc

SEQ ID NO: 252139 - DNA, 385 bp, Gossypium hirsutum
cccacgcgtccgctcacatttgagctactcacgggcccttttatcaagtcaggacctggacccccataattatcaggtaacgctcactcattgagctactcacgggactgtacacagagtcagtacctggacccatgttacgtacaacattcatctcatgaactcaaagtcaactcatgagttcagactagataatttttgtagcatgcccctttgtatcctatgttatgtctaaggtttaacgggattccacatctaaccgaataacattgtatttgctcgcaatgtaatttactcagacaacatgtcatttacacattcatggcaacaaatagactttagatacatgacaaaaataagccaattacgcatgtatattatcaaa

SEQ ID NO: 252140 - DNA, 359 bp, Gossypium hirsutum
atcgattgtatggacgttatggagaatttagggtacatggatctgatcgataacaatgatttattcgatcacatcttcaatattttaccatgatgataatggcctagaagagttccaacaagatcaggaaaaccaacagcagcaagaacatgattcgactcaacagcagctggggaaacaagtgggggcaatgatgtacaggaagaacgaatgatcagcccaacaagagaaagcttcggatgatttaaccatggggttcttggagtggctcaagaccaacaaagagactgggctaggataagacttgtggggagttaaaatcaagaaagctaccatagagtgtgccgcccggcgtttgg

SEQ ID NO: 252141 - DNA, 295 bp, Gossypium hirsutum
acggttattttattaattaggtttaatttttattagttacttgtgagattaggatttgttggaggcctatataagtattggccagccaccctttgtaaacaacatcttattattatttttttctatcaaatttcaaatttgatgagcgcgggattttctttggggatttctccaagaatgctcttttgagtgctctataaaagaagttgaacaaacttttgattgggggcgccattttataacctaatgctgccattgatattatttggaggggagatttaagccgcttgaagga

SEQ ID NO: 252142 - DNA, 365 bp, Gossypium hirsutum
gggagatagagtttggtattgagcttgtacctgggactacgccgatttcgatggctccttggaaatttcggcaatgagggaggaagatggacacaatttttgacttattttccctttttattcttttattaaccaaatgacaaaaatgcccttaaggcatttctttcaaaattttcctattcatgtccatttttgtccaaaaatatgaaaattggtcaaatttccattaaggccctctaattaataattcaaagctatttcatacttaaagcttctagaatctcatattttgcaacttttgcaatttaatcctaaaaagtaaattggacccttattcaaaaaatttgttcatggaactttcacac

SEQ ID NO: 252143 - DNA, 380 bp, Gossypium hirsutum
cccacgcgtccggaaattacttgaatttattttaataaaatttaatgacatgttataatctaattcatatattgtcaatttatcaaatataagcttttatttttcataaaaaagaaacatctctctctccttttctttttttagaaagaataacgggatgcttgataaattcataaattagcatttaaatatgaagtattaagtgtttttttgttttcattatatattttttacaaaataaaactaaataataacaatattaataatacacatcgataaaagtagatatattctttcttaccttttattgacgataatcatgcctaaaatcaataaataggatttttctcaaagctactgaatgtcactttttagggatg

SEQ ID NO: 252144 - DNA, 396 bp, Gossypium hirsutum
atgtcctttctcctccactcctcccagcctccaccgcaaaagaatggctacgagaacccccagcctggagctccccttgccctgggcacattgttcaccacgtctttgtttttcatacccctcccctctccatggcagcatcttggtgaacatggatgacaacatcatcgagcactactcgaacgaggacaccttcatcctcaacatggagagcatggtggagggcttcaaggtcacgctcatggaaatctagccctgggtttggcatccgctttggctggagctctcagtgtgttcctccttgggagagacagaagccccggccccagaacccggagacccgtctccctcatctcacaactgctgttacaagactatgctggggagtggggcaag

SEQ ID NO: 252145 - DNA, 406 bp, Gossypium hirsutum
atgaagctacaggaagccagaattcttttgacttggtgggtaccggagggttggaagaatctagattgagtattccttggcctttggggagcttgctctatgcaaagtcacctaggaaatgatacttcccccactgtgaaacactagctagagatgacagacaaaaagcacatttgttgtaatctccctttgacgggatctaggttggaatagatgtcgaagcagctgcttctaggtagtcaacgaagatgtcaactagtaaatgacagcagacaaggaggatcacagcagagttgtaagattctagatatcaaaaagtgcaagcagtctattgtactcaccatcgcatcctcagctgcccagtgcccggttttaacttgctgctcaatgtatgtgtcaagtttta

SEQ ID NO: 252146 - DNA, 354 bp, Gossypium hirsutum
atgacatttctatcatccaaaagcccactgcagcagtgggagctggagccacaaaaccagaagggatcgcagtacagcaagagagagagaaatgatcagctccactcaatttctcagaagttgcaacttaccaaaataaaaagatatggcatatgaaccatttacacttggcaaatgccatactgttggctcctataaaaggtcatcagctccaatggacatttctcatcttgaggactgggttgaaagcagatggtgacaaaggtggtaaggtgagggagatggtaatttggcagtggccacaataaaacctaacataaaaattgtactttacagtttttgaacattttcctg

SEQ ID NO: 252147 - DNA, 382 bp, Gossypium hirsutum
catcacttatgagttttacgtacataccagtaccaacttgaaacattagcacatcctttcacaactttgacattcctgatgaacacttggaatattaacggatactcagaaatcttgcacataagtgccatatatgtagatgaagctacctcatatctcacaatacatatggactcgttttcgagctactcacgggcctgctcacacaagctgttagtcaggacgtagctacacagtgttgctcacacaagctgtcaggtatctgcaacacatgctgaactacccagccgctagtaggacgttcgagaccagcacccggattacataatcacatatagacatgggttcctagtgacatgtcactcgtatcctattatattct

SEQ ID NO: 252148 - DNA, 202 bp, Gossypium hirsutum
ctctgctgcattttttgtttgtgtctgtaggtacggcgtacagagggtggacgtggcatgtatggaggtagccgtacggaggcgtgcgtggctggggcagcagactagggtttctttgtttgcacattaatcgggctaggttaattgggtttaggtttgggctaggttaatgtgcaacccagtacaaaaattaaataaaaca

SEQ ID NO: 252149 - DNA, 380 bp, Gossypium hirsutum
atttctcgcataataaaacaagaggttgaaatcataaataaaaattgaacaatttacaaagcaggttaaggtgaatagaagttttgcaccaggtaggaaaccaggaagaagaggaggtgagtccgtcggactgcttaagtaccaagctcccttcggatccaatcctagacatgcacaccaccattgccacaccttaacgactcgtataattttgagaaaaccgtctggttatgtctatcttaagaaaatgattaagtttgaaaacgtttgcttagtggaagtcttacttgtaatcgtgttattttgaagtcccttaatgtttttgaaaacacgtgctaaagctaacctaatttgctttggcaacaatattttttttaata

SEQ ID NO: 252150 - DNA, 331 bp, Gossypium hirsutum
cccacgcgtccgcagaatactgatagattacagatctgtaaccttcattccaagtgtttgttaatcatctacaaatggcgctgtgggcaacttcttgttcgtcttctgagaagcttttcctcgcatcttcagctgcaacaagaagaaggatgggaagcagaagaagagatttagttcatgttgggatgacagaccaggctgagacggagactatatcaatagcctacaaggagggagatcgtgaaaggcctaaatgggcagatgagacccctttctctcgccttgttgaagctctcatttcatttaaacccttttactccctgcttaagct

SEQ ID NO: 252151 - DNA, 408 bp, Gossypium hirsutum
ataacgaaccgcagtgttcaccggcgaggagccagccctgtcccggtcagagaaagacgacgaggatacctgggagcgggcgtcggccgggctgggccgcgccggtgcgggctggcgactctgctcctacgcttgctgctgtctctgggaactgggtgccagcgctgaggggcttccagcggacagggacccccttccccggctcccctgcccaccctgccggggagggcggaagatgccggtgaagaagaagagaaaatcccctggggtggcagccgcagtagcggaagacggaggcctcaaaaagtgtaaaatctccagctattgcagatcccaaccccctgctagactaataagtggagaggaacatttttcaagcaagaagtgcctggcttggttttatgaata

SEQ ID NO: 252152 - DNA, 387 bp, Gossypium hirsutum
cccacgcgtccgcacatattgattgcgtgctttcagagataagttctaattgttacaccggtttaataattaaaagaattaaaagctttttcctagcatcttttaaatgtctaaaactaaaaattgatatatatttattatttaggttgaatctccagaaaagatacttcaatatctaactccacatccaagagaaaacggtaaaaggatggcattgatggaaaataatttcttgaacatttgaaagtaagcttattatatttaaactttgcaatttggcttgtttatttcaaagattccttttaaataccaaagaataatattacatttttaatcattaaattagtttatatcatatttatcacatggtattattatatcatcccc

SEQ ID NO: 252153 - DNA, 401 bp, Gossypium hirsutum
attgtatgcgtccgtggtggaggacatgatcctgaaggctacagaacagctggtgaatgatatcctgagacaggctttggcagttggataccagacagcttctcacaacaggattcccaaagaaattacagtgagtaatattcaccaggccatttgcaacattccttttctggatttcctcacaaacaaacacatgggaatattgaatgaggaccagtgagcggagtgaggtgccctggagaagcaagctttgaaggcgcagcgaagctgtaactgaggaccctgctgctcgggaaggaggtggtttccagtgcgcctcgggatgtcatggctacccaaccattggcgcttctgttcccgcgtgccaccaacatgctccactccagatgaaatccattgga

SEQ ID NO: 252154 - DNA, 364 bp, Gossypium hirsutum
cggacgcgtgggtttgaaatcttttctgttgggggagatgtatccgatgctaatgttgtgaagttcagcaatgatggacgactcatgcttttgacaactatggatggacatattcatgtgctcgattcatttcgtggcacgcatttatccacttacaatgtgaagccagttcctagcaattgcacgttagaggcatcatttagccccgagggaatgtttgttatatcaggttcaggggatggtcgtgcatatgcttggagtgtacgcagtggaaaagaagtcgcaagctggatgatgaatagtgaaccttctgtaataaactggaattggatgaacaccgacactgagcctcccgtcattaagt

SEQ ID NO: 252155 - DNA, 384 bp, Gossypium hirsutum
atcatcatccaagtcatcctcaaggcagctaagcgagagcttcaagagcaaagagtttgtgtctagtgatgagagctcttccggagagaacaagagcaaaaagaagaggaggaggagcgaggactctgaagaagaagaactagccagtactccccccagctcagaagactcagcgtcaggatccgatgagtagaaatggaggaaggttctctttgcgcttgccttctcacacccccagactccccacattttggtaccagtttctcctcatgaaatgtagtccctggattctgtgccatctgaacatgctctcctgctggtgtgtatgtcactagggccgtggggagacttcttaactctgttgcttcccaaggatggctgttt

SEQ ID NO: 252156 - DNA, 331 bp, Gossypium hirsutum
acgcggacgcgtagggttatttcacatttgcattgtttctttttttcttagaaactcaagaaatgttcaacacaatgtccatggaggaatcacttataactccaataccaacaggtacaatggagtgttatacctagtacaaaccaagaatgcctgcctttttcctaatccctaatgccaaacgaccgactgttctatgacacttacagaattgcccctggcggataccagactatacagcacggactgtacagaatttaaacacctcttccgaaattcaaagaatcgaacgtcagttcactaggcgcttgagagttcttaggtccctttt

SEQ ID NO: 252157 - DNA, 363 bp, Gossypium hirsutum
atcacagctcaaatcgataggcccaattgcattatcatttcccctgggcttctgaattttccagtttaatggtgaattctacataatctctctccatatcttttgccccattacattttgcaatttcttctaagtatgtttcgatattactgtaaatgtgaattcatgctatctaatcaactcaccaaaggacatgatttgcatcgttgtgaaaattcttcagtatgacagatatattattgttcgttcactgaaaatcctcaaatagaatcttttttggttaggcatatctttcgtcaaaaccaagagcgataaaagctttagttcttcacctagcaattcaattattacatctccatgttg

SEQ ID NO: 252158 - DNA, 395 bp, Gossypium hirsutum
atcgccgatggcggagggaacggcggaggcccctctagagaacggtggtggcggcgactcaggagccggagcgttggaacggggagtggcgcccattaagcctcaataccttaccaccaaggagcagtttgaccaattcctggaagccaaagggcaggagaagccttgccgggaaaccgaggtaggagactcagctggcaatgacctggctgagcctgaggctaagcggatccgactggaggatggacagacggaggacgggcagacggaggaggcagcagagcccagggagcagtcgcagactcagaagagggcccggggacaaaacaagggccggcctcatgtgaagcccacacactacgacaagaacaggctgtgcccctccctgatccagg

SEQ ID NO: 252159 - DNA, 362 bp, Gossypium hirsutum
gtttcttataaatgggaacaaaaagttttacgataaattagtttgtattcttgtgcgatatacggatcatttgtgtatatatacttttttagttttatatattatttggtattcgagtttgacattttttttaatgtgatgcctatgttattttctggtccaatttgatacctatatttgataaaagtaacgtggtacctatgttaactttttagtgtttaattcaagttctaaggttgatttgatggatgttaattggtaattaggtttgaatatttcatgattttattaatagaataaatttagtgttaattgtaaatttgtttagtttttcatttaatttgtcaaatacagtatgatag

SEQ ID NO: 252160 - DNA, 383 bp, Gossypium hirsutum
atgtttggtggttttcttcctgtttccgcattcagtccttgtggatgatgacggcatcaaagtggtgaaagtcacatttaataagcaagactcccttgtaattctcaccatcatggtaagccttagggtctcattctctgggttatgcacctgccaggctgggacccgggacacttacattcgtttcctgacttgccctgatgtaggccaccctgaaaatcaggaactcgaacttctacccggtggcagtgaccagcttgtccagccagattcagtacatgaacacagtggtcggtacatatgtgactactaacgtctcccttattccacctcggagtgagcaactggtatgctgttcttttaggaaccttgccccacaggcc

SEQ ID NO: 252161 - DNA, 281 bp, Gossypium hirsutum
atctggaggtctccgggagtccccacgcaccaccagggaagcattcgctgggtccagaggttaaacgaagaggcctccctgcgccggctgctcgttcctgtgtgccggtgtcgtgatgctggggagcgctgagactcgcaagcgggacttctgaactgctggggagtcggggggcaggcagacagcgcggacggtgggcaccggcccggccgccaccttgctcacaatctggccacttgggaagaaaacgtatattgtttccccttctctgcatcactttt

SEQ ID NO: 252162 - DNA, 369 bp, Gossypium hirsutum
gccaatcccacttggtgtcacctttgcttgaacccatatcttccttgttgccataacaatgttggcagaaaactcacatactatacaattaaaaataatctaaattgctttttttttaaatatctaaattgagtttaggggtgagcaaaatctgatttaattcaaaaaattttataaaaattttaaattttgaattaaatagttcaagttatttgagttaatcaaattattcggatcaactcgaataaaaatttaagtttttcggtttaactcaaatatgaattacacagttcgagttatccgaaaatccgaataagaaaatgaaaaactacgtcgttttgataaatatttaccttttctaaagttaaa

SEQ ID NO: 252163 - DNA, 128 bp, Gossypium hirsutum
acttagaacgtgcaagcgctgtaccgtccatccggtcccattaccgcccagcgcaagggagcagcactcataggtgtgccaccgaatgcttggggcttttactagaactgttgtttagcttgcatcca

SEQ ID NO: 252164 - DNA, 366 bp, Gossypium hirsutum
cggacgcgtgggctagcttcgatttatctaaaaaacaaggaaagaacacacaaagtaagctttaaaagctactaagacatatacaaataaagtcatcataggaatatttacatatcaattcaaatatgctaagcatagctaaacacatacaagttcacaaacctttcttattaaatacatattcaatatcataattgaattcatcgaaatattcccatttcaatacttgtatgaatctcgtacgtacctaagtcacttagctcatttacacattctttctcgacttgactttgcccgttgaaccattcaaagttaaggatactcggaaatcacataaagctcatataatgccatatcccagatatg

SEQ ID NO: 252165 - DNA, 355 bp, Gossypium hirsutum
cacaattgaagttctgatcggtccggtttaaaaaattatttatattatcattcaagccactttattataaatattggatgcagatcaattaacattaatcggccatacctttgtgtgaaaatatggcccttgtgatagagatttcgcgtatccacactttgtttgcattgaagacttttcatttaactttgtaaaaaataaagccaaccgtggtgcatgtgatacgtcttgtcaaagaagaccgagggctttctctcctactgctcctggaagtgctgatgcagttacacattttgttaataggcagaaatgctacactattcttaattcaaagaattctggccatgtattcggc

SEQ ID NO: 252166 - DNA, 359 bp, Gossypium hirsutum
gtgctagatcaattttaacctaaacactagccacccttgggttttgtacatatgtacatattaggggaagggtgaggattgttcgatttatgtggtaatcgaatttgttaattgtaataatattgaaatggtgggattatgaatctattgtgatacaaaacgcacaagaacactaagaagattgaggtaatgttaaagtgattgggtagcttgcatgtttccaaatatcactgcaagaggtgcaggcattatgatatatgatgtcataaaaatgagaatgtagcattctatatgtactgggtgtttatgaattataagtcatgttatgctggtggaaataatttaagacatgagggaat

SEQ ID NO: 252167 - DNA, 366 bp, Gossypium hirsutum
cccacgcgtccggcgacaactacttattgaaattgttctaaggagcaggttgacagctcttatggttgatggtgacacgacgtgttgggttctggagcaggaacttcttcgttcttatggggttcaaactttaggtgtcgacaacggcagggatgcaatcgacctcattgcatccgatgcagcattcaatctcatcatcatcgaaaagattcttcctgtcctgaatggccttgaggtaacaaggcagatttgtgaaatagggatgcgttgtaagatgttggcggtcacagcttattcgggagaaagtgaaaggcaggcatttctggcaactagtgttgatgtgttcattgagaaacctttggatct

SEQ ID NO: 252168 - DNA, 381 bp, Gossypium hirsutum
atagttcctattcatacgttttattgaagttctgattggaccccttcagaaaattttttatattattattcaagttactctcttatttatattgaatgcgcattttatccattaatgtttcatactttctgagagtataatacccttttaaaagatatttggtgtatcaacacttttcctggattgaaaactttgtttttaactttttaaaatttgggccaccctctatgcatgtgtctggtcatgttaaagaggaagaaaggatgtgtgttatactgtacctgcgaatgctgatacagttacaattcatttgacaaggttgtaatgctagaatatgcttaattaaatgaaaactgggcatgactacagccagaattgcta

SEQ ID NO: 252169 - DNA, 206 bp, Gossypium hirsutum
atgcatgtgactcaggggcgtcctattttgatgatgcatgccgcaagctgatctaagtcgctggtactatagatgggctatatgttgtgtgtatgatgaagatgccttcaacagttgctattgctcatggactgaatataatgcagtgtttgaagaacatgctggtgttggacatgcgaggcgtaaccagtgatatgattcacttc

SEQ ID NO: 252170 - DNA, 366 bp, Gossypium hirsutum
cggcaaattttgtgtattttgtgttttatgtaatagggactaaattgcaaaaaatgtaaatattaggggtaaaatggtaattttaccatttatgtgtttttgaaataagttgaatgtaataatatttaatttatctcattttgaatatatttagatcaagaaccaaagaaatcggagttagatcgaggaaaagttaaagtcatcgactaatcgtccggtttcgattttacactgtccgaggtaagtctattagctatttaatgtcataaaaatcagtatataggtatgtatatgtgctgtatttttatgaattataatttaaaatatgttggttgaaataattaaaagtatgagtgaattatatgc

SEQ ID NO: 252171 - DNA, 379 bp, Gossypium hirsutum
atggccgctcggtgtagggggcttcgagcgccagaaatggcttctcagcgagggacacccaactccgccgcgtgggcgctggcagacgcctgcagcatgggtttgacagccgctgccgacacgaggtacacggcggacgcggtaacagctgacggcacctactacctcgagcacgtgaccataactgaagcatctgacgatgactatgaatatgaagagataccagatgataattgtagcatcccagaccgggtagaacatctgcgctaagcacttgacatcgcccaagaacacgctacacatactgaaatcttggaacgggaaacaggcgttgcttgaaagcatgcagtacctgaagtcatagcatacttcctctgca

SEQ ID NO: 252172 - DNA, 387 bp, Gossypium hirsutum
atcttggctcgctgtgtggcggctcggcggttagcagggagttcgctgagcgtctctgcctagccgcggtcatgagccggcacagccggctgcagcggcaggttctgagcctgtaccgcgatctgctgcgtgccggacgcgggaaaccgggcgccgaggcgcgagtgcgggccgagttccggcagcacgcgggcctgccgcgctccgacgtgctgcgcatcgagtacctgtaccgccgcgggcggcgccagctgcagctgctacgctcgggccacgccaccgccatgggcgccttcgtacgcccgcgggccccgaccgaggagcctggcggcgtgggttcccagcctgacgacggcgacggtccaaggaacccccacgacagcacgg

SEQ ID NO: 252173 - DNA, 388 bp, Gossypium hirsutum
atcgggcactgatgactctgcaacagaaaatgacaccatcttcccaggcaaaagcaacatctggttgaccatgattttaatccagaacttcctcataaaatgcatgaaggactttgatcgtgaatttttttaggtgttaaatatatacaactgattaaattattgtatataaaccagaagcaggacccttatccgggtttgaccactttttatacatgttcatatgcatatggcagcaacaagagaaccctacttttcttcttcccatcaccagaaacatcttttcagggaatcgggggggtctataaaaacagcaatagaaattaagcataaagcatcaacctcgtagcaactgagtagcccttccattataaataactatgagagt

SEQ ID NO: 252174 - DNA, 444 bp, Gossypium hirsutum
ccaactaacaagagggaacgctgaagcacgcgggtgcccgcgccccggtatccggggtctcgaactcacagcgctctcacgactctgtgacagggcactcttagtggttctgagaatccatgagccgagccacatctcagcacagacatcaaggatgccacaacgacctagactgcagagggctataagctgctcggtatcagcgcagagcttacaatgggagtcagacctggtcctggcgtttagacagacgtcctccgacgtgccagaatacaggtggcggtgcgcgagactgaagtggtgcatcgtggacgagagctggtcttcggcagctcggagtactgtatgagactggggggcatccaagaggatctccatacgaagggggcagcctggccatcgaatgggactctcgctgcagagccgcatgcagctctggctttg

SEQ ID NO: 252175 - DNA, 368 bp, Gossypium hirsutum
gatatagagaaataaggaaacaagcatccgagtatgatgataaattgttaaatttatggttgtttggttgattagagttgtgaatattgagatacctaaggataacctaaggcgttgtttggtatatacccagactaaaaagctaaccctattatttatctttagtacctatttttgagcaagaaaacacttcttgatgaaccttcttacaaaacctaagccaaaatataaacttgtacttaccctttttttttgggtcctaaactgcacgactatagacgtctcgccatatgtattgagggttaagtaaatacattatggtggattttgtaaaaatagagtgaaataggagggatcagtgtgatata

SEQ ID NO: 252176 - DNA, 369 bp, Gossypium hirsutum
cccacgcgtccgcgtaatttgacattccgtacagggacatttccgtcaataccggccaaggtatgatacagcgaaagattagctcctgagagctgagagaaaaaatgagggagtatgtgaaaacaaaccttggatctggaaggtgcggctagtggggagcgtaagacttgtttactggtctcttcaaagccatcggcagcggaaggagatgcagcgccgccgccaccactccaagaaaggggcgtagtggggctacgtctagtgctaacgttgaaatctccgtctctcttggcgtcacaccgcatcaacatagatttagacctcggctgacgtatcccccatttaagtgcaaccaccgcagatttcgga

SEQ ID NO: 252177 - DNA, 301 bp, Gossypium hirsutum
atgcgactggcccctgggctgcctctccccatggcttcatgctgactccataaacattctctgttgaggatgtccagtcagggcttgacaggcccaggctcagcttccagtggttgggaaggttccctgtagcacctgtgctccagcagggagagctaggcagaagcagcgagggggcccagctggtgggactccagccccctcccactcccacactcactcttgcagagccttgtgtctttaagcagctggcgtgttacatctctatttaaggtttccttcgaataaaaggtctgtgact

SEQ ID NO: 252178 - DNA, 351 bp, Gossypium hirsutum
tgaaccttctttttagcattatatatttcttttcagtcgtgcatttggaaattgtagtattgggaactttttatttcaagcaagaagattagcttaacattttgatatgaaagaagtggctgaagtgttgaatttgcttgttcttttagactgaatggtgtttgtctccttctcggtttgccgtggatctttttaggcgaactaattgaaattgaaagctttgatgagatagttgaatcagttataattccttgattatattttgcccttgtggacttcattcatgtaaattgggactaaacaagaaccttcctttggatgcattttaatggtgttaccaggtatttgaga

SEQ ID NO: 252179 - DNA, 302 bp, Gossypium hirsutum
cttctttaacttttcaaatgatttctattagtcccaaaatgttttcaagggaactttaaatttagaatttagggacaaatcgcattttaatgattgaattagaatatgcatatgattacttatgaattggttgttaaatgctttgattagtggtaatattccgtaaccctactccggcgacggatacgagtttggggtgttacataacaaatgtgataatatgtgatccaaagactctttgacatcatcttaaactcttaatccaatatcttcctccacccattatctagttaccactatca

SEQ ID NO: 252180 - DNA, 374 bp, Gossypium hirsutum
atgccgctcccagtcaggctgtggggtctgaccgcctggagcttctgaggttccccagggcgcccacacgtgctcccagccaggctgtggggtctgaccacctctgtcctgggctgtgtccaagaatcaggtgcccagtgggtcgggatgacagtgccaggagtcctggatgggcaccctgctcccatcatcccggaggtccggcttcatttctagctgggggcggggcctgtgactgccagctccagagccctgtagggagctccctgggagggcacggcaggactggcaagggagaggcctgggaccatcccagagggagccttatgcccagagacctgtcccacatctgctgaggtggagcaagccatggt

SEQ ID NO: 252181 - DNA, 372 bp, Gossypium hirsutum
cttaaaacttactaagcattgtaatgcttactccgtttactttgtttcctctgttttatagatctcatttggaagctacaggctcggggatcgtcagcagctagtcacactatcactatccactgcttgttactgttatgctttgaattattttatggcatgtaaagaatagaccagtggtcgaagaatattttggttaatgtatataagccatgcgaaaatggcatcttttgaatgtgtgcttataaaagttaaaattgtatccctgactgcctttagtatttacctaaagggatgttctttataaaaaagatatttcaaaatttttactgttctgatatgagtttcaagtgcggtaatgcccatttacct

SEQ ID NO: 252182 - DNA, 379 bp, Gossypium hirsutum
atccggagatcaagtgagtctaggcgctgcatcttacatccaggctacatatgcgctgaggcacatgaacagcagctgcagcccctaatgttgttggaggacctacaggttgatgcggagaccattggcactctttcacacgcgggacctgtatagcattatccaccagtatggagaagttgtacagcagcctgttccagctgagctcgcacgtggaggcctgggcctgaccatctatgctgagccggagctgggaatgcgaagccatgcctgcagatgcggtcactgaactagcgcttgcaccagcagcagggtgacaccgaggacaagcggaggcctcaacctgaaatcatccgagagatagaggcacgactgattg

SEQ ID NO: 252183 - DNA, 366 bp, Gossypium hirsutum
catgtacaaaggggagaacgaatttagaaggtacatgcttccattcatgaaccagcccatcattaaagctttaattaagagagatacatgacccatgcacctagcatttgtccaagaggggttggatatgaattgaagatgcacattcatggaacaaggaagctttcttattggttaagcatgcattgatacggccacgcctcgggcacacttttggaccagctccctaagcattgcttgcaaatccatgcaagctgaaatagttcaatttcttttcgttgagctccgtttagctcgtttccagctcactcgagctcaagtcagctcaatcgagctcaatttagcttctttccagctcgttaattt

SEQ ID NO: 252184 - DNA, 343 bp, Gossypium hirsutum
gagatatgtgaaaatgtgttcataacaagttggaaatttgaaatgtttgaatcaatatgcgtaaagctatactgttgttgaatatgtatttgcttgagagtcaaaagtttagaggctttacaatcttcgcccccttaccagaacagagttataccatgagattcttgagagatatgttgcataagcttgcaaaagtgaaacttaaaagtattataatggaatagtatgggattagtgaagacagaattagttagaggaataatgtccgacttgcactgatgtttgagtatgtcggattcaatcaaataaaagtgatggctatctttctcttctaagagttcta

SEQ ID NO: 252185 - DNA, 283 bp, Gossypium hirsutum
agaacaagtttgtacaaaaaagcaggcctggcccgtgccggtacactggaatttccgggatcccagcttcctagctgtgggaccttaagcaacttgtagcccctgtgaagctgttttctcaactgtgaagtggacgcaccctacttcattgattctaagaggcacgcatttccacctggtgacttctctgaaattgaggtgcgtctttcagtcagtggcgtctcatagtcgctgtcagccagctggtattcgagatggagtcgtggaaaacccggggacacct

SEQ ID NO: 252186 - DNA, 383 bp, Gossypium hirsutum
atgcgcgcctaggctgccgcccagcgccctcaccgcggccatgcccgggccgtagagcgcctgccgcagcccgcgccccgcagccccgcagcctcgcgcccgccgccgcctcttcaatgggcaacctgctcggcggggtcagcttccgcgagcccaccaccgtggaggactgcgactccacctggcagaccgactcggagcccgagcccgaggagccagggccgggcggcggcagcgagggcccggcgcaggagcccgagcagcccgcgcagcccccggagcgagccggtggccggtcccactgcagccccgcgccggacgaggacgccgaggcggcgggcgcctagcatggcggtgatctcactgaagcaacagtctaacca

SEQ ID NO: 252187 - DNA, 392 bp, Gossypium hirsutum
atcaaccctgcttgcctccactttgggggcatggaaggtgacagtgctgctgatagaagtggctttctaatccctaggagacagcttctcaagtagaatcacaaagctagaaaaggcctcagcaacttctgtatagatgaggaaacgggggtgcagaaaggctgtgagatttgcttaagatcacacaggatcagaaccctagcctctgctcacttgttcttccaccccatgccgtctctgtaagtctgctgtttgattcttgaattccagaccctaaaaagtcagccagtcgccctgggagtcgggctgggagtcgagccgggagtcgagccagcagccggcgaggaagcgatgcctctgactttgacctcttagagacacagtctgcttgt

SEQ ID NO: 252188 - DNA, 273 bp, Gossypium hirsutum
atgcgacggaacgtcccatgcgcagcctggagtcagagtcacagccaggggcgcgccggcgaccagtccagaggggcccacggacccgctccgcgctccaggtcggccgtcccatgcgccgcaccccgcagcccccatggcctggctggctccacctgctgccagggaagaccctcggcctgagagccgagtgctgctgggaggtggccgggcgcggccgggctgtgctctgggaaccgccggggtcggcgcgctggctcgaccacgctcctg

SEQ ID NO: 252189 - DNA, 267 bp, Gossypium hirsutum
cggacgcgtgggtgacacctccatgcagcatattcaccaatccttctaagtctgctgtgataatcattcctgcaaatattggtcagtttttgtgcccagtcttacttagtgcgtgatttttggtgtttctggcattatcgtttcttttttgggttggagtttgttaaaaacccaaactaccccttcatgttgtgtgtgcctatggttaaaacatgattaataggtgagaaagttttagcctaaaaaaaaaaatataaataaataaaa

SEQ ID NO: 252190 - DNA, 385 bp, Gossypium hirsutum
gctgaccgtgtgtgagacaaatgcccgtgtgtctacccgtgtggacctttttggaggctattttccatgccaatggtcaccctcaacatccatacacatttataaacttcaatggtattttgcatggcctaaatatgtccataacctacctttgcatagtcttttgcatgttaacctcatctcattggtttagtacatgctaggttatcctttttgtattaatgattaccactccaataatcacattttatacttgaactcgtttataactcattgccaattatgacctaaccttctcctagtgattcgaccacattacacatatccttccggggtatatcatattaaccatctaatgaaatattcaagcctgacatgcataatt

SEQ ID NO: 252191 - DNA, 320 bp, Gossypium hirsutum
cccacgcgtccgatcggaagagatctcagtagcagtcgtcgcgaatcatgtgtgtaccagacaccctttcttagttcaatttggtaaaagccgaaatgccaaaatttccggcatttcatgggcttgtgagtatgcgaatgctctcaagacgtagagtaaattttagatctagcatcgcaaggtggtaagtaagtttgtgtgacgtcttaacatgcttcggaaaaagagggcctcgatgggccaaaattgggccaaatgggcttacggactaatatgggtaagagatgggcaaattagcctgttagttagatggtgggacc

SEQ ID NO: 252192 - DNA, 340 bp, Gossypium hirsutum
cccacgcgtccgctagactcatgtccccacctatatatttttttctagaatttttggtcgggcccattagtacagtttattagtcaaagtctctcatgttacaggggtcgactacactgaccttttcccattacgactgggatatctctctgcacagggcttcaatactaatgccgtttgtttctatggaaactagactcagagaggaatccatacatatatggtatgacccctaattatctctggtcaatttatagtgaaatttccaaaggcggaacagtgaatccagaaactgttctggccctgtttcacaagaacccgaatatctctttctgtactg

SEQ ID NO: 252193 - DNA, 390 bp, Gossypium hirsutum
atggcatgcgctatcacacctggctacttctgtatttttagtagagaaggagtttcaccatgttggccaggctggtctcaaattcttggcttcgcgtgagccactgtgcccgacctgctctgatctctctcaactctgcagcctgagagattggggctgataaagactggttgccaaacatcactagaaacgtgggttaggggtttatggaagacgaactgatgccccatggcttgtaaaggctgggcgttcccttatttctccttaaggcctcatggggctgaagaacctggaagggtgtgccagagccatttgtcctccaatttacttgatgccaaatttctcctgtgagccagttggactcgtaaaacaaggatcattgatgttgtc

SEQ ID NO: 252194 - DNA, 281 bp, Gossypium hirsutum
atgcaatggtgaaagactgcaggggcaagcgaggcttctggaaggaacttggacctcactgccactggcttgtctcctccagggtttcttgatcactgatgtttcaggttgatattggcagtttgaagaagcctttgttcttcatgaatgtgagagaaaaggaataaaaaggaggggaaaaccacaattgaagctgctaatcctgaacaagcccgaggctgtacaagacaaaaagcattgtgcaaaataaattgcataagataaacaagaaaacacacaac

SEQ ID NO: 252195 - DNA, 346 bp, Gossypium hirsutum
aactaatcctatgcacttgccacactttagaacatacattgcccttaatgaaaaataattaaagtgcaaggaagaaaactttcctgagtagggcaacctccttgttgttatgataatctcgagatttgtctgctccaagtagatgaaaaattacctaaaaaaatagtgcaacaagaaatatgaaatataatataaaaagaaaaagaaaaaataagaataaaaagaagaagtgtcaataatggatgacagaatgtctaaaaatattttgatgaacttgggcttttaatgttgcaaggtgcgttctgtctaggatgtcatgacattagggggatgtcatgacatcgac

SEQ ID NO: 252196 - DNA, 372 bp, Gossypium hirsutum
gcgaagcaaccagggttggtagattatacatatagagtcattgttgataggtaactcaagatgacaggataatcagattgtgaaaaccattattgttgggcaactcagagttgtaatatgtacatattttgagtcatcattgtcaggaaacctggggtgatagattcgtatatccattctaagtctttgtttgattagtaaggttgtaaaaacatgaaatttttataaagtatatgaaatgaaatgagttgaaaactagccctgatggccgattgagtttaatgagccaatacgctcggaaatggttgaaatgcttatatgtaatggaacatatgtgtacaaatgttgatcatggtaaacaaataattattt

SEQ ID NO: 252197 - DNA, 356 bp, Gossypium hirsutum
aatgacatatggggcacaaaataactggtgtcttgtaaatgttctggtttttttttttttttttttttttaaataaaacttctatactttagtctttactttaaaaatatgtactgcttccttttttgatttttttggtcgttttttttcttttgcactgagctcatcatatactaatactaccttaatgttaaaatttgaattttctttagcattttgcttaaaagcaatatgctatttccttattccgtgccctgacatagataatttttgaatttctgatagaatacaagtgtggtaaatgccatgttttgactttatctaacatcttctctttcaagaagcttggttttttt

SEQ ID NO: 252198 - DNA, 361 bp, Gossypium hirsutum
tacacgcgtacgaaaacattctcaactctgttgagcccaaagagaggatcaaccgggaactattttatgatgaatttaaataacagtgtattacaccaaaatccatacaccaaatgaatacagatttgctccaatcacactgcggacgcatgacagtgtcatattatgaacgagaaatctctaagcttctctagattccactagagtgcatatttatagaaacctgcatgtgacatatgattgaagactgtctatattaaaacatatgaagagctgatttaagagaggatgtaaccaacttttgaatctactgattcaaagtaaaaatggatggggaaatcacattcattgccatactaaa

SEQ ID NO: 252199 - DNA, 394 bp, Gossypium hirsutum
atcaggatcgtgtagatgcccaggacgagacagctgcagagttcacgttacggctgaatctcactgcggcccggctaggccaactggaggggctgctgcaggcccatggggatgagggatgtggggcctgtggtggagttcaagaggaactaggccgccttcgggatggtgtggagcgctgctcctgccccctgttgcctcctcggggtcctggggctggtccaggtgttgggggaccaagccgtgggcccctggacggcttcagcgtgtttgggggcagctcaggctcagccctgcaggccctgcaaggagagctttctgaggttattctcaccttcagctccctcaatgactcactgaatgagctccagaccactgtggagggccagggcgc

SEQ ID NO: 252200 - DNA, 384 bp, Gossypium hirsutum
atgcaactcaacattaggtttaagaaagccacagggaagagaaagctgatggtatgacacccacctcctgaagtataaactcttagattaagagcttgtgtctccacaaggcattctgagcttatttgttttctttgtggatcaaagggcagatatcaaatgatataaattatgccttggggtattactatttattctctactctttgccagtctgtgaggaaaacctttttagcaataaaaattggatggaaatgaataatagattgtgtagatgttgaccagtttgatattttgcaaaaatgtttgaactcaataaaaccatacaccataagttaatatatatctaggagactaggtcttctacatttgagagttctttcag

SEQ ID NO: 252201 - DNA, 376 bp, Gossypium hirsutum
aacctatatgatatgctatgacatgagctataagcttgggatgactgttgtgaaagagaatatgtaggtatgttattcatgtcatatgacaataaatatgtgggtatgttttcataccatgtgtgtaacaccccaaacccggcctagacgttatggccagatccgacgtgtcacattgaagtttttaagaaaacccatgcctctttcaacgtctttcttcgtgtttcaaaagatagtctttgctaagttaataaagtgaatggaagctgtgcaccaggtatgtatccgaaacagaggaggtgagccatgaaggctgcttaagtgccaagcttttgattggatccaatcctagacatgcccacaaccattgccacac

SEQ ID NO: 252202 - DNA, 241 bp, Gossypium hirsutum
  unsure (1)..(241): unsure at all n locations
cccacgcgtccgcgatatctgaactcgcttgtgtgtgatggtgtagtgtgtgagagagtttgagattatattttgtaaaaaaatcttatatggatatgggtaaggtgcgttactagccatttgcaaatataaaaaaaaaaaaaaatataaaaaaaaaaaaaaatacaaaaaaataaaaaaataaaaaaattatgaaaagttgagggaatatgaagaaccncaaaaaagctttaggtgaact

SEQ ID NO: 252203 - DNA, 378 bp, Gossypium hirsutum
  unsure (1)..(378): unsure at all n locations
atggctggtcttgaactcctgacctcgtgatccacctgcctaggcctgtaaaagtgctgggattacaagcatgagccactgcgccgaccgctaggagattttttaactgtgtccattataggcactagaaatcttgactcttaaaattatagcatggttcacctggtccatgattccgtatttaacagtaccacaggaggtcgtaaattctggactttttgaagaccatgaaaaagtttgttgagactaacataaaacttcgcctctggccccggttgtcatagctaggagtggatttaggaagtttagtacacttactttgagaatggatntctctaagggcattttctattttgaaatgttctgagttctgtatga

SEQ ID NO: 252204 - DNA, 362 bp, Gossypium hirsutum
gttagaatttgtataaggcaaagaccagtgcaatatacttccctggttagacgcttggagaaggcattcagcataggttgtagtccaactttggaaacccagggtggaatctttggtcaaagatatatgcagtacaacttccattgcagaaactaaaacttggtggattttggctatacatagtggcggaacttggctggaaaaagtgaacctccacctccaattttaagtcctcctcctgtcagtgtcagcaccaataaaactgttgaagcacctaagtcaaatgggaccgtttcaacaccttcattagctatcaccagaccgctatcttcttcagggagaattgaatcattccttgataa

SEQ ID NO: 252205 - DNA, 392 bp, Gossypium hirsutum
atgtcctcttataatttaggctggactgtcacagacactctggcagacacagcatacgtggtgcagccagagtgcaaacatgccagcagcagccatgctccccagggtgggggtccagttagtaagccacgcgcagccaagaggcgaggcatgccctccgccacacacggacttaccccgctcactgtgcccgtggtatcaaaatgtacctgcatgtttaattcataaaggagaggctgatgtcattgaaagaaaagtttgttacttgcatttctggagaaaaggagcgcaccaggccatgcagggccacaggaggaggaggcactggagtggtcaggaggcagaactaggcgcaagcatgggcaagcagctttcctttgtgtctccgtggc

SEQ ID NO: 252206 - DNA, 291 bp, Gossypium hirsutum
ggaggctggggctgctgaaacgttggggcgtacggaggcacgaagctgatgtccgattgttgttgctgcgcatgaaggaggagtgacctacggttactgaagttgtttcaacttttgagctgttttgggcctcgaagctttggactattttgtaaatgggctagggtattaattttagtgggctgtttgggcttgtaataagacactaactaaatggactttgttttatggggggcagacccagtcccagcccaagctcctggagagggacaagaaggtcttaccctgact

SEQ ID NO: 252207 - DNA, 392 bp, Gossypium hirsutum
atgaggaactaccctaagacaagagggaaaggggagagatattgagaagagtgagccatccatgacagtggtttagaggatttctccagagaaataaagaattctaagatggaagagcaatggagaactatagaaaattatgagcgaaccaaaatgatcaagatatatgaaagtaaaaaggaagaataaaatattgtaaaaatcagaggcactgataatccaaaaaaaggaagataaatattaatagagaataaatattcattgttatcaaataaaaagtttaaaaataatatcaaaataagtattaaattaatactaactgaacactgagtgttaaatatttttgagaaacttctttataaaagaccatgtttgactggacatagtggctc

SEQ ID NO: 252208 - DNA, 378 bp, Gossypium hirsutum
cccacgcgtccgcaaaatgctaccctcggcactaatgtgccacacgaacaacgatctgcgcgttcgagccctaaaagagtggttttggcccttgagaccccattcagacttcgatttcgacgaagtgaaggggaaacgacggctagcttcgcaaggtaaactcctctttcgttttctttttgcgtttttgatagatttcgaagcagaaatggaaaaatggaggcgtaaaaaaaaaataaaaaggaaccacctttgaagaatattcaacctctgtattcgattgctattgtatgtgtatattccttttttttcgcgtttttttgtattcagtgtgtagaaatgtgcttgtatccctccttcaaaaaagagtttacaatc

SEQ ID NO: 252209 - DNA, 373 bp, Gossypium hirsutum
ataaaattgatagatcttaggatctgacacaaatgtggctgtatcctaatactaatgttatgaaggtcgtgggtattattattatatttaagtgaatccatacattcccttctacctataaaatcataaaaccacagtgctcttttattatatattatttttgtaacatatagtgaaaagttaatttcagtattttttttcttattaggttactcctgattcagccattctaggagttcttcagtccaacattcagcatgtgctggtctatgaaaatcctgctcttcaggagaaagcgttggcttgtattccagtccaagaactaaaaaggaaatcacaagaaaagttatcaagagttagaaaattggataaa

SEQ ID NO: 252210 - DNA, 349 bp, Gossypium hirsutum
  unsure (1)..(349): unsure at all n locations
cccacgcgtccgattttctatttaacttatctcttgtctatttttgtccaacaagttaaccaatggtctaattaccatttaacgacctccaatttaaaatttcataataattggacacttctaacatgtagaactcaacttttgcacttttttacaatttagtccttttagctaaattgagtgccctaacgtcaaaatttttaaacgaaatttttacgaaatcattctgtgaaattgtagaccttaaaaatataataaaaaataaaattttcctcgtcgaatttgtggtctcaaaaccactattctgactaggcncaaaatcgaattgttacaacgtatatgcaattca

SEQ ID NO: 252211 - DNA, 379 bp, Gossypium hirsutum
atagaatttatttcttgaagttatagaggctgagaaatccaagatcgaggggccccatgtggtgagcaccttacttgtggggactctgaaggttcccaaggcagtgcagggtatcacatggggagggggctgagtgtgctaactgggtagctcggatctccagttcccctgatgggaaactgtgtaatttataaagaaatacgttaatccactaatggattaattcatttgtgagggtggaaccctcatgatccaatcacttcttaaagaccccacctctcagtgctgccacataggggattaaatttcaatatgaagtttaaaaggggacagatactcaaaccatagcagcatggaattcaaaagcactccaccgtgt

SEQ ID NO: 252212 - DNA, 377 bp, Gossypium hirsutum
atttttaatgcccattgtgacacactgctctcttttcccctttttcctctcgtaagttacttgaatgggcgtacaagaaacttgttgctccattaagtggttttgtgggtgcttgtgaggactcaaagtggagacacaagcaaaatggctgacttgtcggtaagcgtgtgtacaattgggaaggcatccaatacttgagcccctcgaaaacaagtggcacccatgcattcattatctgccaaaatgaataaaagaaaagcaacgcttgtggggttcaaaatttcaaacttttcagcttaagcagttataagttcttctaacgggccttttccttgcatgcttaactgcgtgtatataaaacccgaatatacgtagag

SEQ ID NO: 252213 - DNA, 398 bp, Gossypium hirsutum
atcgccctttttttttttttttttttttttttttttttaaataacaaacatttattggtgtcacttatggtagaaaaaacttcctacaccagatgcacatgacccaattgttaaatagaacattttgaaggtgaacacacaccctaacccaggttttttacccactttttaagatggccaattctttttttcccccccacccaaagacatgtgagcaactgctaatgaaaagcagtaaacagccgcttgggctatatcattttcaactccactctgaggtgaagattccaattacattcgagacttaagttctctcaattttttcctaacaaaggtcctgagtccagtatttacaatattacagcactagtggatcagtatctacaacttatcttttt

SEQ ID NO: 252214 - DNA, 316 bp, Gossypium hirsutum
cgacaccatagaacaagttggtacgcaaaagcacgctggtgcccctccccaattccccggattcttcccacgccatctggggcacacaataactggcgccttgataatgatcggaatcactccagttttctttatcacaaaaaaaagtcttgctctggaggcaactctggcaaaagatgtacctgcaacttttgcagtggctgtggaggatgcatgatgttcccacacgtgctcgttgtcgacatgacctcccctgatgctctagttctaggtgtcctcaccattatgctcactagcagggagctgttatcgtatt

SEQ ID NO: 252215 - DNA, 359 bp, Gossypium hirsutum
ctcagatgcttgaaagagaaattagtttccttgaggaagagttaaaatcggtagagggtcttcaaccggcttcgagattctgcaaagaggttacagattttgtgatggccaactctgatcctttaatacctacaagccggaagaatcggaagtcatgtcgattctggaagtggctttgtgggattccttgctttaacttatcgtggatctgttgttgctgttattcggcatgctcttgccatctgaaatgcctgcagtgttgtgattgcgatttatgtaactgcagctcatgcatttgcagcttatgtaaatgcaggtgctgcagttgcggctcatcggaacacagttcgtgcaaatgc

SEQ ID NO: 252216 - DNA, 376 bp, Gossypium hirsutum
aaaattcaggacaaataaattggaaccattaactattgactgcaaatttatggacgattcttcttcacttgtctttttctaatggtataagaaaataaaactggatacataactaaattgatttttttttcaataaaaaaaactttcttaatttcaagtatattataataatataacagcaattatgagtctatgtaaaccccagagcataagttgttacacagttatagttatctaatgaggtattttatctatctagatatgatgtccatagggaatcagcaagaaattatcgtgtttcaatttttcattgaatagattaaaataaaagaaaaaatcgaatttttgatagagcacgccatgtcttgtctccatt

SEQ ID NO: 252217 - DNA, 300 bp, Gossypium hirsutum
tcgaggggatgtccgtgctctggtggcatttccaaatgcctcttgactacctccagacataccaatgtctagagtgagaatcctacacaaaagatatgaaataagcagtgtctgcaagtatacttcaggttgtaattagttacaacgaagtaggtaattactctaaggatcgtacctaatgaaggttagcactaaattaattataacctaagcacaaataaatctaattagtaatttacataaattatagtacgataaaaaaaatatttttagatctttataaataatgaaatagaaaaa

SEQ ID NO: 252218 - DNA, 326 bp, Gossypium hirsutum
atgggagggtgagaagggcccaccccgcgcctgccctcagtgtctttggtggcgccttccttgccggcctccagggcgctcagcaccgcgtctgtaaggacccgcccgccgctctcagcctgacacgccagccaggaggtctgtagtcggtgaccagtaagggcacgggatggtgcaggtaaaagcacatctttctcacaccttgctctttggaaggcccaggagaacatctgtgaaggccgttggaggtgctctgagcaccgtggcatgtctggcacgtggtctccaagctgcaattgcccgggttggttggggaaagggagtgg

SEQ ID NO: 252219 - DNA, 166 bp, Gossypium hirsutum
gggggccaccgaaaaactgaccgatgtgtaaaactaaaaaaacaggcgcacactcccaaaccaccactttcctcgtagagaccggcaccggagccatgcaaagcttaacgcctatacaacaaatgcatcgacccctctgaccatcatatttctatggggaccccat

SEQ ID NO: 252220 - DNA, 180 bp, Gossypium hirsutum
accaggcggtcagggtttaacagacaaaccagctagctaaatcaaccgcatttcactcccagcgcagaaaaatctaaaaagcgctgggggaggctaaaacccccccacgcaattggatgccagacaaggttgggggcgcttttgcacccaagccatcatctggaccccacaaatccaggg

SEQ ID NO: 252221 - DNA, 292 bp, Gossypium hirsutum
cccacgcgtgcggttaaaaccctttcaagcaaacccccatttcttcaaagcaatggcggagtcaagagatagactcgggagagccgttgatatagcggaagtcttcgctcgaagacggtctgggcctttggggattctctcagatgaatcgatggatcttttaggctctcccgttcgacaatcagtcacgcgtaggtcaatgggtgttgttggtgttactacttcgacggcgcgtggtgtagggctccgacgaggtggcagttttgggactccgagaatcggtattcgacgt

SEQ ID NO: 252222 - DNA, 367 bp, Gossypium hirsutum
cccacgcgtccgggctggagaacttgccagagctgagtgctcttcaaaaactgaagattctcaatctaaatggttgcagcaacctcaaaagccttccagacttaacatccctattgaaacttgagaagctcgatctacatggtactgaactttggagcgaagatgtggttaaatccctgagtcatattaaagacctccaaatatgaccctaaaggtgagcacatagccccccttcttgacagccataatttcttcatgtaactttcgatgagaggttgttcaagcttaccaagaggtctattgggaactggagttgaaatttgctttattaaggtttgcacatttaaagcaccttcatctgctggac

SEQ ID NO: 252223 - DNA, 184 bp, Gossypium hirsutum
caagcaaccgcaggcgcgtgaccttattttgctcaaattttcactactctctgtctacatgttatccccaactggacagacatcgatccacgaggataaaccaattctaattcgggatagtggaggggagcgccaatgtaccaataccccatttttgctctgagccgataaaaccaagcttggg

SEQ ID NO: 252224 - DNA, 368 bp, Gossypium hirsutum
  unsure (1)..(368): unsure at all n locations
gtaagtcaatgatgaagaaatatgagagtgtgctacgagttagtacaggtacttacttataactcatgagtaaaggactcggtatactatggaaatgtggtaagaatgcatacgattaaatatgtgactatattacgtgtggtataggtatgtacacagaactcatgtgaaatgaatttggtatatgatgaatcgttggtaagaatgcacacgaacaagttatgcttgtgagatactggtaaccatgtgattaatgatttacatttatgatgaatggatgcatgataagatttgaaaatgatcatatgttaagtttatgagcctaattgngttgtgatatagtacggtgtatgtacttaaaccgtgat

SEQ ID NO: 252225 - DNA, 345 bp, Gossypium hirsutum
atcagagggcttgtcccttgcattccggcacatggccagctccctgctgggccactgcagccaagtctcctgtgaaagcctccttcatgaggtcatcgtctgtgtgggctacttcactgttaaccacccagataaccaggtgatagtgcagtccggccgccaccccacagtgctgcagaagctctgccaattgcccttccagtatttcagtgacccacggctgatcaaaatactgttcccttcacttatcgctgcttgttacaacaatcatcagaacaagatcattctggagcaagagatgagctgtgttttactggccactttcattcaagatttggcacaaac

SEQ ID NO: 252226 - DNA, 141 bp, Gossypium hirsutum
  unsure (1)..(141): unsure at all n locations
cggtccaatgttttcccacatatgagtgagatttacacatataaggcttacgggcccattaagctcgtacgacccaactcggcccaacatggcctattatggccacagnccatgagttcgctcatggtggcctctactatc

SEQ ID NO: 252227 - DNA, 406 bp, Gossypium hirsutum
atgcgagtggcctggaccccgcgggtgactgctgcagggcttctccccagctggactgtgcgctactcgaaagcgctctctccactcgcacggcttgttgggctcatcatgaagcgcttgggctccgtgcagcggaaaatgccgtgtgtgtttgtgacggaggtgaaagaggagccttccgccaaaagggagcatcagccatttaaaggtttggcaactgaaactataagtcacaaggcattagatgcagatatatacagtgcaattccaacagaaaaagtggatggaacatgttgttatgttactacctataaagatcagccatacctttgggctcgactagatagaaaacccaacaaacaagctgaaaaaagatttaaaaattttctacattcaaaagaaaacc

SEQ ID NO: 252228 - DNA, 322 bp, Gossypium hirsutum
attgcgggtcagtgtacaggaagaggcaggcactggctggctcagctccactcggttggagtggaagtggccaaaccatttggatggacagggtcctcaccctacccctttcctgtgaggcaagggtgatggtggagttgctggaggtagaggagctatgtggagcaaaggccaacacaagggaaggaatggacctgtgagaggaagggaaggtggcacaaagtctcatttcacgaaggaggggaagaaagaaaggcagggagggaacaccccccccaaaaaaatcaaagcgcgaagaaaatcacagggaatggttagggtg

SEQ ID NO: 252229 - DNA, 320 bp, Gossypium hirsutum
aattcccttcttaagttagccatggataacgcagctagtgcattcttcacctcttccttgagtcgtttcatcactgtgtcctcaatttctttcgccacttttctgagcatctgctccacctttgctgtcatggcattcgctttctatttcctcttcaagttcctgtctggaggtaacgggaaaacaaagcaagcccctctcccacccctcctcctgaaaccttggcctattgtgggaaatctccctgagatgcttataaacaagcccacatttaggtggatacatgaactgatgaagggtattactacgggcattgcatg

SEQ ID NO: 252230 - DNA, 384 bp, Gossypium hirsutum
ttgtcttgtgtttgattgcaaggaatccatcccaacttcctatagaatctattttatgaatactgagtgttggaataaaattattgaccaccctccacagatgtattcttattttacttaagatcgggagattccagatctttgaataaaattctttagtgatagtttggtctgtaatataattatgtaggtgtggattcttagatattagccatttgtaagcactttgttctgtatattcgcctgatttgtcccctctctagactagaacatccggctgtatcctattcactaagggaatcgacaatactacctctgtttgctctacttcgagtgtgggtagccaagtattattccaaatatttgttgattcgccattcccta

SEQ ID NO: 252231 - DNA, 278 bp, Gossypium hirsutum
cccacgcgtccgtctcactcaaaaatatatggggttaattgtaattgatagagaataattgaattaggcttaattgtttagacctaagctttccccattatggtcttaggttcgaactacctaccacccatttcctttccttttatttgcaagattccaatgtttttttttgcttgcaaaaaaaaaaatccaaatttaaacaactagcataatagcaaaaaatgtcaaaagggcgggcgctttcaaagagacacgctttcttactcgcgaatgggacg

SEQ ID NO: 252232 - DNA, 362 bp, Gossypium hirsutum
acggttgatgaaacccttgaaagggattcttttaaaagtcaggggggttattaacaccaacctacagaaaggcacgaccaattcagactcaattaaaattcaagcaacatcaagttgaatatttcttcatttcaaaggattaatgatcctaaagcttaattagtgtgggaacgaatacgcttttctatcgccttaatcttttcaaggtgataaaggtgaaccttgctgctattgagctaactaactatgcttttatttggcggagatcaatttgatcttaacttggccacaaaatggtgaacgccctattaactcttgggaagaaatgaatgctgtgattctacaaaatgtcattctgaatc

SEQ ID NO: 252233 - DNA, 386 bp, Gossypium hirsutum
  unsure (1)..(386): unsure at all n locations
atgaattatagaaataaatacttttgggaaccacattcagtatttatgtgtcaacaaaatgagattataaaatcaaacatatattatagtaactgaaagtctgttcatagtttatatcaattggctaattcattttaaaaaacacataaaaacttctgagaacctattttactgtaggcatgatgtttataatatttagagataaaacaagtattttttcagtaaaagatgtagcagtaagcaataaatctgtattacactgaattcactgaacctcattttctatgctgaagaggcagatcacactcctcctaaattcattccatccctatgtatcaccgacccatcaatacagntattctgttatgattaattcagaagtatag

SEQ ID NO: 252234 - DNA, 362 bp, Gossypium hirsutum
aaaaattaaattttagagatttgtaaaataaaacaatatagcttatttaacatttatggaattaaaattttatattaaatatgtatgtcattataagtgaatagttaaaagttaattcggtaaagacaatcgaccaaaatatttggtaattaattaaaatgatagttagcaaataatatttttatttatagcaaatgatataaatggtaaaatgtatttaaaataatggacacagcataaattcatatttaaaaggtaaattcttggtcatacaattggtaaaagttttttttaatttgggcacttattttcaattgtatcacttaacttttagggattttttcatttaattgtggtaaatt

SEQ ID NO: 252235 - DNA, 372 bp, Gossypium hirsutum
atttagtggtgagagtatcaatcttcaaggtgcaaagctaagaaaattatcataagtgtgtgatatattaggataacttattataagtgttgaagatagtgaatatttctcgctaatctaggctctacaaacatagggaaattgaactacataaacaaaccttatgtcccctatttgttttctatttcacacagtactcggagtgcccactcccttaaccactccttccaagcacataacttatatctcagcaactactttaaagttttaattggtatcagggctaaccagttaaagtaattagtgaagaactctagtgttgctagattcaagccaaggaaggttcatttacttcaagaccctctaagctag

SEQ ID NO: 252236 - DNA, 405 bp, Gossypium hirsutum
ataccattttctaagccactactagatacattaaattgtataaattgtatacaaccattgtataaagtatagatataatgaataatcaatactgttttgcacagaaaaaaaccagaactcagagaggttaaggaacatgtcccatgtcacacagttagtgagtggcagcctggattcagctccacgcctgtctgacccagagcctgagctcttttctttcactccatccctcaactcttacctggatctgtgtcccccagttcccctcctactcagaccgccacctgctgtcatgctctccctctgtctagagactctctggactggacaaggagatccaggggcagtagcagggctggtaaagagtcaggcccttcaaggcaagggacttcaggctgagctggc

SEQ ID NO: 252237 - DNA, 389 bp, Gossypium hirsutum
attcactgaatcagttgatgcagaatccagctatttcacaaatgatgcgaagcctcctgtccagtcctcagtacttgaaccaggttcttagtctcagtcctcaacttcaaaacatgcttggatctaattctcaaccaagagaaacgatgcagaactctcaatttcttcgtcagttgacttctcctgagatgatgcagcaactattgactttgcagcagactcttttttcacaacttagtcggccacagtcaacccaggagcctgcccagactggtggaggtgcaggaacgctcaacatgggtttggaagcactgatgaccatgtttagcggacttggaactggcagcttgagtgttcctaatagattagatgtaccttcagagcaacta

SEQ ID NO: 252238 - DNA, 359 bp, Gossypium hirsutum
gtacctctagcccgacctgaattcaatttaattataaaacataattttaatatgtatatttttaataatttattattttttaacaacaaaatgagctttttggaaccggaccgaaaatggacctaggcatggaatttttttggaaccgagcctcaacccagcctgacccatgggtatctctagatacatggtgttaataccggcaatgaattgccaaaccaaccaataaaaaattgaaatgttgattttctttttcaaatcatcaagtccatgtgaataacataacattaagtggaagactaaataaaaaaattaaattaaactaaaaacaaataattaaacatatggttaataaaaag

SEQ ID NO: 252239 - DNA, 356 bp, Gossypium hirsutum
atcaacagtcctcaggcccctctctggctgcagagccctctcctcaggttgcttgtcctcccctggcctccagtctcccctgccctcccaggcagagctgagatgccctcacttttcttctcatcagtacctgttcctctgagttcctgttgctcaccatcaggtcaacagttatcatcactcagacatgcaagtgttctttttatgctcccatattattacaggtatctgagtctgccataattctgagaagaaaatgacccatacacccatgagaactgaaactcagtctaagcccagctgcagacaaggagtcctctctttaattgctaactgttctgccccatatagctaca

SEQ ID NO: 252240 - DNA, 369 bp, Gossypium hirsutum
cggacgcgtgggctttaacgcggatcttcaaaagttaagaactttccctttcctgggttttcgcttttttcttttttgggatttgatcgacagctccatcgtcttcttttaaagttttcatctttgtcaatggcatcttcttcagactcatggatcaaagactatcatgaagcaggggaaatggctgatgatatcaatgccatgatatctggaaggagttccctgcctgtttcgggtccagaaactcagcggcatgcatcggctattcgaagaaagattactattttaaggactagacctgatggaatgcagtcccttttgtctagaccgaccgggaagcccttaacggggaaggagatgaatcgtcgc

SEQ ID NO: 252241 - DNA, 473 bp, Gossypium hirsutum
agtgacactatagaacagtttgcacagaaaagcaagctggcaccgtgccgccgttcccgggttggcgacggcaacagcgagatggctcttattctaatgaggcatagacaatggctggacggaatggcatttcctcctaggagtttaggacacaaagagcctcccgaaagcagagggactgagtgcaaccactggtgacccttgtcatctcagtcttttttattataacctctttccttctacttttttcacttgtcttctatttctaatatttaagatttatgctttagccagtttcttaaaacttgtgtacctaatattctcttggtcatcaattatttgaggataagaattccccctactgttaaaacattagcaaggtacattggtaattctcaggcttaaggatttcttgaaataacattatctgatttattgggatctgaagcatagttgactcgactagatacttc

SEQ ID NO: 252242 - DNA, 380 bp, Gossypium hirsutum
aagcaatggaagatacttcatcagcaaaggaagtaacgttgcaaggaactccagctaattacttcccaaggtccttccatgaagttgtaggcgccattctcaggtgtttgggacttgaaactggattccaacaaaaccctaatccatgtccaaaaaaagaagatgacagtaaagccaatcataatcaacctatttctccaaaggaaaatgcagatccaccttcatcaacagacaattcagatccatcaaccaccgtgatcgacccaccagctgatcctcctccttcccccactgtaagatatgttgctttgcttgctagctaacttctttgatatctttgaaactgacccagcagtgggtcacatttggtctccactatt

SEQ ID NO: 252243 - DNA, 124 bp, Gossypium hirsutum
ctcactcgttcggaaaatatatggatttaacctttattgcctattcaaaaatatatgtatggttatatgcctccaaaggaaactatgcatactcatttatatatgtacctttgtgtgttacaaa

SEQ ID NO: 252244 - DNA, 303 bp, Gossypium hirsutum
attaaaagttgcaactgttaattttaaataaaagtttaacactaaacaatataaactttatttccaaaagaccataaaatgaaaacatcgggtacaacatttaattacttttagaccgtgaagattgaccaaaatagacatttctattgggacacttgcttcgattatggccaactgctttatatatggtgcaatgctttggatcgacctgttttcttatatccatgtcgttctgaatcctcattgttggtggtcgacctttgactctcttacatagtgaccgatttggcaacatcttaaacg

SEQ ID NO: 252245 - DNA, 370 bp, Gossypium hirsutum
ggggtgatcggttgggttaggcgcgactctcgtctcctgctaaggtgtttttgtgttagcagaactttgttgggtaagccttagttccatttctttcctttcggatggtttcactttgttgacccttcttctaacttgggtctcttcttgccgattatctcctttgtcgtttagaacaattcttttacgggcttctgtgtgtgctactttaatagtctgtacgttgcttggttgttgtagttagtatggttcggtgatgatgttgatatgctttaagtgcgagtctaatgttggaaaattatgcctttcatgtaagtaggggtcaagttgatcggtacctcccctaggaccaagaggggcgaatttgggg

SEQ ID NO: 252246 - DNA, 270 bp, Gossypium hirsutum
attgcattttatcaatgccagaatgcacatcacactgacaacagctctttgttaacaccggggagcccccaaagccccagggtaattccatcaccacccaagttgtaagactgtagaatgaacaggccagaatgcgataaagtaaaatgaaagaaaataaaaggaggcagggcaaaagagagagggagaagcagatagaaggaaggaaggaagaaggaaagagaaagggagggagacagggaaggaaggaagtctggcaagagggcacca

SEQ ID NO: 252247 - DNA, 356 bp, Gossypium hirsutum
atggcaatggcagatttggcatctggtgagggcgtcttcctggttcgtggatgggccttgctgtgtcctcacatggtggaaggagctagctctctgtggtcttttttatgtgggtactaatttcaacgtcccaaaggccgcacctcttaatatcattacattaaggctgaggatttcaacataggagttttgagggggaagacatcataaacatttagacattgtaataacataagagactttggcctaatcttggagaggggagaatctttagaaccatgacaaaaaaaaccagcggccctaaaggaaatattaaggtaatttgggcacccaaaacttccaaattttctataggc

SEQ ID NO: 252248 - DNA, 294 bp, Gossypium hirsutum
tcgctctgcttcgagttaggctcattttgaggcttctctcgttttaaaaatagaaacaacttcaaactgtgcctaaccgccttagttcgctctttgacgacgaaattaccctttgagtattcactccagccaccatccgtttcttccaacttcttctccaggctttaagtggattgattgtattgagatagcagaaagatgtctactgaagcacccaccagcatggagactgaaacagtggcttctaaaactaaacttgaatccaatacattgcccccaaagccgaaattcgag

SEQ ID NO: 252249 - DNA, 317 bp, Gossypium hirsutum
cggacgcgtgggcggacgcgtggggttatgaaatttgttaatgtacacagtcaaggggctgaagcaagttggatgctaaatttgtcttccatatctcagccaattgatacttctccaagttgccatttccgttcatttcttcctcagatttgaaccttcattgcatttgctcgattttgctaatgacaaacacttgtttttagatacatcgtcactttgctgctgattttttatcttcccccttctaaacttcgattgaagagtggtgataacataagacgtagtcattactttgtcttgttccaaattatggggtc

SEQ ID NO: 252250 - DNA, 263 bp, Gossypium hirsutum
acggacaaagtggacagagagagcgctgaaatggttttgaagctacggccgagtggtctaacaggctagaattggagcaccagcggctttgggcatactgcgcttcacgctccatcgtatgaaccacgcatgcacaagttgctaggagctataaaaactgatgtttctgtgaggaatgaacaggcctatacactatgatttcgacggacgagaggctgctgatacacgccttcgattggcgcgaaacatgatgttaactgctg

SEQ ID NO: 252251 - DNA, 384 bp, Gossypium hirsutum
ggtcccgattccgaattcccacctagacccacgcgtacggctcaactataactggggtctcgtgtggagcagatggttaaaaacaccctatattctaatattcaactcacctacgcaccgtgcaagcataatccatcccacctctagacgaacagtgtttgaagccacgtgtggaagatcagcgaccacacaaataactgacttcctcaaacaagcgttcatactcacgttgctttatcatccttctatgtcccatttttctattatttcgaaccataattcatcaagggggggagtgttcacccaccaataaggcactctagcttatattatacaccgccagacatgacagtcttaccctactcatttcctagttttaatagt

SEQ ID NO: 252252 - DNA, 395 bp, Gossypium hirsutum
cggacgcgtgggttaaaacacacatattaaaacttaaaaacttttttcacttaaaactaaaccctttttaacttctaaattctctcaaatctcttaaaaccatcttaaaccctaaacccctattctatcattccttattgttttgtttcaaatctcttcttttcatcttcattggtgcatgctacacatcaaacattcatacgagagatcacaacaactactttgtaggaaacaagatttcaaggaaaaagtgaaaagttccaactcttaaattatattgttctattacttttgaaatatattgtttgaatcgattagtttttctaggttttgaaattgaatattccttcttggaagagtagaaaacttagtgtgtgagaaccaccgacaatttc

SEQ ID NO: 252253 - DNA, 393 bp, Gossypium hirsutum
atgctgcccggggcttcaacttcctagggcctccagacatgtctgaggtgaagagccggaagaagtcggggcccaagggagcccccgctgcggagcccgggaagcggagcgagggcgggaagacccccgaggaccggggcggcggaggcgggggctgggcagacccccgaacgggcctgagcctgctgtcgctggggacgtgcctgggcctggcctggtttgtatttcagcagtcggaaaaatttgcaaaggtggaaaaccaataccagttactgaaactagaaaccaatgaatttcaacaacttcaaagtaaaatcagtttaatttcagaaaagcttgagtctactgaaagcatccttcaggaagctacatcttccatgtctttgatgaccc

SEQ ID NO: 252254 - DNA, 326 bp, Gossypium hirsutum
atggccactatggagcccgtgtgaccaactccagtgtgatcgtgcgagtccatctgtcctagtccaggactatccttcttgcaagacagcctgactgtgccttccagggcccgggaccattggctgggactcaccattaaccaattgaccacttgtacctccctggcatactgagaattcctgggtccaatcaaaggccctgacgggccccgtcttcaggttctagaaactaccagaagaagcttcttccatcttatctacctactgtagctgctgctttgggggggcctactctactgaggggaccccacagtgagccctggggg

SEQ ID NO: 252255 - DNA, 349 bp, Gossypium hirsutum
atatgccgcattgttcgtggcagtagaccccatgggttcgtctgcacagctatgaggcgacactgttccgtctgcacatgaaggacccccatacagcctctctcccacccctgacaacccgagaaggcatgtggggccctgccaacgccacttcctcagcagaaacccgtcatgacgcggctgcttcggaagcagacgtctggggacacagcctcagtacccagtcttttccctagttcctgaaacttccctaggaccttaagggaataggaggaggtcatatagcattcccaggggcacctagattttgaagaccaaaggaaagggggggtaagttgggggccttttt

SEQ ID NO: 252256 - DNA, 303 bp, Gossypium hirsutum
atggcgacttgcgccgaaatcctgcggggcgaggtccccgaaattgacggacaagtcttcgactacgtgacgggcgtcttgcacagcggcagcgcggacttcgagtccgtggatgacctggtggaagctgtgggggaactattgcaagaggtgtccggggacagcaaggatgacgcgggcatcagggccgtgtgccagcgcatgtacaacactctgcgcctggctgagccacagagccagggaaataaccaggtgctactggacgctcccatccagttgtcaaagataacagagaacttcgac

SEQ ID NO: 252257 - DNA, 377 bp, Gossypium hirsutum
tcggtttttgttggtcagtggtgtacttacaattcaagtgcgtctaaaatgggcaacctatcgtttaagggtcattggcttgggacacgagtgtgtgactcaactatctgggacatacgaccatgcgacacatggcttgtgtcccctgtatgtttaaagctcacagggctgacagttacacaggctcaaacgcggcctggcacacaggcgtctgaggctattttgagtgttgcacaacactacacacgagcgtatggctcaggcacgtgactcccatcactgcgttccatgggcgaggacatacgttgggacaaggtcttgtgtgcatattttgagcgttgcatatcctgagacaagggcctatgtcttaactatgt

SEQ ID NO: 252258 - DNA, 357 bp, Gossypium hirsutum
cgaacaccgatcggggcctcgggatccgaagcttcctaaagaacctaacctaatttgcggtcgattccaccattaacgtgtacctcaaaggtctcactggtgggaagaaactgtatcagacatttttgcatgaaacgtttaaagatgagccaagcactgtgaaactaatgatgatggaggaggagacacagtcaacaaaaatggaacacactgtaaacaaagctgtaggacgaacacatcctgtctagaagaagacgatgatggtacctgaagacttgaaggaaactgagctcgttgatcctaccaggaaaacagttttcattcgatctctcctgtgaaatactaggaaaggttaat

SEQ ID NO: 252259 - DNA, 337 bp, Gossypium hirsutum
atcgaggacacggagttctgaggagaccaagctagtgtgggtgctgacctttgagtcaccacctaagaggtgacctctcccgcatctgttctgcagcttgataacaatgaagctgctaccaaccagagcccagccgcagtggacacgggagggaacgggatgggaaggcagggaccgcaggcagctttcccgaactggggcgggtgtggctgtgagaggctcccaggcccgcctgatgccgctttccctttttggcaggtggcaggatcccattttctcactggcgactcccctgcgtgctggcgaagaaggcagccacagtcggaagtcgctgtgc

SEQ ID NO: 252260 - DNA, 382 bp, Gossypium hirsutum
attttggatattgttgctagactgagtttttccatgaagcacattattttgctttcccagctctaaaacctacatttttcctctgcttccatgtgaaaaattcagtcattccttgaacagctgaaatcattcttcagggaaaggaagattccgttaggtgtatacatcttgattctttgccttgatattattcctctatttgagtccagcatgcattcataatcgtcatcaactgatcatcatgtggcttgaattgaatccaaacttttctgttccctacataaattgaaaactaaacgagtctgagttgacaaggttctttctctgtgtcagtctagatgagttaataatgaggagtcgagatcagtcaatatccgactat

SEQ ID NO: 252261 - DNA, 177 bp, Gossypium hirsutum
ggccgggttttttcggctctggtattgatggcaaggtgttttgggcttattttccgggaaaggagtattcaagggtaccccaagccattaccaaaacggcctttctttaaccaagaaaaataaaacccaacaaaaccctgggggccattttctttttgaactctagtcttggttcca

SEQ ID NO: 252262 - DNA, 395 bp, Gossypium hirsutum
cggacgcgtgggttcatttttatttttctgcttcatcaatggctgcttcttccagtagggaagctatgaacaagcaacttcttgactttatccattcaatggaacaagaaggtttggtcgactaccgtttcgctaaggttcatatgttgaaggaatcaagtggtcctttcttctttgcttcattgctccccacattctgccatgactcgacagcaaccttaagagacttgactgttgctttgggtcaacctctgctgaattatcacgatctgggtgaattgtgctttaagataaaagggggtgcggcatgccttggagtttgtcgtatggctcatgcctgtggtcaacttcatcaagctgttcagaacagagcaactaaagaaagcttaatcact

SEQ ID NO: 252263 - DNA, 361 bp, Gossypium hirsutum
  unsure (1)..(361): unsure at all n locations
gcaatcctcaaatggagtggcttgctaaaactttgtttcttccctttctgctgcaactgttggtgttactgccaattgagacggcagaagctaatgtaaaaccaaaatgggtgctacagaatgagactactgatggagcgtcgccatggctcaagaatgcagcaaattcgaggccaagacctcgggggtgcatgttcaagccgcggatatgtgaacacagagaacattcccaacacctctcatacgcttttgtatgagcccatatgtgtacacctacactctgaagacgctcactggggcttatgcgcgcttagatgtccatttacttggcaatgctgcaggggggtntgtattaatacca

SEQ ID NO: 252264 - DNA, 382 bp, Gossypium hirsutum
  unsure (1)..(382): unsure at all n locations
atgaattatagcatatgtgtgagtcgttcaactctcattgttcttggtgattcaaattaacttatctagcttgctagtggcatcaatctatttcctttccaatcttatcactctttgagtgtggcattcacccctttataccgactgattcctatcttcctagatagagggtcacgatcctatccatctatccattgatcaccttaatagccttataagattcgggtctctattctttagtagaggttctttcttcccctgttaagttcaatttccatatttccatcattttatcttctgttgttatctttgttttaaactaccaacctttttgaaaacaaccaatttgtttatcaagactntgttacttaattntacgatc

SEQ ID NO: 252265 - DNA, 296 bp, Gossypium hirsutum
acactatctaactagtttgtacgctggagcacgctggtgcccctccccaatttccgggatggtgacggtgcccccgaagggttgagggagggctaatccgggctctgaggcctaacttgtttacagttacacacctattccaggaggctacacactgatgggggggacattcctgagactggcacaggacaaggactccaagggtgacaaggactgctgactggaggtgactggccatctggaggaggtgatgaatgtgtgcgtccgcgtagacttcaccttagacagggccttcc

SEQ ID NO: 252266 - DNA, 328 bp, Gossypium hirsutum
aaaagaatagaggtatctagtgtgtgacaattaaatttctgatagatctgcttcttgcttatttacatgttggggtttgtatttttggaataatatcttgaaaatctttcatgatctccaaattcaagctgtctggttcttttagtttcatgctttgattttcattattggaccaatcgttactttttactttgtcatgttttaaacagtcaggcagtgctctgccattatgagcagaatccagagggaaggggatgagaatattattttccttggatgttcttagatttggtcttggacttatcttctttcctcttgggttttaaaa

SEQ ID NO: 252267 - DNA, 263 bp, Gossypium hirsutum
gaaagattggcacaacgaggaccgggtaatggagaaagatcatcatcatcattatgtgctggaaataaccttaagctccgcacaaggacttaaagaaccatctggtcaactccgccgtatgcaaacttacgcccttgcatggatcgatccttctcttaaactccgtacttgtattgatcgttccggcggtggaaaccctacttggaacgacaggttccttttcaaaagctcttctgattttctttctaaagaaacttgcgggg

SEQ ID NO: 252268 - DNA, 295 bp, Gossypium hirsutum
atgcgccaccccgttctttccccatcatcatcgagtgtatccgcctcatgtgtgtctccatttggtgtaggctgtatttctctcggtgtgggtttgttcttcagtggaggttctgtcctgctgggtgctcagggcagtggctcggggtagattctgattgcttctgcgtgtgctctcctttgattggattaatgggaataatgaagcagcttacgcctctgagaagtgtctgtgaatcccaagcctgatctcaggtcatgctaactgctgttttcttacaagatgtgctaatgca

SEQ ID NO: 252269 - DNA, 239 bp, Gossypium hirsutum
atgtttttatgtgtaagcaatatttatttaactagtctataaaattattgagtgcctcctgaggcctttaaacacccctaacattccttttccttcattcttttaaatgacataaagtaattgggcaatgttcccgatgatgtaccccgcaagctgcattgaaactcaaatctcttggaatgagtgactcaccaaaatgtaattggaatcgaatcctaatccttggactatgggaaaaa

SEQ ID NO: 252270 - DNA, 227 bp, Gossypium hirsutum
agtttagagatatttcccccgggtccataccatctagtggtggatgtactccatctaacactctcaactgaaataaccaccgacatcattttagaatgacggattctagaaccttttcctacacagcggtcagatagcatcagacctgcattgaacagtcccgtggaaaggccaagcagtgaccatgaagagggagaaacttctgctcagaccgagcgtgtgccact

SEQ ID NO: 252271 - DNA, 313 bp, Gossypium hirsutum
gaacgagtcgtatgtgaccggatcaacagatgaagaaaaccgatacgtaatagacagaactttcattggcttcgttccgaatagtttacgcataattcttttacgaagttctatcaaatctatgttctggttaaaatccagtcgcactgttttctctgataaaaaacaacaccgttctcggtgtgacgaacctcaccatcatagtaaataacagcactaatacgttcactcatcttcaatttttatctttcttagccgttctaacttttttgctggaacttatgcaatctgagaaaaaaagttgggttattta

SEQ ID NO: 252272 - DNA, 307 bp, Gossypium hirsutum
acagggacgcttgatgttgatctgggaattcaattggcgagattttgacttggaaggagatcctgacgccccggattacatggaggttttgatgaggacagggattgattttgacaacgaataaggaaatggggatcgaatcgctttcgtacgcttagctgatgatggcgagaggactctggtgaaacgactcattgagaactgtgacaattcataccgactataatgtctggatatttggttaatatcctgacctgtcgagatctggccgcgaaattacaccagtttttgacgattgttaaagtgt

SEQ ID NO: 252273 - DNA, 403 bp, Gossypium hirsutum
atcaagggagaatgttttgtccttcatcttagcgtcctccttgttcagtttgaagaagctgtattgaaaagtaaggaaatttcagaccttagtaattcactagttctttgccgtttataataattacaaatactgaacagtgttctgtaccttggagagttatatattttaacgtggcccttataatagtgatactgaggcttaggagggttgattgaggcactgagtccggaagtggcagggaatctgtgtcttcggaatccaagtcccatgctctttatttcatactgtgccacctcccagccttcaagggtggagagctgagtatacccctcctctcttagccaggggcaggtgctcactgttgggccatggaaatttcattctgagatagggccctatg

SEQ ID NO: 252274 - DNA, 433 bp, Gossypium hirsutum
acactatataacaagttggtacgcaagagcacgctggtacccctccccaatttccgggatcaaagccaagcgttctgtccttcatgggagcgggctgattgttcaggctgacaaaaccgtattaccacgtcaggtcatttcagaccgtagataataactagttcttcgccgtttataatatttacaaatacttaacattattctgtacatcgaatagtgatctatcttaacctgcacctacttatactgatactcgtgctaactaccgttcattgacagcactgattcaggaagtggcactgaatcactgtcttccgaattcagggtgagggctgtatattacatactgtgccagctacaagtcttcaacggcagacacctgaggatacacttcctctattagacatgggcaccaactacaatcttggccttg

SEQ ID NO: 252275 - DNA, 262 bp, Gossypium hirsutum
acgattatctcaagagcatgattacactggaatctccccaacaccttctacggcagaaatagagggtcctgccattgctcctaccaacagagctgctgggatgaaggctgacctcttggccacactggacggtgacgtcttggagttcttctacgatgtcaggggccttttgaagaggtaagatagctgtggaacggccaaacccaccagagaacatttcattctgattttaatgtcaacggatggaagagcaggggggggg

SEQ ID NO: 252276 - DNA, 395 bp, Gossypium hirsutum
  unsure (1)..(395): unsure at all n locations
atgtcacaaatggttcatatatttcagtttccatgttagctatttttggggcagaattttattttaatggaaaagatccttccactcagctgctaaaataaagattaaataagaatatcccagagtaattggagtttttctttaaaagagaaagtatgttttactgaggtatgatgattttgactacaactaaatgttatctattttagtttttgtaaattaatgttacagtaatgttgtaaacataagaccaagtgttcttatagttatttaaaaactacaactactcaatagataagaaaatagataaggtctccttattgtaccaggtttaccttatatgctttttttttctttttgaagtttatatgccagccnggcctttttgttttttt

SEQ ID NO: 252277 - DNA, 470 bp, Gossypium hirsutum
gacactctataacaaaagctggtcgaagggccagctcctacccctccattatttcctcgatcccagccccccttatataaaaatattgatgagggtgcactggaaggaggatagaaatccccccccaacctttttccaaccctaattaaccctaaccccttcaagggccttctttttgatttttgttaaaacaccatcatttatttcccttcctttaaaccctttatctcccaaggcttttcccttggtctacaacttcggtgtcaccaaattagattcaaaccttaaacttcaatatttcctgcaaattttttttttaaaattgtgtggtaatgacatcgaaaaaattattaaagacaatttttagtgtttgggttctaggtttaatgttcaagtttggcctaatttttttaaaattatatattaatgacatgaaaaaattattaaaatatcattaaataattaaaata

SEQ ID NO: 252278 - DNA, 399 bp, Gossypium hirsutum
catcatgtattaattttttcaactttttttcaagtaatgtacaattaaagggttaatactcatgtacccctgatagtattatacccaaaccacacacattaaattcaaagaaatttgctcaaataaaaggttaccactgtttctcgaaagttcaaacctgagtaggttgtatggtgaacaactttagtcaccatgtcaataaagggagctcatttaatttttccagttgattgtagattgagagtagggataacaatgggtccaacatatattatttttgtaaaatttgaattagaatctataaatttacttttaaaattagaaaatattaaatttgcagttacaaatttaatttttttcaaattaaattatctattggatatttaaattcacttaaca

SEQ ID NO: 252279 - DNA, 287 bp, Gossypium hirsutum
aatttaaaaaaaatagtaatttttgtgcaattttttctatgttatttacacaataatttgggtattaattcaatttggattccaaaatcttgaaccctaaatcttaaattttgagctgatacatcgagatttagggtttggattcaagatatatggttcagggtttgtgtttggggtcacgagtttggggtcacaagtttggattcagaggtttaaggctcagtgtgtggcgcaaatttttttttcaaaattgtgtgttgacgacatggaaataattattgacgaca

SEQ ID NO: 252280 - DNA, 375 bp, Gossypium hirsutum
cccacgcgtgcgattgttaaatacacatgtttattattattacacatgaatttaccaacaccatctacttgtcaatttatggcttaatttcttatttagtcccttcacttttcctctaatctataattcaactttctctctatatgcaatctagtcattacacctaattactcttaatttaaacaaattcacctaatcaaaacctaattaaccacacaactaactttgtaaatgtttttaataaatatttacgaatccgttttacgaaaacagagacccgaaagtacactttccaatactcgtgactatcgagtcgttacataatcaaacaagtaattactctcataattttacactaaaatttggactataatg

SEQ ID NO: 252281 - DNA, 231 bp, Gossypium hirsutum
gccacgcgttcggtggagtggggcggacactaaaggtaggtctgatatttatcaaaatggttttctctcaaattatgactacggatcactttttctgctacatgactaagtggatgaaggttggagaatattatttatatataaaactaggattaaacttattgaaaataatcattaagatcaatcgggtgttggaaataaatcataatattttttaaaccagcttagttt

SEQ ID NO: 252282 - DNA, 350 bp, Gossypium hirsutum
atccgggaccgctttgcaggtcgctagtcagggccgagcaggggaggaggataggaatccccgccgcacctttgtacgagcctgactgagcctgaccgcctccaggggcttgctcttgggtcgtcgtgaagccgcggtctctcctcccccgcccttcagccccgcggtcgccaggggcggcgccctgggtctggaacgcggttgccaccgaggaggcggcggccccgggcgcgcctggaagccccgggcaaccggccagggccgggcacaggtggggtccgtcaagccgcccgggggtcctttgtcccagctctgcggcccggggggtgacgtgatggcggcagcggtgc

SEQ ID NO: 252283 - DNA, 339 bp, Gossypium hirsutum
atatccgaaaatagatacactaccatcacacacactagggggataacaaacatgtgaccttcatgagctatacatatatctatacctgcgcccgcacatcacataatgtgagactatactgtacaacaaacaaactgttttatgcggaagtgagatcatgaactacaataagatggtgcatgattactacataggcatacgaataaatgagcaagtcatctaccaatacatgaacacacacatagcagagatttaccgatcacacacagacattactaaacacacttgtggcactacaccagctttaccaatacacacagaattactatgacgagatca

SEQ ID NO: 252284 - DNA, 371 bp, Gossypium hirsutum
caaaaatgaaaatggaaacttacaatcctatatagaactacttaaaaactgatggaagaatgagtttatgtttttggactattttgaagcctaaaaatgaaaataaataattcagtcatagtgagcatgttgagttgtgacacattgaatggatttttctagaaattttaccaatgataaaatcatcaaaattttaccacgagtaaaattgtcaaaattttattaggataaaattgggatgagaaaattatttaatatgtaaatattaaagtttattttgggaaatagaaaaactgaatcaaattggacatattatagagtactaggtctaaaaggcccgagaagtactcgtaattggacctgatgcaaga

SEQ ID NO: 252285 - DNA, 349 bp, Gossypium hirsutum
gttagctcagaaatcacggtttgtgtttctataatccgaacttaatatttaattgttgaatttattatttaatgtgtaggttgatgcatagaaaagtgaaatttaattgttaattattatattatgattgaatgttatggtaagtaatccaggtaagcattattgtgttttatgattattgaaatgaatcaaaatatatattgtattgaaattaaatcgcatgttcattgatatggaaaaatgtattaaattgaattcaaattaaaatgcaaatgaaattgaaaatttgaaagttcacttaataccctattaactgtatcgggctagtcgaatatagctggtatgccat

SEQ ID NO: 252286 - DNA, 360 bp, Gossypium hirsutum
gccacgcctacggtgggcgggggaggaaagaatatgaaagtagtagagaaagtagaggaagagaaccatgaacaaatagatggtgacctctacattttcatcgagaattgtgactacaaccatagagctgccttgataagatcaatgaaaaggcaaacggaagaatgttggaagtgaagcactaatacaatgaggctcgcaagccggtctatgataattccttttgaaattattaatttaattccaatttctgcttgacacttttcttgagccatactgctcttggtgatcttttgactgataatgaccatatgatattcaaatattttaactcacttgaagtggtggattttaaagatc

SEQ ID NO: 252287 - DNA, 374 bp, Gossypium hirsutum
atgtttaaatagtgctggttaaacaaacacttctgcagctggatttagattgcaagctgccaagttgcaacctctttcattctagaaacttctgtcattttcatcatagcaaatctatgtggacaaaagcctccaaactttccaactgtgtaggccagtacagctggcaaggttcatagaatataatgactatccccctctgccaaataagactatccacaacccagctcagacacagtggttatatggattttgtgtccatacaggggaggccttggtgtcctcacatacattctcctagccaacatctatccagcagccctgacctcctgctataatttaagtctatttccttttagtctaataagagttga

SEQ ID NO: 252288 - DNA, 357 bp, Gossypium hirsutum
tcacatttgatcttaacttaatattcccgttgaaccattaggaatcaataaggatactcggatagctcgaaaagctcgtacaatgcctacgtcccagacgaggtcttacatataatcgactatcgataccactgtcccagatggggtcttacacgaactcatatacgatgccgatgtcctagacatggtcttacacgtaaactacaaatcgatgccaacatcctagatgtggtcttacacaaatcacatattgaaatcctatgtcatgacatatatacctgatagtcgctaaaactaactaaaaattcgactaaggcaagtgcacctatcgaacagtagtatagttatgatgagaca

SEQ ID NO: 252289 - DNA, 370 bp, Gossypium hirsutum
ctgaggatcaccatagcaaacaaccaagggagataggacttttatcacaaaaagaaatgagctctgaagaagcaaagagaagcatcaatggagctctgaaggccgtgaaaccgaaaaccgacgatccgaagctttctccggagtccaccacttcaccacccaaaaaagtcatcatcaaaagcgccgacatgaaggaagaacagcaaaaagaggctgtcaatatacccatctccgttacttcccttttctcttccttcccccaaatcttccatttttctgcccgttttggatttgatttcgttcctgggttttgttcattattgtaaatttattaacttggagtgttttggatttttttttctgggggcat

SEQ ID NO: 252290 - DNA, 364 bp, Gossypium hirsutum
tgaaagttcaggtaaaagcataataaatagattcaggtgagttataatggttaagaatatctcagttatcagttgagaaagaaatttcagcaagggaagagtaagttatattcatgagttatttaagcaagtaagtaaacaagtaagagagtaagtaaagaagaagcaaagaccatgatacttgatgatgatttatgagtataattatttatgataaatattgttatttatttgcttgtaaacttactaagctttacgcttactccctttattttccttctttttttatagtatcaccaagcaaattcagggatcgtaaggacgtcagagatcatttcacactatcaacagaccaactcggtat

SEQ ID NO: 252291 - DNA, 368 bp, Gossypium hirsutum
tccatgtgtctttgatgcctttggaaattagatccgtataggattacctgtgttggtttgtgataggacatgatagagtccatgtgtcgcatgattagcgaagtattctagcaaattatagtcctttgacgagatacagaaagtatgacttggtatcttgatggacaagatgtgagccatgcgaggtacacttatgtctgaggtctaaccaactccaacattacatttaacatataatttatttatgtaattcgtataacacaaaatattaaatatttgtaacaatttctcttattacataaatattattaatgttgtaataatttgtgtaattaaataatattttataagattacactaaatacttt

SEQ ID NO: 252292 - DNA, 141 bp, Gossypium hirsutum
attcaacacttttttattagtacttaacccacaacctgtgactacaattaagcttattccatctcttttgacgttttcccttatttcgttactccgcaatcattttgccttaagcacttaaactttttttcacactgaacc

SEQ ID NO: 252293 - DNA, 358 bp, Gossypium hirsutum
cgtacacaaggacgtacgcgtgggttttttatttattcactaataataacattcgtattcatactaataatacctgaaacattaacattatttaaccaagaaacgaaattccacataataggactaatatagtactaaaaacagtgtattggtgcatatttaaaaagaaatcaagggaaaaggatcaaaaagcaacacgcgcgtcacttggaaggaccgaaacagaaattattcctttctctcaaaacgcagtgcaacactgggagaccaaattgcggagcatatcgaatttcggtgccacattccaatctatagaaacttaattgctgaacctataaaaaaggggaagggcctaatg

SEQ ID NO: 252294 - DNA, 366 bp, Gossypium hirsutum
ggaagaactaacttttcaatattcaaggttaaccagatattgcgggaacttagtagagagtggcctggaagttcctatgacttgttatccaaaaattgcaaccacttctgcgatgacttctgtgaaaggcttggtgtccaaaagcttccaggtaaacttaagtgtcatattgttgggttaaacagctttagatatatctactgattacttctttttctatcccttcaactttgtagcctagctttttagttgaactaaaaaaaacctctttttattcctgaattttcttttactaatattattccattattggatgcaattgttcagtgaatattaagtatgatctaaatagaactatatgcctca

SEQ ID NO: 252295 - DNA, 372 bp, Gossypium hirsutum
atggaccgccttaaaggctgctccattggaatagtagaaagaagtattgccttaaatgatgtcattcacatttaattgatgaaaaaaccctagaaccacatctgacatgtcatctgctcactagttatctgttttggttagtgttttcattcatctagagtcttgagatttaaactcttcaggactttagattctgaaaaagctcatgcttggaacgtctgatctcacatgatgatccaaaggtgctggccaagatccaggacattaataagcagtgccagacttttcaggcattccctgcttattcaaaaccagcttgtgaggaatgcccttaaagatgctcacagaagcgcatatagcttgagacttgcc

SEQ ID NO: 252296 - DNA, 231 bp, Gossypium hirsutum
tgccctaaggacctagagcctgtcttttgatgttctaatgaattggattaaatagctaaatgggattaaaaatgcgtatgaccattatgtatttgagctaacagtggccatataacccatcgaattcattgtcatgttcttccataagctagcatacatgcgactttaataagttaaatgtgatggaattagctcaagagcttagaggaccaaagttgtactatggcaaat

SEQ ID NO: 252297 - DNA, 314 bp, Gossypium hirsutum
aacatacaaactagttataactgaaactgacaatgggtagcctatataataatatacactatgcgaaaggcacaatccggctaatgcacaaacgatggggttacataccaaggctttcaaaggtaaatgggcgaacctccacaaacagcactaatacaattttaggaactatatcaaaataaaagtagccaaaagcctctttatcgaattaatagcactcatgaaaggattaactatatgtacactgcccctgaatactatacaaacaaacctcagtgcaagtatcttattaaaatgtaatgagattgatagac

SEQ ID NO: 252298 - DNA, 358 bp, Gossypium hirsutum
cccacgcgtccggcacaagacgtgcacctgattaaatgcaccttgtctgaaaggtttgaggcgcttttgttatctggtgctaaagcgcaggtgcgcctaggcacacaccttgactacactggatgtcaagatcagctcaatggaagggtttgaaagtactgctacaaaattgttagaagagaaaagtccttatgaaggtattcatctttatatgggaagcatcttgaaaagaatttcaccatcaataacctttacaagagaacttccaagtagattgtggatggagcgcaattggttcaaattcctgtagggtttcttcagaaaaaaaattgatattatgcaatgctgggtgtctctt

SEQ ID NO: 252299 - DNA, 368 bp, Gossypium hirsutum
tacgagcctcaaactgacgattgaaaactattcaagactatgccgggtccttaaactaactatgaaaattttatccctaaaacagggcacacgcctgtgtggaagggcaacatgtccatgtgaccaactcgacatggttgtgctgatggcctatatgactcacacggcctaagtaacctgggacacgcccgtgtcctgcacccgtgtagaattaatttctaattcacacctacaggggttttcatgcggctagacacaagcccgtgtcattggcccgtgtccctcacacggctatgacacaccgtgtcctagcccatgtgcaaaaacatggacattttgtttctgacgtaagcatgctcataatgtca

SEQ ID NO: 252300 - DNA, 376 bp, Gossypium hirsutum
ataagcctttaattgagagccgctctctgtaagtgtttgcttgtgcaaaagggaatagtgccgtggaggtgtgtgtgtccatggcatccggagcgaggcaactgtcctgtgtgggtagccctcggccggggagtgaggccgccaaccaaagtcagttccttcccacctgtgtttttttttttttttctatatatattttttgttgaattctattttatttttaattctctcttctcctccagacacaatggcactgcttatctccgaaatggtgtgatcgtctcctcattgagcagcggctaccaccgcgctgtgggtagtgtgtgaccgtggctgtactgtatagtgaacatagttggcatatctttgtttgaag

SEQ ID NO: 252301 - DNA, 353 bp, Gossypium hirsutum
ccttgaccttaacccaatattactaatgattgattgatatatgtacatatacatatacatatatatgtagctaagctaggctaagataagcttttgaaagatcttggttatggggaagaaaagagagaaaataggttcaagatcttaaacactacccttatcttcattccactcttagttttcatctttctctttcgactttgagttcaccatatgcctttccccacgcgccgccacctattccttcctatgtccagcctacgacctatcctacaaaggccagtctttacatctccacctttttccttgttttttgcatggtccgtacccttcttttagcttcctccagcact

SEQ ID NO: 252302 - DNA, 279 bp, Gossypium hirsutum
atcgccgaatcaggacatcgagtgggccaatgtcctgaatcaccaccttcatttggtccagaaattgctcctatagaaataaaaacaccagtatgtatagacttgcatgtaggatttttattggttccagggttggtggggcaaaacctggaaacaaagttaatacctgattgagaaatgactggcgtagaacacttacatatgtaatattgtaaaaccattggaaattcctttttgactttagaaactggctaattttcaatgtcactaagttgactt

SEQ ID NO: 252303 - DNA, 378 bp, Gossypium hirsutum
atgctggtccttaccgtttccgctccggcggaagtgaggaggagggtccttcgacccgtgcggagctggatggaccgcgagacgctcgcccttgctgaccgccacttccgaggcctggggggtggtgtccccggcgtcggccaggctccaggccgggtagccttcgtctcggagccgggcgccttctcctacgccgactttgtgcggggcttcctcctgcccaacctgccctgcgtgttctccagcgccttcacgcagggctggggcagccggcggcgctgggtgacgcccgcggggaggcccgacttcgaccacctgctacggacctacggagacgtggttgtaccagttgcaaactgtggggtccaagaatacaac

SEQ ID NO: 252304 - DNA, 375 bp, Gossypium hirsutum
atgggacagcgcggctgggacacgccatactcggtgccacattcacctccagttcctcggtgtggtgagctgctggctgttaggaaggctttccctcggctccggccccccccccacggctcctggaccccagactgcagggtgggcgggcatgtcaggtgaggcgctctggccggcccacttggcagcagggccacagctcctcgcagggctttgtgggatttcgaaggatgaatcatcttgttccccattctccccctgctgcccatgcacgtcatgctctgtgtgaggatgaactggagggactggccatgctcggtggcttttttcgtggttggggcgggggggtgttgggtggaatgaacatcaagggaa

SEQ ID NO: 252305 - DNA, 364 bp, Gossypium hirsutum
ggttgaagcatctgaaacatcataggtttcaattcaaactgcagtgcctcaatctctgatctcctaattcccagatttaactcattaaaaaagggtacatcgtactgtcttatagcccgatccctatcgtcagcaataaggattagattgtgagcttcattttgatttctaaggtccatttttatgacttgtctttgggctattctttctcgtattcattgtctaaatgtccgcttgatttcagggtctacaggtaataaattgatgattcgatctatgctcataaacacctaaaaataaaatcacaaaaaaattaattagtaaagtgaaaaatgaaataaaataaaataaaaaaaattgcaaa

SEQ ID NO: 252306 - DNA, 383 bp, Gossypium hirsutum
atgtaagtagagacctgacatttcagtcaatacgaggttataatagcaatagccttatagtaggaatagatacaactttcaatattccctgaggtactacatgccctgacaatcaaatcagcatgcaagttgagcaaacataactcttttgaacatcagagagacaatagatgaaacccttagtattcataagaagcagtggtaaataatatatttattacttaatgtattttccctttaatttgtttcctgttttttgtattttctaacactttcattgaggtataattgacataaaataaacttcaaatatttaaagtgtccaatttggtgttttaggtatatatgtgtgtgtgtatctccacaaaatcatcaatacagtc

SEQ ID NO: 252307 - DNA, 331 bp, Gossypium hirsutum
gtttttgttttgctaactgtgcatgcatgtcatgcacgtaacgtgccaggcaataatgggctcaatggctccaagaaggaacaaataatggaagccaatgcacccaaggcggaatcacccaaggggaatggcattgatgacaagaagcactttgtttacggtggagttggtgggtttgctggggtgggaagctatgctggggtagctggggggctgccattggttggtggtcttggggggattggaaaatttggtgggattggtggtgcagctggaataggtggttacaaaagcattggtggtctagggggtttaggcggtggaattggag

SEQ ID NO: 252308 - DNA, 259 bp, Gossypium hirsutum
gccaaactaagaagacatgtacatgcatgtgagagaactgcgttatgatcatgttctatcaacatagaaaccgcctgatacatagcttcaatataaagatctacaggccagtgaattcatggccacctttaccgtcggaaaaggccaagcctgtgaggaaccgtaatgagcctcacatacgccctgtctacaggaataggctggcgagtcaactcggtggtaaaggtaagagtaagccagtgctgcttctctctgacta

SEQ ID NO: 252309 - DNA, 380 bp, Gossypium hirsutum
attccagattggaaaccaaatctgactcccaagcttgtaactatacatcatcagtcaatatgttctttattttctgtgaaaggaaaattagtatgttaaaatgtaatgagcctctgtctggcattctctaataatgaggacaggattgctaacaattttgtcaatggcttgcattataaaagtaccagcagaacaggggatagttgcaaagtaatttctttttacaataataacttttgtgaaaatggaagtttcaggtttttataattgtattttcctatttttaataggatgcctcaccaagagtcccaggaggctccccgcgaacaccaaatagatctgtatcatctaatgttgccagcgtatcacccatccctgct

SEQ ID NO: 252310 - DNA, 367 bp, Gossypium hirsutum
gtccgtttagtgagtttgcttcgcttcgataaatagtgaaaaaaagaagatgaagtaattgtcgatctctgtgtaacggctactttttagggtgttgttgtagaagtgaagactgggattgaaaaaaaagaagggtgttatttgattcagttttgaagggaggaagaagaagaagaagaagaagaaatggattacaactatgatcaggagccatggaattggcatggagatcaaaagaacaacgattttggtgcctccgaaggtgcatggactcaagtgaccttgaacgaggaagacctttcctacatgtttgttgaagcaacccctgttaaggaatgtggggatctgtcataccatgttactcaaa

SEQ ID NO: 252311 - DNA, 224 bp, Gossypium hirsutum
agctctaatacgactcactataacaagagcttgcacaaaatcaggctgctgccgctgcataatttcctcgatgcccgcctgcgcgggaacattcggccccggaagctccgcgggctcgcgctcccgctaatcttattgctgcttttataggccccgacgaaaccttgcacaaatcgacgcgcttgcacatcaactgggagtgccccgacaccctgcaaatattc

SEQ ID NO: 252312 - DNA, 412 bp, Gossypium hirsutum
tgtacgcaaaagcacgctggtgccggtcccggatttccgggatgagatctatgctctggttgacccgagctcgagttgcctgtctctgagaactggagacctatctacgagttgaactgtgtctcaccgctccagtcccatcacttgaaccatcagtttctctcatatgttacacgagagggctacggactctacccaccggtcccgggatgtcattcacggccccatcatattggatgctgccctgagtatttggcaggcatggtggaccacccacggccgctgagtagccacccaaagcttacccgttgttctagggaatagaaaagagctcatggccaagcatctaacctaaagtcccaggattggctgcaggcagcaattatatcataacttattgaacttttgagca

SEQ ID NO: 252313 - DNA, 339 bp, Gossypium hirsutum
gcgctgaaatggaggagaggggagcagaagtagtggaagcaccaaaaccagctgactggttcaataccttattatctcttcaagctgatctcctttacaactgtttcaccactctttcttgccctttcttcaccctcttatcggcgggctttgagtcataccgccgtgccgaagagacgacagccaacgtcgaaacggcggttcaaaatctaccttccagcatcacccacggtagcactgtcttgctcaagagagtcgggctaggactttttcgtgctgctcaaatgagcatggtgttggtctttctcatggttttcgctgcttttgtgggaattgggt

SEQ ID NO: 252314 - DNA, 281 bp, Gossypium hirsutum
tttatttttaatttttaatcgagtgtcctgcttgtaaaattagtagctgaaattaatttgaaagaaaaattcttactagaaatagttgaaaagatgatggaggtaaagaatcataattctgacgaacttatcatatacttctaaattatgtgaattagattaagaattaagatggcttatgataacagtgctctcttgttcatagttgagggcattctttcaccacaagacttgacctttttcttcttttagatgtagatattttgatatagatattgtac

SEQ ID NO: 252315 - DNA, 379 bp, Gossypium hirsutum
atctactaatgaaaagctgttcttttttttttcatcttgcccctgcacttacgttactattatctgctcccagccttcatgcttttctaaaaaggagcaaatgcccactctacgctttatcatgttgactttgtcattacacttgacttggatctctagttttctatacaaacaccaatgggttccatctttctgggctcctgattgctcaagcacagtttggcctaatgaaggggatttcaactacacaatcctatcattgtggggactatgaccttgggcactctaaacatatgttttgtttggtcagcacagcgtttcaaaaaggggaggcactttataaatacatggcgatttttcaggaaaatctggatcccca

SEQ ID NO: 252316 - DNA, 370 bp, Gossypium hirsutum
cccacgcgttcgcccacgcgtgcgcccacgcgttcgcccacgcgttcgcccacgcgttcgacggcccatttcatttgccattagccacttgccggcaatatattctcggagattgcccttgtttccctctttcctgtttgcggcaacatgaggacgtcgtttcgagccttccctgttgttacagttccccctcttccttctctcggccccaccgcttcctttcctgctcgcttcccctcacttcctcaacgccgcttgggcaagtttggtgtgaaatgtagctatgcagaagcaggaatcagtgatgactcaagatcagctacaatagatgttgtggctgatgtcagaaacgaacggattgtagtcttag

SEQ ID NO: 252317 - DNA, 385 bp, Gossypium hirsutum
atgtctaaaaaaaaaaaaaagaaaagaaaagggggcttaaataatatttctttttgtgtgttgtcatttagttttaaaaataataacgtggttctcagtacaccaagcccttgccaagattaggcccatcttcccagtagccttctcaagacaaagttgcctttgtgtaactacaactgggagggtttggtgacatagaaaactcaatggggcactgcaactttttattaacagaaaatgcaatggcctaatgtttttgtgggtttctgtttttgctttatgttctaccacttcatatctctgatctatttctccatgaggatgatcttactgttttagacttgtccagggaagagtgaggtggttgtggcttaaccttagaatt

SEQ ID NO: 252318 - DNA, 285 bp, Gossypium hirsutum
atctctcgccctagtgagggccccatgtgaatccactctgatgctggggaaccagtgctcccttattgggaagaggattccaggaccccttttttgtcgtggctgccatgaagccacaactcaccttagggaagtgacctgctctcctctggctgtatgcacgtggaagggggccttgagtggcaagttgctaacaggaacagatccataggcagcctgcaggctaggaagtggcctgggtcaagatgagctgggaacaagagaggagcgagcgggagctagggc

SEQ ID NO: 252319 - DNA, 120 bp, Gossypium hirsutum
aggttttggggccgagctgccaacttcagtggctcagcaacccacacggtctcaacaatactgagaccctgtgtgggttgggggggccaaaaaaaaccccctgtgtgcgaaagtggttag

SEQ ID NO: 252320 - DNA, 315 bp, Gossypium hirsutum
  unsure (1)..(315): unsure at all n locations
aaacgacaccaaaaaacaaaaagcnacgaagaaaggcaggtggcgccccgcccgaatttccgggattcatttgtcacagttccgaaatattcattttgggagtctagcaaaaggggagtgtggggctttttataaacacataactttctaaggtatgtgttgctcactgtatctaaatacccaaccttaaaacgttcctgatgctaaattaccgcgttgattagaaaatgtagaacagtatggaagtatcatgtgactcccaaacattctgcggtttctctaaaatagaatttatttgtttttggtgcgaaaacc

SEQ ID NO: 252321 - DNA, 185 bp, Gossypium hirsutum
ccctcaccaaaatagttgataacgggtttctttttctagagacaactaaattaattgtcattgggggatggcgcaatggcactagttctatactaacgaacacctctagttttatttaatataggccaggttgccagtttcttatttgaatcatgggcctattggacctaaggagggattggaag

SEQ ID NO: 252322 - DNA, 357 bp, Gossypium hirsutum
atcagggtgggggctgtgcagtccggtcagggcgggaggggaaacgcagctctgcatgtgaaacttaccaacccaggcagatgccccttccccttagcactaccctggcctcctgcagcccctcacctcatgttcttcccacccccacaggatgaagagccccatgggcccagcccctgccctgggaaccaggcagccttccagacctcaggggctgaggtggacagttagggtaggccttactttggtgaccttgctctttccctcccaggccagctcaggtcacctgggccactgacccaggcctgtcactttgagaggggcaaaactgagaggggcttttcttagagaaagaga

SEQ ID NO: 252323 - DNA, 365 bp, Gossypium hirsutum
ataaaaaaaaaaaaaaaagaaattgggaagttgacagtatgatgtaatcaatctgtactttacataattacatatattgataaaatatatcatgctaattatatgcaaatagataactttttaatagttctcttatgctaagtacttgtctaaaatagtcacttttgtttggaattcgtatctcatgtgattccctagtacactgtactttttctattatagtttctataaaattatactacaattgcctggttattattttactagactttaagttttttgagggctggaatctgtcttggtgcctgtctactgccaggtatagagatgttcatgtagatcatataaaacttggattaatatga

SEQ ID NO: 252324 - DNA, 403 bp, Gossypium hirsutum
ggcggccccggccccaaattcccgatgtgcatattattaagagaggagtccccacacgagcgggtttaatgctcatttaatgcatatttacattagggcacctatgtaagctttaaatattttgaccacgactaaaaaattttgactagggcctatttcaatattttgattgagccatttggaggtttggaggaaaaaaataaaatctcctctaacaagagtgttaaaaaactctggaaagcactcctgtatggtcttttttcacataaccttatttttttttttaccttcatgtgttttagccgcacaatatttcattaacccaatctctcatatatttttttggtttccttgtaccataaaaaccaagaacattttttttaaaaaactgctcccgctttta

SEQ ID NO: 252325 - DNA, 362 bp, Gossypium hirsutum
atttgacaaacataattatcatacattcactcatccaacccaaacaagcatgcacatccatgtaatgcttcatcatagacttataacataacaaatattggtcacactaaatggccttatacaacaatgaccttgaattagcataggccaatattctaggccaactcataatttcatgtacacaataaccaaatccctgtacatgccatacacttaaaatgctagaaaatcatggatacccatcaatagcttgttagtgtgataggatctctgacgacctccaactcgagctagtatatgtgacactataggaaaaaggaaaggaaaagaaagtaagaatatagcttagtaagtaggtatgt

SEQ ID NO: 252326 - DNA, 323 bp, Gossypium hirsutum
ataggtttcggcactgtgctacttattcaatggctgaatgctttgtagaatatgtccctatgtaagttcaaatatgcagggaagttctttatgttctgcagcatctaggtaaacagacggtatgtacctcatggctgtatgctgtttaagaataatgtcctctctatgttgagataagcatagccactccactattcgttgttttgagttcatttcttgtacctgctttcattttaacagctcttctagccacgggtttcaatgtcttcatcggccactgtgttacagctgtcactggcctgtcttggacttacaggcaagtg

SEQ ID NO: 252327 - DNA, 388 bp, Gossypium hirsutum
atgtgcatcttatagagagatgagtacccacacagtgaatttcaggctcagggcatgcatatgtcttttgtgcagttggtttgctttagtcttttgagcactctgaatcttctgactggtcctatttccatttctgattgagccatttggaggtttggaggtaaaatttcagctctcctctagcaagtgtgtagaaccctctggaatgcactcctgtatggtcttcttccacatgaccttcttcttctttttcccttcatgttctttagcctcacaatctctcattcacccattctctcatctctctctttgctctccttgtaccatcacaccagtgaactgctttcttaaaaccctggcacctgctgtcactgaatcccaaattgat

SEQ ID NO: 252328 - DNA, 348 bp, Gossypium hirsutum
cacagcttccctttctttctcttattctctatccatttttaatccggttctcgcacactatcatttactttctgaaattcggcatattcaggaacactatccaccagtttggactgctctgcgacaagcgagtgccttcgcagcgaaagctgagcctatctggtgatgaatctctgagcaagatattagggcctttccttctctgtttctaaccactatccccgaagccgcttgactagatctttcatcatatgctgcgtaaaaattaatcttcactgtctgatcagattgcccataacgcccaaaaaaataatctgcatagggaaatgttattctgagcaaacacct

SEQ ID NO: 252329 - DNA, 387 bp, Gossypium hirsutum
attggaattatataaaatgacagtaagactctctccaaagactaataaagatagagatgacaaagaagaagaagaagatgatgatgatatcaaagaaggagaaggacgaagaagaggtagaagaaaaggaaagaaggaaaagaaataatcataatgctaaaagtaaactaggattccacatgggccattattaaccaaagattctgtagtttctcatttccttatctctgcattgcgaaacaaataaaagagctttcttccttcctaggcttggataacattgtggagggttaacgtgtttggcacctatcagctgcttagaataacaaagttcagtatggactttcgggcatgagattttctccacaccaggtgtgctagtcacgc

SEQ ID NO: 252330 - DNA, 388 bp, Gossypium hirsutum
atggtcaatccaggttacattcctttttctaatttggggtgcaggcatgctgagaatggaatcacctcctctaatataattttaaatgaaaacaatattaagccataaaaactgtatgagaaacttcagtgagattctagtatttttgctctgatgactaattgggaacagttttgaaatatcaaattgaaattgtctcaaagtgtctaactgatagggtttggatctgtgtccccacccaaatctcatgttaaattttaatcctcagtgttggaggtggggccttgtgggaggtgatttgatcgtgggggcagatttctcatgaatggtttagcaccatccctcttggtactgtcctcacgacagtgagttctcatgaaatctgatt

SEQ ID NO: 252331 - DNA, 112 bp, Gossypium hirsutum
cggacgcgtgggtttgtaagtttttgagggaggatgaaacccgaataagaagcctcctcctcctagctaatatgtaaattatctttggttttacgagtttgggcccatgttt

SEQ ID NO: 252332 - DNA, 353 bp, Gossypium hirsutum
cttgtttccttttaaaagttcacctcttctctcttttttcttttcttcaactcaagaaaacataaaacccaatgctccaatctaatcacatatgatctcatctcttgcatcgagtttgagtttgcccttatgtgtcgtactttctcgatcttatcaccacctttctctcttcaaatccttctaaaactcagccatacaagcccaactcttcactcctttgctcctcccttttccactacaagatggttcaatgtagaaagcaactagttctacttctttggctcttattaatcttcactttccttgcttgtcattgccatggttcaagattaaccaccaatgtcttcaaaatc

SEQ ID NO: 252333 - DNA, 286 bp, Gossypium hirsutum
ctaactagagggaacgctgaagcacgctggggccccgccccgatattccgggtcaaacctacactttatttatatcctatatatgacttctttaacgaggtacatactattcagatctggagctgaccttgtggattcgagtgatttataaaaataaataataataggcagcatactattactaaggcagtgtgagttgtgtgcaggctctacagggcgggatgaattaaatttaccgctcgcgactaaacttagtgagtgaacatgacattattaatgaaaccaa

SEQ ID NO: 252334 - DNA, 380 bp, Gossypium hirsutum
atggtgtgaaatatgtgacacttaagaacagtgatttttattgggaattttcttagggttataacacttaaagcaacaaccaattagtaacagccacagaaaaggggaatgaatcaactcttggttctttcctcaacccggcagtgttgtggataagtgcgtttgtaatgccctggcaatggctacatttgacactagaaaaaataaacatatttaataatttttgtttctccttaggaataagactttagaactgttttgtactgtgaattacggatgctctttgaaggaaagaaatatcgattctaatgttcttcagaagctggcagggataagcaggacatcgactggaacgtatgctaaatgaaagcagacaaatt

SEQ ID NO: 252335 - DNA, 356 bp, Gossypium hirsutum
aacagaacccttgctctgtgtgggttcatttcatcacgcagcccttaacctccatcaatttgatggccagtggcgcggataagggccagatctagccaacgaaggtcacctttccaaaaatcaggtaacttcgctcctttttcttttgttttccacgaaaaaacgtaaatcttatactgttttttttaaaaaaacaaaataaatttcacatatattcaaacaaaactttaatctcactcgaccctcgcccacatctatgtatatctgagatgtttggggcttttcatcggcgtcagtctagatttcccccttttaatactcgtactaaatatgcgaatcaatccaagaaaataaag

SEQ ID NO: 252336 - DNA, 326 bp, Gossypium hirsutum
gcaaaccgactccataatcacgtgtattgggagcacagctgaatgactaaaacacacttaactatgggcttggcggaactaaaggtcataactggtaattgccaaagctacacatgaaatttattgcaatatgcactattatacatgaacttttctatgcaactctatgcattaaattgtatttgaggcaaggttcacagatagctagcacgagtggacgcttatatatattgcgtacataaggtattatatattcagtctgaagatcaagatatgtatgcattgttgtaaaagtatctgatatactgagagtgaagcttttttac

SEQ ID NO: 252337 - DNA, 130 bp, Gossypium hirsutum
taggccatacccatactgtgtcgggatcactacatgtatggtaaagttccgaaggttaatactctaagcatactaccacgtgctatgagaagggactaatctccaaaatcatcagatcactaagaaacat

SEQ ID NO: 252338 - DNA, 367 bp, Gossypium hirsutum
agtttatctagatactgtatcagagaccaaaaattacagttgttatacccttgtctacccacattcattcacacatgtggtgtattcacgcactcattatcaatttccaaatagtcaagtgatatcatggggatcgagtacttcgatagtttggttgcatccagtatatctcaactccgccaatacagttggggaagatccaagagattaacaagagaggaaaatatggaaataattgggggttgtgcactagaaatatattgcagtgtgggataatcgaatggcgcggaaacctcaaatggatatttctttcgatttgcaaccatcgttagagtacatacaatggtactccagtacgggaaaacta

SEQ ID NO: 252339 - DNA, 356 bp, Gossypium hirsutum
gcacaattgaggttcaatggatggcatttaaaggggcacatgtatttgggatgttcatgcaagagggagctgtcgaatgtttatgtatttgaagatttatggattgtatttatggaggaaaatacattgggacgtttcatgcataatttatgcattttcaagatgacaaatcaagtattttaggcacattaaagcctcattcagccaagggagatgtatgagcattaaagggctgcatattcatggaattatggctattcttcaaggttaagtatgcatgaatacatcaagtgaagcaacatgatggttcagccaattcatgtaccatcttcaagcatgaacaaaatgttaatgca

SEQ ID NO: 252340 - DNA, 366 bp, Gossypium hirsutum
atcgatgcatgagctgactgtggagaaactggaatcagcctgcatgggtccgtgtcctgggtccgtgtcatttgcctcccttgggcctccctcagtgctgcctctctcctgtgacctggcaggcgggtccgcctggggagctgtgttattcatgtgctgcctggttctcccagggtgttcaggatgcatgatgggtgaccgcaccctggcgtgggaaccaggaggcctggcttccgttggaggctccactgcccctggtgtgatggggcccgtctgccctctccagactccttccagctccgtctgtaaagtgatgtggccggaaatgatctctgagggtccctattgcagttggaggcagaaatg

SEQ ID NO: 252341 - DNA, 383 bp, Gossypium hirsutum
atgccatgatctgctgcaccgtcttctccagatggcgccatggagggagctgggtgcagtggaaaagccccagcctgggagtccaggatctgggctcaagccccacacgccccacatcgctgtgtggccctggtgaggcactcctgcgagcctctgtgcccagtctcccacggcaccctcccatggcactgctaggaaggaacttgaggcccacagaggtcaagcacctaatctttgaggcccgaggtcaagttgagcttttggccacccaacccaggccccctctgctcggccctgcacgccccccaggccctccttccccacaccacaggcaaacctgcccttgctgcagcgggagctcctgcactgtgcacgcctggcca

SEQ ID NO: 252342 - DNA, 364 bp, Gossypium hirsutum
atcaagacatattaaacacttgtaataaattaagacatatttaaaagctgtaatgaaacttatttacatgcttatttaaatggtctaaaactccagcaaataaagttaatttagctaaagagctaataatgagctgaattgaatttaaaccaagctcaaacgagctgaattaagctcatgtgagctaaaataaaattcggtgagctgaaccaagctaaatggagcttgaggagctgaattcaagctgaggtcaagggcatccttgaccagggtcatatcagaaacccactgatttctttataacctctgtcaatggggcagcaatagtagagaaatctttcacaaatcgtctataaaaactagc

SEQ ID NO: 252343 - DNA, 243 bp, Gossypium hirsutum
cgtttctgcaattaccccgaacattttgaactatctatggcttagttcatacaaaacctacattcgagccctcaaccctcgtcacagttcactaaactgaagaaaacaacggtaactccgtgaccttcctttcatccaagccaatgggcaacacagcaccagcaacagatctacgccttcaagctcttccgagctctccgtcattctccttcgacctcctcttccttcgatgccaaacaagtc

SEQ ID NO: 252344 - DNA, 364 bp, Gossypium hirsutum
  unsure (1)..(364): unsure at all n locations
caaggcggagaaatcccgctccctctgtggagctatcaaaacccgcaggctatcacggagaccatcctcaaatcggacgcagcgctcatattcgattgccaccatgcccctcgcataacggctcaatctaatgaactcagcctcgtactcaaccactgaacagtcaccctgagtgacatttaggaactcctgtcgcctagcctcaatgtagctagctcccacgtacttattctgataagtggtcttaagcatatcccaagttagttggtcgggctgagtgccctccttaacggatagccaccactgatacgcctcatctcgcagcgacggtctcgggtacggngcgttacatgacctgagtcgt

SEQ ID NO: 252345 - DNA, 360 bp, Gossypium hirsutum
agcatagaatgcttagtaagttcgtaatacaaagaaataaacttataacttcactttataaacataatcctctttagccaatttaatatatcttagccttagcctaaacaacattagcctttcaatttttagttatcacataattagtaattttaatcaaagaatttgacgatctttaccttttcctcatattcgttgaactacaatttaagtgagtaaaacaaggtcacaatttaatttggcccaaaagcctaacacataatcatcaatcaagtttactattcaatcaccatttaagtaaaataacaaaatacactaccaaaccattaatcacaatattattacatattcattcccaca

SEQ ID NO: 252346 - DNA, 366 bp, Gossypium hirsutum
taaaggcataagttaaacttaatgattgcaacttaatcttgaataaggaaataaaatcaaattattaagggttaacatgtcttgttaaggaagcatttagtctaattgtgctatcataatagttgttgagattaatttgaaagatatgtatacttaagtagcataactataaaatttcttgtttttaagcataagtatattaaattcataattctgggaagaatgttattctgaaagaatttttcaaaggtgttttctgagtaattctttttaatttgtgcattacttgggatgagaaatgatttaagtttgggggttcagaaacatggaaatttacacatttttacataccctttttaacttaaa

SEQ ID NO: 252347 - DNA, 377 bp, Gossypium hirsutum
atggctgctggagggtatgaagggggacgtgttgacatgatcgctggctgctttgtggtgagtggattctaggaggtagaagtagaatcaggaagccgagggaggagactccctgagtgaagatgacggcgggtagggactgcgtgagctccgcaagcagcatagcccctggacctgggggccttcctatacctctctgctctccggggtctggctgctttccggtcagcactgtaccggggcctttactgactccctaagggccccatgagccccaggatggcaaaggacctgtgcccagactcaccctcattagctgctttgcagccctcaggtcctggtgccctcagagacctggggatatgggagcgggtctg

SEQ ID NO: 252348 - DNA, 362 bp, Gossypium hirsutum
ctgtaaataacaataatttgcctggactagcttcaattctcccacatcaattgtctaactctccaaagattgcacctattgggaaggatcaaagcaagaccaataatacaaacccaatttttactaattctggagcaatgcaaggagcatcctaccagcattcgagatccttctctgagcaaaaggtaagtgcaagccctggaccaatctctgccttcggtgaatctacttcaagttcatctggtattggaacattgactggtcctcagtttctatggggaagtcccactccttactctgagcgtgctaattctgcttggccaacaccatcagtgacgcaccctttttcatcaagtggacaa

SEQ ID NO: 252349 - DNA, 408 bp, Gossypium hirsutum
acactatataacaagttggaacgaagaagcacgctggtgccccgccgcaatatccgggatggaagccacgcggtaccagcggcgaatagatgagctactggcaggaagctttactgaggaggatgaacacaccatcctggaggagctgaacgcgatcactcaggaacatatagagctgacagaggctgcctccgagcccctttctgagaagataccacaaaacgtacctgacaaggccaggcccaggcacgcggagctggtggcagcttctttatgtggtcttcttttgcggtactcgcggtggtgccccaaggactgtggcccacagagagtcagagtcatcgccagcccctgtccgggttccctggagcccagcacgcacagtgctgagcatgagccacagccaca

SEQ ID NO: 252350 - DNA, 363 bp, Gossypium hirsutum
atgattcaatttaaagaaataattatagtaacatatttttgcataaattgtatttaaaaaaaaaagtaggttatgacatattcgtacgtattaatgtttttttttgttcaatgtatgataaatgtatggataagttttcgttttggtcacttaactagaaaaaagttacaatttgatcactgaattattcaaaagttttcatttaagtctttgagctattaaaattgatgctatatgattttctctatttgcactggttgcaccaattaaacaactttatttccccttctcttttaaaattttttttatgaaacaattttgaacgtcacaaatttgcttactaaaatttaatcaatttttttt

SEQ ID NO: 252351 - DNA, 385 bp, Gossypium hirsutum
atcagctccctccgatggggtctcagggctgtgtcccagctcgcctccctgtggcctccccctagaactcctgggtctgtcaggacatgccccacctggcacacacaccctgtgtgactcccactgcctgtgggaggacgccgggcccctgagccagcctctgctttcccctcctgcctttggggtgccccgtaccgcactgttcccccagactgccttccactttctctgcctttgcacaggctgttctcctgcctccagtgaactctgacttctccatagcctcctgaagggccccttgctcacaatggccccagccaggccctctgacccagccctcctgcatggccacgttggtctctgagccttaagcctttggatgtgt

SEQ ID NO: 252352 - DNA, 367 bp, Gossypium hirsutum
gaaaaaacagaaaaacaaacagtcactgctaacaaaccaaccttcccgacgatcaaaactactcttgaaaacgtgcagaaccgggaaatgctttatttttcactgctcgctagattcgtcggacctggaggcagaagcagaggcacctcttgctaagagttcacaactcctcaagaacgctgatatttaatcagcttgaaaccgagtgggaccatggagttaataattacgagaagatgattttaattatacatggacatgagctatattctaccttatttggacggaaaaggcaagcaaattgggtcaggagaatgtcactttgatctagttaaagttggtttaatcgaagaacaagtctgacaag

SEQ ID NO: 252353 - DNA, 317 bp, Gossypium hirsutum
cccacgcgtccgaaaaaaaaaataaaataaaataaaaactaaaaataagaatcaataaaaaaaataaaaaaatgaaaaaaacaggaacacacgccctgtgtggctcccactgtctgtgggggggctccggtccctttgagccagcctgtgctttcctcttatggctttggagtgccccgtgcctcactggtttgccatactggcttccagtttttctgcctttgtacaggctgatctcctgtctccactgaactctggcttttgcatagcctactgtagggtcccttgctcacattctacctagttaggccctttgt

SEQ ID NO: 252354 - DNA, 363 bp, Gossypium hirsutum
gccgaatatgtgcttgatcaatgaaggaattgttgaagaatataggtgaacttgttaaaaactataatttctaatactcatatgtgtaatagccgaacctagactttgcttaatgtcttgagcaaatgccgattgggtgttttgaaatggataaattaggtgcttgatttcctaaaggtacggcatagtacatgatatttttgttagtatgctttcgaagaatttgagtagtgttatgtataagtaagattattacgtaggtcttggcggtatatatgtacaattgatctatttagctaattatatctagggtgataaataattaaataatatgtatacaaagaatgtgtgaaagagtgaatt

SEQ ID NO: 252355 - DNA, 365 bp, Gossypium hirsutum
aatccttgaagtatctctgtctgaatagtatgggtataagatccttttaaggtcctccaaatacatggaaatcttggaatatactagtgtcggatactcacacccgattccaagtaacatttgcttaaaattacttttagtctccacctgattcatcttatgagtgattctcgtaatccagctcccatacgaactcttatgtcagatggttcttctcttttccattgacaattcaggcaaaatacataacagatgctgaagagaggtatgacaatttattgaaaactttggatcctcagttgtcctcgaaataccagagaagatgcgaagaagccactaaagaaggtggcaaggtttcaggacac

SEQ ID NO: 252356 - DNA, 383 bp, Gossypium hirsutum
atcatgggaaagaaatcttaaatgaaaaacgcatctcattgtaggcattcttgcctcatattttactgggccatgtttgtttcctggtactcatgtattttttttttccagatctctttccccaagttgctattgtaggagtattctgctgcgtgtggatgcagttatactcattaaagcagatctggagtctgaagtagctataaagcagctataaaactgagaaatacattcatagctgcagaaactatgataggtagaggactttgttttgttttgttttttggttttacagagaagagatttttattagaaaaaaattccagtgaattgttgcagaaatgctggtttctacaccatcctaaagaaaagctaaagggtgt

SEQ ID NO: 252357 - DNA, 382 bp, Gossypium hirsutum
atcaaatacattccactgtgttctgatcacctgcagtatatagtacagtaacatgctgtacaggttttgtagcctaggagcaacaggctatcccatttggcataagtgtgtagtcggttacgccatcttggtttgtttaagagcagtttataacgttcgcagaatgaagttgcctaatatttctaagaacgtatccccattattaagtgaagcataactgtagttcagttatagtaaggtttacaaagtaaaatgatatctatttgcacatttcatgacaggccttcctaggagtgatagaggaaattactggcaacatgtgtgtgaagtagtttttgtaagtagaggaaatgcataggctacaaaactgtatggtagtttt

SEQ ID NO: 252358 - DNA, 362 bp, Gossypium hirsutum
cgacactatctaacaagagggaacgctgaagcacgctggtgccccgccccgatatccccgatcggacccagccggcctactaaaccggtctacattgtggcctatgacctggaaggtgcattgatcgttgatgtaacagtcattgcaaagatgacatgccttgttacaagaagtgcctagacctccttaccgccaccccacttttttctaatgagaaaggaccactcctgtacgaagtccacacaaggaaactgtaagcattgtttatttgtaaatgatgaaaagcaaagactttttaatgtgactcatagcacttgactattaggtctgactatgaagagtgagccttgaagccccctatc

SEQ ID NO: 252359 - DNA, 388 bp, Gossypium hirsutum
attccaaagagagcatctcaccttgtcactgaaaatgtagagtttctgcacctgaattaaggcaaggggaaaaaataaaggtgcaagccctgagaccgtccatcatctgcacatcatgctgtgatgtggtgaaaatcctggggagatcctcaaccttcactgctcaccaccaaaccccgactcatgctctcactagctcataatgcagtcacactttctaataagaagaactaccaccagctcatcaatggaaaattgtgctgaataattgccgcgtgggaataaaaatacctctcccaatagcatcttctctcatgaaacaaagagaagcccttcccttaactattatcctttaggtgagacaacatagaccccacttgcatgggaa

SEQ ID NO: 252360 - DNA, 365 bp, Gossypium hirsutum
ctttaagctttctttccaaccttacttgtattactaagtgaaagaagaagattatgagtgcaggggtgtctctcctcactatgctattccttgagttgtttatgcttttcgcctgcttccatgaatgtttatccagccctgtggatcaacttaaaagttatatcttaacacaaagaggagctgatgctttcttacctgaaattactccgagtgcagctcctcagccatttcttcctcttcttgcaccttctccgttgtcaccatttacaaatagtactattccgaaattatcaagactttgtatgttaaacttcactgcttctcaaagcttaatgaccatgacctcaactgattgttgggctgca

SEQ ID NO: 252361 - DNA, 358 bp, Gossypium hirsutum
cccacgcgtccgcaggcattaacataggctaggacacaactgtgtgtccctacttcgaatgcccacactgcctgagacatgggctatttcttgatcttgtgagtcacacggcctggccacacggccgtgtgaccactacagtttgaaaacttttatatttttttgaaaaattctataagtttacgatttagtcctgacttgtttctgatgcatatttaggggcttgcgggatcgtttaagtgacaatatgtatgttttgaattggttttagtgtatttattgatatgatttgaaatgtttgaaatttatgtacgtttgatttgaaaactcctataatgctctcttaccctggtttaac

SEQ ID NO: 252362 - DNA, 362 bp, Gossypium hirsutum
tgttggtttcatttgatattcttaaaaaaaaaaaaactatttgtgcttttctgttgtttttagactgtttatgtcgtaatttgctatagtttacttcttttgctttcattagtaccctttctggtaagtttatatatgttgagcaagctttgtgtagaatataagttttatttcgaaaagaaattctctatgcaataatgtagagaggagtggttaaaaattgccatgaaattccagttacactgaacgtgaatgagggagttgggattaaaaagacgtgaaattattaaatatagggtgcaattcaagtcataaaaggttttgatttgaaggaattcaatccaattccatgttttcacttc

SEQ ID NO: 252363 - DNA, 344 bp, Gossypium hirsutum
tagacagtctagggatgatggatatgctgatgtaaatacctattcaaagagagatgttagcagttggcagttgaatcatcggaaacgcccatacttggatcttacagaagcagttccagaaatgtctaccgagtcaagtcaaagaatgccatggagtgaagtgaggagagtttccacagatagaggaagtgatgacaaaaagctgaagacgggtttcactggaatataccaatataacggtgctagagatgaaggcacatttagtgataatactgcattagatagacatggtctgggttctggctcttgtgttaaagagagatgtaacattgcttgcgaagaaa

SEQ ID NO: 252364 - DNA, 351 bp, Gossypium hirsutum
actattgggaaagaaagcacgcctgcaccacccccccaatatccggggctcgacccacgcttccggatggacatcccgaggggaggtgcggtggcattaaagaaacttttcgtgaaccttcaacaaaaatgctgacgggggcagaagcctgtatggaacaaagtgcccattgtccaaccacggcgtaggcgataggtccctcgacttcaccaagttgagtggatcacagcacgtaccctgattactatttgcgtattaaaagcactgtgcacaacactgtgctgaaagagaaagaattgcacacgttcaaaaacttgttttccaaagggcctttagttccattttaatggg

SEQ ID NO: 252365 - DNA, 313 bp, Gossypium hirsutum
  unsure (1)..(313): unsure at all n locations
atgcaaagccataaggggcaggggccaccccacggcatctcctcggaagtacaggcctcaggaggaggtggaactgacggggggtggcactccccggagactgtcctcacgaggggactgggttcgctctcagctctgcagctgtctacagtggggggaaggttggggggtgtctnnnngcatnnttccctaaccaccccctgtgggtctcagggtggccgggtgcgaccttttctttctcaccaagctatcctagtgctatagcagttggtggttacctcccctttcactcaccatataggggtttgttgga

SEQ ID NO: 252366 - DNA, 363 bp, Gossypium hirsutum
ggttggagctcttttgcaaacatatcatgtgatgcatattatgagctaatatatgagttttacaccacatttagcttcaatgttagtgcattacagactattgaaacgcaaagcattatctgttttcgtctgcttggaaaggactttcaaatgtcggtatctaattttaatattgccatgggtttcgttgaccctgacaatattcaatccgactcctatcatactgctttgttagacattctgagcgactttaatgctcaagatgcctaccgtgtgttaaccaattctaatcaactgtataatccaaaaaccacaaaagacttattggtgcatgaacctaccttaagatatattcaccgattt

SEQ ID NO: 252367 - DNA, 315 bp, Gossypium hirsutum
atcctactacggctatgatgatggctatgcagtaagaggaagaggaggaggaaggggagggctaggtgctccaccaccaccacggtggaggggggcaccacctacaaaaagtacagctgtctatttacagatgtaggcacctcttgaaaccaccaatagtctatattgttaaccaatgaacatcctgctcaacaacagataatccttattctccggatatcttcattcaatcttagagactatgtaatcatcaagacaaagccaaatacctacaacctacctagtttcaatcttcgccagaccaccaaccaacat

SEQ ID NO: 252368 - DNA, 379 bp, Gossypium hirsutum
attttatagcttggacctttcttcactcaagtgcactaataaattatgtatgttgcttgaacaactagcattcctttggaccattggactatgaaagtctccaacaagaacttgctttaaaagagacagtatggaaaaaagtgtcacctgagtcaaatgaggacatctctacaactgtagtatatagaatggaaagtctgggagagaaaagctaaagaaatgggttctagtttcagaatgtttcttcatttaatctttcaaacacctttagctttttttttgcaagttataaatatttatttgaggtattttttgttctcaatcttgggtgctggagccataaagcttttttttttttccttttaatctttgtataaag

SEQ ID NO: 252369 - DNA, 182 bp, Gossypium hirsutum
aaggaccaaattaaataaattgcaaaacatggattctagaagcaatttgcatgaaattgctttaaattagtatttaaaaggtcctaaagagcaacttgcccaatttttaagtttttggacaaaaatagcatgcatagaaaactttggaagtttagtaaggagaggcattttggtcatttgat

SEQ ID NO: 252370 - DNA, 214 bp, Gossypium hirsutum
aggacgcgtgggtttagacacggtctaggacatgtgcgtgttatggccgggggagggacacatgcacattgacacagtcatgtgtgacaggcgggtgaaaacccatataggttcgtattgggaactaaattgatatgagtgtaggaaacacacatggccactatatgcttacgtcatgttggtggaacgagccattaacatgaccatgccataa

SEQ ID NO: 252371 - DNA, 378 bp, Gossypium hirsutum
atgccagatgtgtggaatctttagctcagcattgagagaataaaatgtcactacctctcatcttatgaacaggataatataattctttaacagctataggttatctggctgaagtagacctaattttacatgacttgtggtgtaaaatgtcttgatgataatttttaaaacttaggcaacatttccaaatatgggaggaaaggacagatgtgtttacaagggagggtttcattacaacgtatttgctttattcacctccctgttttgtgttgcatctttccttgaatatcttactggcccagagttagcctttctcaattatgtttccagactgtggccgtgattctaaaggaaaatgtgtgctctttaatgggtaga

SEQ ID NO: 252372 - DNA, 353 bp, Gossypium hirsutum
attttaagtttctttaatattgttttaaagaaatagagtgaaagtcgatactttattttatctatatggtttttatgtaattttaaatcgactctcgagcaattttttttaaaattttaattagttcatttattttgcgaaagttgtagatttaattattatactctagtttaatcaattttaatctttatattttttgaatttggtcaattttaatgttaacctaaacaacatcagttaaattcaattactagtcatgtactatgcatatagttgtagatttaacccatatttaacaattggatcattttaagtccgtgtacttttttgaattttaaaattttagtcttgat

SEQ ID NO: 252373 - DNA, 372 bp, Gossypium hirsutum
atcgcggggatccctccctcccacccgttccctcccccccgcgccccgattccggccccagcgcgggggggaggtcttatgtatatggctgttatgtgattttaaatcgactctcgagcaattttttttaaaattgtaattagttcatttattttgcgaaagtggtagatttaattattatactctagtttaatcaattttaatctttatattttttgaattcggtcaattataatgtcaacctaaacaacatcagttaaattcaattactagtcatgtactatgcatataggtggagatctaacccatctttaacaattggatcattttaaatgccggtacttttttgaattttaaaaatttaggcttgat

SEQ ID NO: 252374 - DNA, 385 bp, Gossypium hirsutum
atgctcagtaagaacactcagacttacgacctttaccatcagccaaagtgtgctggtcaccaacttgaaaccagcaaccatcaaggtctatgactactacctaccagatgaacaggcaacaattcagtattctgatccctgtgaatgaggacagaagctggaaagagactcaattagtcctctatgtcattactggagggtggaacattcttctgtcgcttgaagcagaactcattcaatcaaataatttaatttctctgactagtaaatgggtaacagatgaatatgtctgaacctcagctgtaatactttctagtacctttgcaaggagatgggataggaacaagcactcaaaggaggcactgtatgggcaaggtcacaaggg

SEQ ID NO: 252375 - DNA, 354 bp, Gossypium hirsutum
cccacgcgtccgatcatttccaaccccatccaagcctgaacccagattcaatttcaaattaaaagccatcaaaattttacctaccggcgaattccatcgattctcagtatccttaagctccggttgaaatcagggtcaacggtttcaatttcctctcaacaaaaacacagcagttgatgccttttctcatatagatggtttatacaaccttaataaataggttttctatggcgttctccctagctacatttctagaaggtgtcaatctccaagataagttttttgtttgttaatgtttctataaatttagtgcagcttgtctttattgtttttattggtgaggcctacggttac

SEQ ID NO: 252376 - DNA, 434 bp, Gossypium hirsutum
cgacactatataacaagttggaacaaaaaagcacgctggtaccgggccgcaatatccgggatctgaatgaagggctcctgcagcattgggggcggtatcaggggcggatcaacccatatatccttcgaataggccggagggtactgccgcgcccccagcacactacagcggaacgcctgtctgcattctccttccgcttctgctaacaaggagactaccggctggggggcggatattgatgaagcttgaatagcacaagaaggtccagtagtgggtaatgtgaaggaaataatggtgactatgatgatgattatcatcatgatattcttgtttcgatgtctaggttcaagtcaatgattgaaccaaaaatgacggagtgatcacctactaaaaaaatatcctgtgatggcttgttgatcagaaaggctgaaatt

SEQ ID NO: 252377 - DNA, 371 bp, Gossypium hirsutum
cccacgcgtccgattaaataactttttaaataaaaaagataaaaataaaattttaaaactaaaatattattagatttcttcttctctcactttgaacaaatagggtattaaaaagaaaagggaaatcgagggattatctattccctcttcgtttcctcctatgtaaaaatataatatccaaataagagtaatgtaaagctcaaatgctacaaaagggatgaattgatgattaaaaactttgtaataaagattgacaaataaaaattaatttaaaaattttaaagtgattcgactctaattgcctatatgtattaccttaactgtttacaattaaagatttttcaaatttactaatttgaaaaattttaaat

SEQ ID NO: 252378 - DNA, 373 bp, Gossypium hirsutum
  unsure (1)..(373): unsure at all n locations
atcggtatgaaggggacccagctcagttccggggcctctaagtctcctccagcagcagagcctggggggccgcaggagcaggctgggagggaagaagccttcaacatggactctgcctactcagaacaagctgcggtgctcctgcagaagagcaggccatcccagggaggcacctctgcctggggcaagtgttccctgccgaagtttaccatccccaaaggcagacttggcgtgacgaggataggagacttgtccctgcaggatatgaggaaggtaccttctctggccctcatagagctgaccgcgctctgtgacgtacttggcttggacctgaagaggagcaaggcggngaagtggaaagcggcagaaactc

SEQ ID NO: 252379 - DNA, 293 bp, Gossypium hirsutum
acactatagaacaagtgggaacgaaaaagcacgctggtgcccggccgcaatttccgggatcagcacatccaccaccatcaggagccacagcagctgccgcaggggcttcagtgccggctcagacaggctacctggggtcagacgctctggcttaagcagcgcatccgggtcccggtccaggggcatgggctgcctgggtcgcgcatgtggaagagctggctgtggcaaccctaacctgtatgggctgtagggctccaagaggatctccatcggagggggctaactcgtccata

SEQ ID NO: 252380 - DNA, 385 bp, Gossypium hirsutum
atgttaagtggaaaaatacacagtttggtaaaatagattccacatttatttgtgggttttttcccctcctttctttccacagcacttttgatatcaagcaagtggcttcctttttgagatattaaaaaaaaaaaaggaagaaaagtaaatgaagcccaactacctaaccctttcttatttgtatttgttttagtattgtgaagttgtgttaaatagtactagctagaaataccaatttctggttatcatttctcttccctgtggcacttgacattttaattgtcttaaactttttgaagtacatcttctggccccttgagtactgccagaggcaaaagatgtttgtttcttactcattccacttttgtctcctgggatcccttct

SEQ ID NO: 252381 - DNA, 369 bp, Gossypium hirsutum
atgcacggcattatttttagtagttctgtttttctccaattctttgtctcattccctcctcccttcttttctccttgtcactcacagtagaaggaattcagactctgaggatgaggactcaggttctgccagaagcgccaccgtttttagtagagcacaaaaagcagagcgtaggctagatggcagctgccaaagaccttcactcttgctggaattagctaccaaacgggctgtaaaatcaccggactcccatgcagccaggagaagcagtagtgcttcggatgagcccaggtgcccctgtctgcatgagcctgcctgctgggggtctggcctcagacatccctctgcccgcttctgctgctccattaa

SEQ ID NO: 252382 - DNA, 358 bp, Gossypium hirsutum
cccacgcgtccgcaagtgtacaggtcaaatattaatatagttaaatttacaacgaaacactttggaagtattttcaaagatcgtacccaagggattgctaagttggtgaaaactattattaaattaattatctaaaaaattactagtctaatcaagttacaaattagtagtgcaaactctaaattaagatgaaaaaaaactaattaaactaaaactaaacctaagttaaactatcgaaacttcctattcctaatttcaacgatgtgagctacttagcctggaattgattgaattgttaattatcaactaagcaaataattacacttaattgagttatttaccatctttaactaagaac

SEQ ID NO: 252383 - DNA, 315 bp, Gossypium hirsutum
taaacacgtgagttggacacactgagaacttgggccaccaaatcaacatgttaaagctaaccataccaattgctaaacctgacctgataataacccgaaacaattactaaacttcttgcctgctggacaggaaaaaactaaagcatacttaactaatgttcatgattgatattcttgatgctgtcttcaatacacaacatgagcaactagattatcctgtttgcgtgaggcataagacatataaggcagtatggacagagaaagccccgtataatctgcctagaacaaataaaaccatctagccaaggatctact

SEQ ID NO: 252384 - DNA, 383 bp, Gossypium hirsutum
atcaaaaacacagtaacagcagcagcggcagcctgactaacaccccagaacggggcagtgatgaggacattgaaccactgctgcaagatagcagcatttgggagctctcttcatttgaggagcctgggaatcagtgcactgagttgtaaactcggcagaaggtgggattctgcatacgccatctctgagagccatggagggagccacacccctggtgacttcatggtgctggatgggagatgctagcggcatccttcagggccaagtttgataaataccaccaccatcgttctgctcttcctcctcctgtttttttttttttttttttctcttacattttttttcctgtttatacattagaataagataagatttgaaatact

SEQ ID NO: 252385 - DNA, 349 bp, Gossypium hirsutum
atacttaaaatgatgtatagatcaaccaagctctctcttccaagactttctctgcttctctctccctcaacactcaatattctcaactcaactatcttttccttcttctacactaactacaggggcaaaaccctaaatttttgaaaattttcattctacattttaaattttttttaaaatttttaactaaactcttccaagttttttaaaaattctcattatgctcctaaaattttaaaaaaaaaaagtttagttaggcccccaacacttaccccccagatcccacactgtctaactacatcctactacactccacctatagatgaaccgaccaccataatctcaacct

SEQ ID NO: 252386 - DNA, 380 bp, Gossypium hirsutum
atgagaacttcaaattaaagattaaaaactgaacatttgtgattatcccttctgccctcctaagaacccactaaaactatagtaaagaagtaaaagagagaagagaatgaaaataaatagagaaagattatcagtgaatgaatgatttctacagttttctgggggacagaaagcagatagaggaatggtcattgaaacacagcagagcaagtcagtttcatctgttacttatttatacctcaaattgtactcacaccacaacagtggcttataaaatcacttatcattacaaattgcaatagaaagtgtcaagagtatgtctcataggataagtattattatgtgaaacatttattttgaggaggatgcagataaagaaa

SEQ ID NO: 252387 - DNA, 362 bp, Gossypium hirsutum
agacacaccacccttcttctttttcttctctttcttccatgtccttgtcttctgaatcccaacagcagcaccaacttcgctaccatggttatcattcccaggcgaatcacccctttatgtatccccatgcatcgagacctccaggggttggactgtcacctcaagaaaacaccacacattctctcctcggctctggctcttactcccagactaacatggattacaggagaaacagttatgtttatgggttgaaagaagaagtagatgaacatgcttttttctctgaaccttccggtacaatgaggagtttctcaggttcatctgtggatgattcatggcaacttgcaccactaacaatgagc

SEQ ID NO: 252388 - DNA, 370 bp, Gossypium hirsutum
atgccaaagccgttctctcagttctggcagcccctgctcaggggcctgcactcccagaacttcacgcaggccctattggagaggatgctctctgaactgccagccttggggatcagcgggatccggcctacctacatcctcagatggaccgttgaactgatcgtggccaacaccaagactggacggaatgctcgccgattttctgcaggccagtgggaagcaagaaggggctggaggctgttcaactgctccgcctcccttgactggccccggatggttgagtcctgcttgggctcaccttgctgggccagcccccaactccttcggatcatcttcaaagccatggggcagggcctgccagacgaggagc

SEQ ID NO: 252389 - DNA, 296 bp, Gossypium hirsutum
  unsure (1)..(296): unsure at all n locations
ctcgaactggtctttcctcgaaataagctcgaccaaggactcttccacgatcatggcttctgagattattggacccctcaacatttcaattcatgtttgacccatggcttcaacccatccatgaaatagaagaatgtctcattctcactaaaatccataatttggagtactaaactccttcacctacactcgaattgtgccttattgcgagaatcgatgtaacttacattaagcctnctccttggcatattgagggtaaaaattgctcattgaactctttatagaaatactcaaaa

SEQ ID NO: 252390 - DNA, 353 bp, Gossypium hirsutum
cccctttcaaagaaacctaggtgcttaccccaggtactgcgccgctcttgcgtctacgacctccacccaggctccgattgcaacggagagggtcagagatccgacggcttcctacgacaaggtacgactccttccttttcttcccttttttgttgtttcgcttatagatataaaacagaaatgaaaagaaacggccaaaagacaaagaaaaaccaaggaaaaaaaactaccatcacctttcgaatttttgatttttttatttctctctgaatctttttttgtacacaatatgcctgtgtgtctgtgtgttgatatcgtaaaaaaggaaactttttacagattttgttggctct

SEQ ID NO: 252391 - DNA, 372 bp, Gossypium hirsutum
atgtttctttaacgatatgaataagtatataaactattgcaaccttaaacgagtcatacacgcatgtcgagaaccacagagtgttaataatggtcacctttcccaacttatccagtgctcactaggaatggcagctctgttttgatcggttaaaaacatgtcaccttacagtaacgactttccacaagcccaaatcatatggctgagctggcttctcaattcctaccctaattactcctcatgcttcttagagcttctacatttttgggagcatcatttcattgatcgctgactttgactgtatagctcttggcaattatactgtatactctgccaagagtggaatgtctgacgtcagtgcctacggattcc

SEQ ID NO: 252392 - DNA, 370 bp, Gossypium hirsutum
atgagaaatactcttaaggtaggatcaagccacatagaaaacatttaataaaaagtaacaaattttgccacataaatgctgctagtcaagaagatgtatgcaaagtaagttgcatatatttttaaaaatcagaattgtcaaatctccagacatagatagagctagaaaggtcaacagcaggtggaacaggtgactgtccagaaggcagcaactgtttggcatcactgtgctgttatgtgggacctgtgtcgggttgggtaacagatcatgctcactgactgtggtggccaggagcttcagaggggcctgtgaatcacggatgggggatgagggtagagacgagacttttcagtttaaagagtgttcccct

SEQ ID NO: 252393 - DNA, 368 bp, Gossypium hirsutum
atcctttttaaaaaatagatttggtactgtgagatattgctaatatgtccttatggggatgggtgccacaaatagaaaatatgaccagatcagggatttgaatgcacttttgctcatggtgaatatagatgaacagagaggaaaatgtatttaaaagaaatacaagaaaagaaaatgtgaaagttttacaagtagagggatggaatgtaatgtttaatgttgatgtcatggagtgacaaaatggctttgctggcactcaaagctcctcacttagctatgttctgagacttttaagagttataaggtataactataaaactaattttttttacacactaaatgggtatttgttcagaatagtgaagtta

SEQ ID NO: 252394 - DNA, 189 bp, Gossypium hirsutum
ataagctctaggatcttcatccaaactttgtaatagtttataggcactacgaactgtatactcacccgaaggctcaccgctccatgccagaagatcatcgtgaggctcaactgccagtggaatgcgaagaatcctatcagctacttcttctggaaaggtagactcaatcaactcttttttccacagtcg

SEQ ID NO: 252395 - DNA, 377 bp, Gossypium hirsutum
atgttcatactctgtcctgactcctttgtaacctgggaggcagtctgcttgggcccacgtctctgaagctgctcagtaaatcagctcaacggaatccagggagctctgttcggttcctgagttatgtgcccagtcacagtgctgcggctttaggaggagctcctaagaggaccgtctgcggctcagttacaccctcctgacgtgagccccctccctggctgggggctcactccctccgctaaagcccttgttcgtcctctgccagggcccaagaggtgcagcttcacggaggccaggggcgagaggaggcccagctctccccggctgcccatgtctgacgcactgcctcggaagcacctgtggccactgggcggctt

SEQ ID NO: 252396 - DNA, 356 bp, Gossypium hirsutum
gagaaatcagcttgaaaataaaaagtgttgtttagatcaaaagaagagattttaaacaatggcgtctaatgttaagccagtgttgggttacgccatattttacgttaaggacgtagcgaaatccgttgacttctatgcaaaagcctttggttataatgttcgtcgcttggacgagtctcacagatggggagagctggagagtgggcagaccaccattgcctttaccccaaagcaccaacacgagaccgatgaactaaccggtgaagtccaggttccaaaatctgatgtccaccgacccccactggaactctgctttatttactacgacgttgacgctgcattcacgcgggcagtgg

SEQ ID NO: 252397 - DNA, 355 bp, Gossypium hirsutum
aagaacaacaaagaatagcattaaaaaacttaaaaacgaatctgaatctcatttttttttcagatttcagatacttgataggcttgtctacatcagggtctaacgaatccatatctataggtctaaaaatctgcaactgaaagataaccaggatgcccaaagtcaaggatattattagattgagtagaggttatttttagaattgggaatgtatacatattttcgagctttttaaagcttcatttatattttcgatgattcatttatactccaatttctaatactctgtgagctcctttttgtttatttttccgaaataatttatgggtttgcttacgtaagctctctgcaagta

SEQ ID NO: 252398 - DNA, 173 bp, Gossypium hirsutum
cttgacacggagctgaggcggctctttcgcgagcgctatctgctggaccccaagggtgtggtgggggtgcgctacgaggcgggcaccatccagatttggctgggggggaacacgttacaaaaaggcgcatgtgacccggccatctgtgatacacactactacttctagagggg

SEQ ID NO: 252399 - DNA, 382 bp, Gossypium hirsutum
atgccataatagtagagttagaactgaagaaaaaagttacacaggaggtgacaaaaaaggttgaaagagaggttatcacctgaggccttcttaaagggagagaggaagagcagatctcaggaggaaatgtggcagaaatagaaactctggacagtgtaaagcatggctgttaatgaaaacagatttcagatttaaaaatcaaaaccttttctaattttctaagagtaaatgaatatttcaagaaagccttgctgcttttacacaggggaccaaatttttagttttgcgttagtgtatctttaatatcaaagcttaatctttagaaagacacaaatctcttttatagccaatttgatcacatgcagaattttctttcataaag

SEQ ID NO: 252400 - DNA, 362 bp, Gossypium hirsutum
cccacgcgtccgataggccattaatgttggctaatattgattattattaaatgaatttgatgcaaatttctcatggatgtggttgttttagttatatgtgttatgcttggattggttttggttgatgttgtgtaggttggtgcaagtgagggtggtaaaaaggcttggtaaaaagccttgtttttgtccacatgggcagacacacgggcatgtgtctagaccaagtgtgacacatgacttgccctatgggcgtgtggtaaggtcgtgtgtcccctatacttaaagttggcaaatcagaatgcccagtagtaaccacacgggcagagacactgccgtgtgtcccaaccatgtagaggacacga

SEQ ID NO: 252401 - DNA, 318 bp, Gossypium hirsutum
acaaaaaagcacgctggtacccctccccaatttccgggatccaccatacaccgagtgcgcaccggggagcgggaacagatgatgactctaaacaacatgtacggctgcttaatacgacatggggcggttactgcagcagaacatcaagggtttggaaaccaatgggacccttttgcacgagcatcgtaccaagaacctgacacataacctgaatgcttggcacttactcttcatctgcaacccaaactggaatatgctctggcatacagaggaacggttgctatttttatacaaacgcatatgcttgcaggacctaat

SEQ ID NO: 252402 - DNA, 354 bp, Gossypium hirsutum
cgaacatgtggtcaaggcatacgttcttatggtagagacacacgtccatatgtgcaacccgctgtcaattttcctatcaggagtcacacaacagtgtgaccagcccgttgaccaattttacccaatttctaaatggcacacgaccatgtgaaccgcctatttgccagcccgtgtggtccaaaaatctccccgaaactgctgcaaatcatgaaaattcaacacaaaattacccctaattacaaatgtacaagaacacacttgagagatgacaccatgcactaacaatcgattgatttccttatactctaccgtcctataacccaattgcacaatcgtactaaatccttaagaatt

SEQ ID NO: 252403 - DNA, 353 bp, Gossypium hirsutum
aaaaaaaataaatggagggactaaaagaatttttcaaaaagtcagaagactaaataagttgaaatcgtgttattttatattgataacaatactcatactaataaaattaaaattaatccacaagctaatattataaatgttaaagaaaaggaaaaataaatcattgcaattcttgttaaaaagaaaagaagatcgtgtggtgaagaaggtggcacgtggtctaggagataggtaaggatgtgacttatgagggggaccgccgattttagaaacgcaggcgcggtggcgggttttttattaaaataatacaaaaaaattaaaaaatatcaaaataagattttttttatttattt

SEQ ID NO: 252404 - DNA, 395 bp, Gossypium hirsutum
atttctatggagacgaaaatcctagatgacaagaaaccggaggaagaggaggtgaaagagagactgaaacttctcattgaataagaaatcaatagaaggaaaaagaaatcagatctttctgaataagaagaagaaaaatcagtactttctttccattgaagaacaagaagtgaaagaggatatcaagggaaaatgtcaagagaaaaactaagaagagccgcacttcctcctgttcaagagaatattgataaattagaaaaagctataaatgagggtaatttctatggagctcagcagatgtacaaatcaataagtgcacgagaaaccgaaggaaacctgaagaacttaatgcgggaaaaaaggtgaacagtaggaaagtgaggaaagaaaaatta

SEQ ID NO: 252405 - DNA, 376 bp, Gossypium hirsutum
aaaaaggccaaaaccccaccactctccccgcctctctctctcccccctcccttgaacagaggctaaactcttgggggggataaagagataagagagaatccaagcaacacacatacacaaaacccttagctgccaccaaagcctcttttgaagatatagtttttaagggagcattcattctgaggggaatgttgtctggaccggggacacttgtgtttctaatccattttccctgcaatattgttctggccatggggatctttatattgcttatttttgtaatggattaaggttgtactagtgtcgtcggaccaggcttcattccccccaatcattgctcccatatgcaactcccatggactgcagcatgtaaaaa

SEQ ID NO: 252406 - DNA, 138 bp, Gossypium hirsutum
ccctccagggagagattcaagctcgcctagacatttcaacaaatacctagtgatcttcctactagagaaaccaaaaataaaataatgaagagggctgttatctcagtttttgtgatgctagccatgtttcaattcgtg

SEQ ID NO: 252407 - DNA, 212 bp, Gossypium hirsutum
taaataaatgaattgaggtagtgttcacaagtatacatgttgagttgtaatacagttacaacaaagtaggatcgtactcacaagaggcgagtactaaattaatgttaactaaatgcaaatagaattaattagtaatctaaataaagtatattacgattgaacataaaaaagagatttttaggttttttatatttaaaaaacaaatatatact

SEQ ID NO: 252408 - DNA, 322 bp, Gossypium hirsutum
gagagaactgatgagtggtgcccggcctaatgctatacaccaaattttcataactacgaagcttgttgtcgggatgatgatgatgatgacgttgaacaaatgatatggcatatggggcgggtggtgattctactgcgaaatgggtgaaaactatgcactgagtttctccgtgcagaatcgtctctttgattcctgaaaacttttctttctcaaggaaaaagcatacattaaatggagcctgaatattcaaaatacatatacttgcgaattttgaattgatttaaatatatataattaaaattgggacctttgcttcaatgtg

SEQ ID NO: 252409 - DNA, 372 bp, Gossypium hirsutum
gcaatcttaccattgaagttaccaaaattatcaatacaaacaatcacacgagcattcgcacgctcgcaagttctcgagatgctggcttttcagcatttcgacttttcagcttttaccgatctagtctactagtgggtgtcgtttacacacctgatttgcgacaactgctaccgaaatctccacgatatcctacaatcggttgctagacatatcagattcaaagtataatggcaaacatcataaacttacttaccataatcggccatcaatacatatggcccttgagatcctacctttgccaaaactagtgactagatctcaatctagtcgttccacttgtccaagccttcgatcagcagcctctagatacac

SEQ ID NO: 252410 - DNA, 298 bp, Gossypium hirsutum
aaatgatttcctattgtaaaatattttacaaaacacgggaaaaggagttcttgtttgaggaaaatgtcttaccgttttgaattcggtaagacattttccggaaaatgacccattgttgttcgctttccccttcttcttgagttttccattctccttacttttaccgtttcgaaccctacattacactccaagccatggcggcgtccttcccagagaaatctctgtttctacctttgattttccctacggacccaatctgttagaacaagctgtcctcaaagctacgccaggatttcat

SEQ ID NO: 252411 - DNA, 374 bp, Gossypium hirsutum
tcgattccaagcactattttagccatagttttaaccacgaaatgaaaagtacaaaagcaataaaaagaacattgagattgtttacgtagttcaatctcagcctacatctggctttgctcaaagtaacaatttactatctttctcacaatacaaccaatgatttaagtcctaacactggtctaacactcaccaattcaacaacctcaccattgtacaaagactagatcactctccctctaagcttccccctcgaaagtttaactttgtaactcaagagactctcttagttgcttacagaaataatgcacacatttacactcctaacttaaataaattcatactctatcaaactcacaaaacattctcttaccctt

SEQ ID NO: 252412 - DNA, 385 bp, Gossypium hirsutum
ggtgcatatcagaaaccttagtttttgcaagttttgtcgttgaaaatggtggctgtcaacgccacacggtaggcacacgggcgtgtaactaggccttgtgtgccatacgaacatgtggtaggccgtgtgaacggttgtgtaacttactgtttattgaattaagaccacacggatgtgtgtttaggctgtgtgtgaccattttagtgcatggtctacatggccagggacatgggcgtgtgcccagaccgtgtaactcactgtttcaggtgtgaaaaccaggcccaggccgtgtggcaggatgttggatccgaaaaaatttttttgaggctgagaagggtgctaaactctgatattggtttcctttatttaggaatgactgaatttg

SEQ ID NO: 252413 - DNA, 177 bp, Gossypium hirsutum
cccacgcgtccgaaagcgtattcaagagtcgccaagtctctactttcttaaagaggctaatgagcataatggggatgagtgagcaatgggtcgcaacttggattaaacaaaagggagatagtaaatgtatcccttgaaaaattttgaggggtttgatcttggcacattcggatacaa

SEQ ID NO: 252414 - DNA, 373 bp, Gossypium hirsutum
cggacgcgtgggcttgcacacccatgcaagctaaattagctcaattgcatctcactgagctttgtttagctcgtttccagctcaatgggatcgttttgctcaatttgagtttattttaattcttttgatttcattttctgaaataaattgaataagttaatttatttatttatttaattcagctcaaataagtgttagtaaattaatatgtttaaatctgaacatctttaataatttttttaatttaattgattgtgttttatttattacatctatttaatatgctgaatttattaatgttttttattagtttcagccgaattaaagagtagtattaaatgtgtcttaagttctttaaaagtgacgaatttat

SEQ ID NO: 252415 - DNA, 390 bp, Gossypium hirsutum
atagaaaatgaacttattagcatatcactcaagtataactattaacgtgtttctttctaatcattttagactctatgcttcggtttggggttttcttttaaaagattatgatcaagctgtatgtagtgtgtgttctcttttccacttaaactttataatacgctttgagtaactgcatgtttctttgtaaacatttttgttggcagcaaaatattccattaagtgaatatctcataatttacttaactgtgatgccatttagagcaaaggaattttgaatggccagatgtgatttttgtctctttgttccctaattagatacgggcagctgtatgttctcttcttgaggcatcattctcggacctccaacagcacaggagcggaggtggt

SEQ ID NO: 252416 - DNA, 375 bp, Gossypium hirsutum
ggaaatatgaaaaaaaaagcctccatatttccctatgcttccaacgtgcaggagaaggatgaaaagagaaactttcatctttttacaattttgtccttttccataacattttaccttttcaacccaaaaccttaagaatttccatagcaattaaagagagaaagtgatgctgagaccttaaagagcttatgtatcatcttagaatcaagatatttgaagttggaagtgagagaaagttaagagaagtgtgagaaaccaaagttacaaggtaagaccttaagtgttctctcctggattttatgcttaatagaagtagaaacatgaaaaagcaatttttagtgtagattttaattaagttcatcttttttttatgta

SEQ ID NO: 252417 - DNA, 344 bp, Gossypium hirsutum
cggacgcgtggggctgcaaatggggattctaatttcagttgatttggtgcttcatagacctgtccatgggccgggccgggccagaattttcagcccgtttactaggcccgggcccggcccgaaatatgggcctgagattttgcccaggcccggcccgaagaaaaaatatggggcccgagcccggcccggcccgtttttaattaaaattaaaattaaaattatttttttaataaaattaaaactaattgttattaaaattaattggtaagtaaattatcaaattattaattgttaattggattaattggtggaataaaatctaacatttgattaggtaatttatc

SEQ ID NO: 252418 - DNA, 356 bp, Gossypium hirsutum
tgtatatttatttatgtacaacttactaagctttaagcttactccctctccttttctgttttcttatagtgctgcctatctagctcaaagaccaacggaagttagagatatcgattacactatcaatcaaagtattcggtatagtttgatttatatttttaaatatggcatgtatagggaactagacttgcgttttgtgtattattaatttggccaaatgtgttggattgagataaatactcattttttatgaagccttgaatgatggcaaatattgattttgatttatatgcaaatgaagttactctcatgaatgagtaattgcttaatcgatatatagactattggggctgatt

SEQ ID NO: 252419 - DNA, 330 bp, Gossypium hirsutum
atggcggccgcggcggcggcagcaacaacgggggctgcgggccgtcggggctccgggccggggcggcggcgccatcttgtgcccggggccggtggggaggccggggagggggccccggggggcgcaggggactacgggaacggcctggagtctgaggaactggagcctgaggagctgctgctggagcccgagccggagcccgagcccgaagaggagccgccccggccccgcgcccccccgggagctccgggccctgggcctggttcgggagcccccggcagccaagaggaggaggaggagccgggactggtcgagggtgacccgggggac

SEQ ID NO: 252420 - DNA, 398 bp, Gossypium hirsutum
atattttaaattatattcgtaccaggagttcacgtgaaagcgtcagccccgcttggcgtttttgtgcaaagttttctcttctttcctgaggagagagaaaaggtcctgacggcggtgccatgactcacatctctccgtggcccttgcctggaggttccagggcaggtgggctgtgagtggctttgattctggagagcccctgactcaccattacgatacagagagatgaccgcacggtcagagcccagacctggaagcagaggggaaactgaggccagtctgggtctcacatagggagcgagagcagggcctgtgagccagccttggctggcgtcatgggagtgaccaggctgggtcgcctctctcggcagggggggttccgggcctccgttggcttt

SEQ ID NO: 252421 - DNA, 224 bp, Gossypium hirsutum
gggtggggtttaaagggtttttcagagttttcaagaagtcccaaccttttcaacttcatcccaacccaacccaacccaaccttattttcaaatctttattattggtgaaaaaaaaatggtggagattgggttaatgatcacttgccttttctttctccggtttctgggtcttaccggcgccaggcaaaaatctattgaataccctaagccttattacacaactt

SEQ ID NO: 252422 - DNA, 384 bp, Gossypium hirsutum
atcttttctgattctggtggatcctccctggcgtaattaaaggctctttgcgcctccccatactatgaaatattatctaggagttgaccctgaatgatccacgggcaaaccagaggttaggggttaaattgaaccgtagcctgccaacatgtttaatcattctgtctctaaaatatttaattatagtgtcagatggtaaataatatatcctcaccgccacaatgttaccccactcagcctataaccactactgctgccgccatcggcaccgcggccacatttactccgactaataacattccgctcttggatacttcagctgcatttttgttttaccaaagagtaacgtctgcggacttctttcagtttcaggttcactctata

SEQ ID NO: 252423 - DNA, 374 bp, Gossypium hirsutum
cccacgcgtccggtttctatcaatgaagattgctactttgaatcctatgttttattatctaggagttgaccctgaatcatttatggtcaaaccagaggtaaggtattaaattgaaaaatagtttgataatatgtttaattatttgtctctaaaatatttaattatgtttcagatggtaaataatatatcctcaccgccacaatgttaccccactcagcctataaccactactgctgccgccatcggcaccgcggccacatttactccgactaataacattccgctcttggatacttcagctgcatttttgtttcaccaaggagtaacgtctgcggtcttctctcagtttcaggtacactctatattagggtttt

SEQ ID NO: 252424 - DNA, 363 bp, Gossypium hirsutum
cccacgcgtccggttaacccgttatgtgttgttgttgatgatagcattttcttaacacttctcgctgcaaatctttcaaaaacatctcatgtactatcattgtttccggggttgagagaaaaaggagcccaatatttggaaactgttgttaaggcaaactgtttctctatggaccgtgtagaagtacctgaaaaaaggaaaccttgtttgaccttgcaagatactcgtgggaaaaaggttgatatgttgattggagaaccgtattattatgcaaatgaagggatgcttccatggcagaacctgcggttttggaaggaccgtaccttgctcgaccctgtcctttcagaagatgcgttgataatg

SEQ ID NO: 252425 - DNA, 357 bp, Gossypium hirsutum
atgttttggaggctttggggtagtttattatttaacacattttgttttattggccaccctcaatgatccaattcccaataggaaaagaatactagaatgggaattctgttttaggttaaagatgtggtaaaaaaaccatctgcaaaaggaattaaaagttccctttaaaactttttaacactgggagacaccaaattttatttgggggcttaataaaggcctttaatgggttctggttaaaaattttgggatggattccttaatggaccttgaacgttgtgtgtgagtgtgaatacacctgcatgtgtgcttgtgcctgtgtagttgcagtcttagacaggtagctactattttttg

SEQ ID NO: 252426 - DNA, 306 bp, Gossypium hirsutum
gctggggttcgtgtgatcgactatgttgtcgacagggtgtcccccaccgcttccatgatcgactactttaaccccaagcacgtagatatcggatgggtcattaagccttttatggctatgaaccgtcccaacgttaccataactggccgtgctgaccagatctacactcgggagatgactgaccctgatgcgccaagatcacatcatgccaaccatacttaaatgggttgactggaccgtgtatgacattcctgtgcgaaccaaccccactcaatggataggaaatgctggcatacactattccac

SEQ ID NO: 252427 - DNA, 383 bp, Gossypium hirsutum
gccaatccgaggattttgaagagattttcttgtccaaagatgtttttggaaatagttcagcttttccctcttgtgagagccctttccattttgtgcttcaaagaagcccttctttcggtcaccggacacccatcttttcttcgccggcgacatccccaggtcgccaccaaaaacaggacaaggaaagttataatgaagtagagagcttaaagaaagcgcaagtagtagaagaagaagaacagttcagccctgtatctgttctggaccctccattcgaggacgatgacgatagacatgtgaatgttgatgataatgatgggaacgacagttttgatcttgaatgcagctatgcagttgtacaaagaacaaagcaacagctactg

SEQ ID NO: 252428 - DNA, 305 bp, Gossypium hirsutum
gacaaatggtgggaaacccactggatttttctcttgactacattgatcaagctcctcggaaatcccgattctttgggtggctgcttttcatgtcaaggttccacgcccgaccacttagattatatgaaaagatgctgacatagaccgtcgaatgaaatccttttgatccacaagtccagccaaaaggagaacagattgtagctgatgaccagtcgagagtgaaggatgaaatctctattcttcgccgctcataggccaatagatagggtgctaaaccaatgctacttgactacagtcctgctatt

SEQ ID NO: 252429 - DNA, 184 bp, Gossypium hirsutum
gaaaaaaaaaaaaaaaacatgtggtaataaaatcatttgacaatggatcagtctgggtattccgttccctttttggtttatgttgggccatattgagccttttcttttttaaagctttctaatgcttttgttagagacgaaacttgttccttttataatagaaaatgttctgtttatttcagct

SEQ ID NO: 252430 - DNA, 356 bp, Gossypium hirsutum
atggagaattcaaccactctctcttccttccccttatggcccaggttatccacagccaccttcccaaccaagaccctatccacctggacctccattttcccctgtaatttctccacctgatcctgacctccctaatcctgcaccctaaatacagacaactgcaacaggtgccaccaccactgcaaaagacaacactaccctcataaccactgcttctactctccaaaaataagaatttcaacactacttccaagagacttttagataaaatggctttcatttttgaatgagaataaacatttccaaagcattgcattttgggagaaatatcttagaaattgtgaaacaatccccat

SEQ ID NO: 252431 - DNA, 384 bp, Gossypium hirsutum
  unsure (1)..(384): unsure at all n locations
gaaatcattcatatatttcccaattttcctccacctcctctccattcctcatccttaatgtgtataacacattnaaacaacattattcgcactttcactattttcttgtatgtaaaattcgagctgtccgtctgagttagagtcactaaattatttttccccagagctaaagaacttnnnaataagatccgtaaatttttcctgaaactagattcataaatattcttaccataaaaattttagaatttttggtttagtcaaatagtacaggttattctttaaagttttccttgtttcgctatctgacagttctgacctctcttcactaaaaattaattatctcattgtacagaattcagttgatgtttctgtttaattattttg

SEQ ID NO: 252432 - DNA, 344 bp, Gossypium hirsutum
ataagtctagttataatatcttaatggtaagaataacatgagtaagttctatatatgaaaatgattttgaaatctttggcttatatttgtgatgtataagtatgtggtgatatctacctttgtgcactcaagaatgttttgttgatttattatatgctatgtgttttaattatgcatggttgacattgttatttatttacatgcaacttactaagctttatgattactccctctcctttccattttcttatagtgccgccaagattgtatcggggatcaagggatgccggaggcatcgatcacactatcacctaaagctttggtatagctaggttaatatttta

SEQ ID NO: 252433 - DNA, 376 bp, Gossypium hirsutum
  unsure (1)..(376): unsure at all n locations
cggacgcgtgggttcttttataatatgctttctgctaatagaacatagttctgtagttttatgccattaaggtctgaattttatgccatttatagatcatgaaaactgagaactaatgaagtttatgcttttgttatatagcacataatgcccctttttttctaaggttaaagtggtaaaaatcatttggtgcatagtgtgtgttattttattgttatcattaaagaattctattgtaagttggatcagtatgtgctgttgagacatacatgaaatacctgtcatggtcgtatatgttgacaaaaaataccggtataatttttactctgattagctgtaantatttttgtgttatatgtccagtttttagatctgc

SEQ ID NO: 252434 - DNA, 241 bp, Gossypium hirsutum
ggcatcatcagaaacgccattgattttaaatgtatcgcaaaattccaaaaggttcgctaaatgagcgttgggatcttcatcctgcaaaccatcaaattgaacgaattgttgtatcatctgaatagtgttaggttttagttcaaaagtatttgttgctatagcaagtctagctatgctagattcatttcttgttaaataaggtttagcataatcatacatagtacgtggagcaagattttga

SEQ ID NO: 252435 - DNA, 374 bp, Gossypium hirsutum
atatctacataaagtatatacacctcaacaattattccttttattttttaaaattgttaaaaatattatttagaaaacgtatttagattaaaagcctttaaaattagtttttgcattcaatacttcaattattgtcaaattattaattattaattattaaaattcacatgatatttttccagataatatatatatatttttcaaacacaaaagtacatggatgagaatgaaatatgaaaaaaaaggttaaaagatgataaatgtggtgaaagtatttaccagtggagtgtaatcaagttgggctgaactcgaatagtgccaacttgaattggactccgagttcaaggttcaatattcggtttaagttcaactcg

SEQ ID NO: 252436 - DNA, 234 bp, Gossypium hirsutum
gcaaaatgtgggctaatatatgcatgaaaaatattcgcctaggcttgggtaacctagacatttcgtgcatttaattatacgagccttaggactaaattgtaaaaagtgtgaaaggttaggggcaaattggtcattttgaccgggggtgagtttatgccgaagatgaacaatgtgaggtattaatgatctatttttactaatatagaccccgaggaaccaattgcggaggttcat

SEQ ID NO: 252437 - DNA, 406 bp, Gossypium hirsutum
attgtatatgcttttgcaagtttgaaaaattcaaattaaccccttttgactaggtaggtctttctaaaaaccatttaaagctaactgggtcttagcatcctcctgtgtatggaagggacaggtggccactccaggttgggtgctcacagaacccttttcctgactgtcatggaagatggtagaaggaaaatggactgtctcatcaatactgctgtgtcctctgaagcaatctcagtttttattaaccacctcttctgtgtttctggtagctatttaatctgtatttaatctgtacttcttatgccagcctcgattttatttgatttttaaaattagtctcttctaaccaatgaagtgtttgtcagtatgccccaaagcttgctcttttgtgcccccttttgaataa

SEQ ID NO: 252438 - DNA, 284 bp, Gossypium hirsutum
gcggccacgcgttcgcggacgcgtgggcttccatctactagcaattgcttcaagggcttttatttgttttttatgatcaatgggtgaccactaccttcaaaacactgaaccaatgactcaccaaatggtgaaaggcgatactggcgcaacaggcggtgggtccctgctcattctctgcggattaatactagctggcaccagtattgggcttaccatagtcactgcactcttggttattttaagaccagctcttgctcctgctctcattgcagcaggtttcctag

SEQ ID NO: 252439 - DNA, 303 bp, Gossypium hirsutum
taaataaataaatctcaaatgcacgattttaaaatacgattttaatcaagatgacataattgtgttagattaattacatttcttaacttagaattattaaactcatgtttatattgttacgaataagttcacaacaactcgataatttgctaacttatgaacttactcacctaccaaaattcatttatcacttgactatatccctatgtcaatccaaccgattaaacaaatcttaataggcaaatatgttattgcacatacatacttattaaatataaataatctcttgtacatatccctatg

SEQ ID NO: 252440 - DNA, 99 bp, Gossypium hirsutum
atcttccctctcacctccagcctctcacgctctcctcagctctctcatctcctggaaccatggccagcacattcaccaccataggagccacacacgccg

SEQ ID NO: 252441 - DNA, 368 bp, Gossypium hirsutum
attccctgtcttctcctttaatccctaaattttcatccccaagctcccaacccatttgccaccgaagatgccgaccggaccacctggtgcatcgccctcgactaacccctctgctgcgtctccgtcgccgtcgctctctactaccacagctaatcgataaagggctcagatagtttggtttctattgttgcttctaggtctggaaaagggctcccaattctttcatactatctaacgttaacaacctaaaaggctattgcagcaatgatgcgtgctcaggaagccgatcctatcaatctggaaatacttcttgctcttggtgtgagtcatacaaatggctagtgaatgcttatccctttaatcaagat

SEQ ID NO: 252442 - DNA, 404 bp, Gossypium hirsutum
atgctgggttggggtccaaagtgtaaggaccccctgcccttagtggagagctggagcttggagacattaccccttcatcagaaggaattttcggatgttttcttgggaagctgctttggtccttggaagtagagctgggaagcttcctttgcctctaggtgagttgtcatgagggtaagttgaggttatcttgggataaagggccttctagggcacaaaactcactctaggtttatattatacgtagcttatattttttactaaggtgtcaccttataaacatctataaatcgacttctttttcttagttgcatggccaagcagtcccctttttaggagttggcttctgcaaactcaatccattgaactaactgttggggagcaatttggtagttgtagacatt

SEQ ID NO: 252443 - DNA, 372 bp, Gossypium hirsutum
attggtgtgttaaaagtagggtttctttgcctctctacagtacactaatctgcctaaaggtggttgtttcatatttataatgctaattgtcatacctacctactttaaattttaggtagaaaattatctgatttaaatacagacacatatttttctcacattgagtcatatgcataatgtagttccaaatgtatttcattactatagtcacaatatccaactaaaaattacgctatctagaattgtaccgaccaaaatctagtattggcagatcttgacaggctggacctgcaagatatggcttgaattttaaccatttattacataatctctagtgatcatgcatctagttatcataagaaataatttaaa

SEQ ID NO: 252444 - DNA, 393 bp, Gossypium hirsutum
atctctaaactttcacaggttcctggtatcatggaaaagccaattctaccacattttcttttgtacttttatatatatttatacttacaattttaaaaaattatatattttatagggaaattagtatgttctttgtcagagtggtgtcaggcatactcatgttctaaaaagtctaacagtgatcaacactgccttgattttacccgccctgcctcccccctcctgttttttttttttgctgtaatagaagacctttctaaaccttgccatcatataaatatgatctgatagcataaacccacaattaagagttttcaaaattttaaactgatcattaggcagttttaaagacacacatacagataaagcttgtttggtttggtttttcttttc

SEQ ID NO: 252445 - DNA, 276 bp, Gossypium hirsutum
atctccctctccaccactctcattttggctgccacgcccctcccctgcagggccggctgtactctgatcactatggcatgtaccacacaagcccctcgctgggcggcctgacccggcccgtggtcctgtggagtcagcaggatgtctgcaagtggctcaagaagcactgtccccacaactacctcgtctacgtggaggccttctcccagcatgccatcaccggccgggcactgctgcggctgaatgcggagaagctgcagcggatggggctggccc

SEQ ID NO: 252446 - DNA, 302 bp, Gossypium hirsutum
atctgagaccacgtgggcaattatctgggatgtgctggtgtcccttattatgtgctaaggcctgagaaccccacggcgtccatgtgaagaggtttttgcatatctttgtaaatttctgacacactctttttatatccagcgattctaacactgaggaattttttatagggacaacacctcccatgttaacgaaaggggttgatataatacttcgtgaaaaaaacaacttgtgataaccaaaatgtgcatcaataggagactggttgaaaagccataatgtgtctacgtgccatgcaagtgcg

SEQ ID NO: 252447 - DNA, 345 bp, Gossypium hirsutum
gcaaaatagaccacccctcccttttatcccttttgtttgggttttgacctcaaccttggagcgccaccgcaccaccatcggacttggtgccgaccacgcgcagaaaggacacgacgagaggccggaggtaagtattattctttctttttattctcttttgaaactggttttctttttttattttccgtttggtacatattttttcctttcccccttctccctttggagttcgaaatcgatgaaggagggaggagttccagcgacgtgattcggtaagtccctttcccctccctttttatttttcatatttatgtgaaaaaacaaaaattaaaaaattaacttaag

SEQ ID NO: 252448 - DNA, 252 bp, Gossypium hirsutum
atctgattctacaccactaatatgttgggatgcgggcgcgtccatgtgaaggtgcgttgacagctgatcactatggcatgcaccacacaatgcgcttgcacgtcggtcagaacccgcccttgagtctgtgtattcagaacgacgtgtgcaacgtggttaaagaagcactggtctcacaactaccttgtttacgatagagtcctttcttccaacatgcctttatcgaccggccactgttgctaaataaatgcg

SEQ ID NO: 252449 - DNA, 325 bp, Gossypium hirsutum
cggacgcgtgggttgcttttaccgcattcaaaacaaaatatgtatattgtgaagaagactatttgtctttacctcttttttttttcttttttcaatctaaattggactaaattggggggggggggggtaattatattcctattgtcagtgtcagagttaaatgttacacaataggtcttgttttctaaattcaattcgagtagatactaaacataagataagtccgtggagaatataaaggaaggatgaattaaatgagtggaacaaacagggagtattcttcgtctttctagccttcgacacaagaaaaggaattttacacacc

SEQ ID NO: 252450 - DNA, 364 bp, Gossypium hirsutum
atccttgaagttgctgtcccttaactggcacctcctctctactttcatggacttgtttctttgtaatagtgcaatttggttttgttttatttggggttcattgtatgtttgggaatcaccaaaggcttttagagttctttggcaaaataaaaatatttgactaatcaatttttattatcggaatagttttaacctttcaaatacatgttctgtcctggagcaggattgtagaaactaacagcgtctattttcatgtctgatatgttcttcgtttagtcatcatgttaaatctgtgtaccctaaatcagcatattactcataaatcattaattcatgtaagtataggaaatggtcttaaaagata

SEQ ID NO: 252451 - DNA, 270 bp, Gossypium hirsutum
ccataggaattgctgggaatactatttcgagaacctttttgcttcaagaggaggacggaatcatgacttattttcaaggtcacagggacttaatttcattaatttattccaaatattgacgagattacatcaataatgggttaatttcaccaacccaaaagaagcactaattctatttataacaaagtgacaatatatcaccacacgttggttattaaattaacctaacccgatagtattaatgtgggaatgagttacgcccaagtcacc

SEQ ID NO: 252452 - DNA, 345 bp, Gossypium hirsutum
atgggtgagataagcagagtatacttgaaccactcccagcattcctgcatgccctctttttcttcaggtccagctgtagttcctccggacgttctcgaagatgctcttcctcttcatcatcatcttcctcttcgtcttcctcatcctcatcatccagttcccgaagccgctcacgctccccatccccccgccggagaagtgacaggaggcggcggtgagcacgtgtttagggagcaccatgcacctggcatgcaagtgtctaagagttctgagtcttgaattggcttatgtttggggggctgacgacaccttctcttgtcaagtacagctcttatcgttcacatg

SEQ ID NO: 252453 - DNA, 353 bp, Gossypium hirsutum
ggccaactgcacatcaaagcatgggatcaaatcctgctgtaggaggatcaacccaggcaatgaacatgatgagtgggcctaagcttgagaggcaaaactctagtaatgacccaaatagattgcagggcacatcactttctcacttttctagtggttcagttccttggcaagcctctccgagtaaggagctgaatcctggccctttttcatcagcgacatatgtgaaacaggaatctgctgatcaaggtgctgaccagcacagatctcatttgcctgcaacccaaggagtctcgactacactagctgaacaagggaaagcagttacaactactgcaaaggatgagcctggagag

SEQ ID NO: 252454 - DNA, 417 bp, Gossypium hirsutum
ataattaatttccgaaatctttgtaacagttcacacccactccgagttacgatggcagacaaacagaaagcattaatacaagcccctcctaacacccttaatttgaatctgaacatgttaaaattggagaataaagagacatttttcatctctttgtctggtttgtcccttgtgcttatgggactcctaatggcatttcagtctgttgctgaagccattatattttaatataaatgtagaaaaaagagataaatcttagtaacgtgtattttttagtattagcttgattattgactcttctatttaaatctgcttctgtaaattatgctgaaagtttgccttgagaactctatttttttattagagttatattgaaacttttcatgggaaaagttaatgtgaatactgaggaatttt

SEQ ID NO: 252455 - DNA, 274 bp, Gossypium hirsutum
taattgtttataccgtttcatgaatccaaactttttttttttgaaggtattaggtaggaaggtaacttttttgtttcatgaaaagttcaaaaataaaaacaaaattaatatattgttttaattttttttgacaaatggatgttcatatatttttgtaaattatggtgattgaaactttataaatagatatataaactttttggtatccaagtgaaagttgaattatcttttcatttttctacacttttctcttggcctttttataattctctta

SEQ ID NO: 252456 - DNA, 384 bp, Gossypium hirsutum
cggcgaaaggcgcatctcttccgaagctattgctttttaagctgaactctgctatcagactttgatattcgtagatctaagatttccggggtaaggactgacttaggcttagtgaatatctttgcttttcaatagtacgatcttcggcatatgaagagatatttttttttaagtttcttttcttaatcatctgggaatgaagaggatgataagttgacttctttcttcccttccatttcatccttttcacttagaagcgatccactttatatataaataacacctgtgctaatgatttctttcatgcagtaaacatggtcaagtgagtgaacaagacatttatttttcaagccaacagggaagactaactgaaaggagtaatat

SEQ ID NO: 252457 - DNA, 239 bp, Gossypium hirsutum
aatttgaatactgaactatttggaactgtttgaattgtgttaaaaaatcgattatttttatttttttaatatttttattttatgatttttttaataatttatttgattaaatgagataaactagtcggacaatcaaattgaaaattgatgatctgtttaatttgaccaaaacttcactgatttatttgactgttatggtttactttcattcccactcgtgtagtgaataaaaatgtgat

SEQ ID NO: 252458 - DNA, 400 bp, Gossypium hirsutum
tacaaaccatcaacttgtgtattgcatggatatatatatatgtatattatatttttactactccttcaaagatatgttaatcataaattcttggtggaatttttttttatcggtagcatatcaaattatttaatatatatatacatttaacagtaagaataaatgtatctatactataagatactatatttaaagggtttgacgtcactcattaatcgaattccaactcaagtgaacaattacctaaaactcatctttttataaagtaagaaacattgctatgaaaaagtttggtaaaagtaccacaaaactcctatcctatatcttgaattgcattttagccgctctactgaagaaatggacaaattagcccttatacattagataagtgagccaaatg

SEQ ID NO: 252459 - DNA, 224 bp, Gossypium hirsutum
ccctaaaacaactcacaatagggaaagctgggacgcccgctggcactcggtccgagaaatcccaggacgatttacgcgtccgcacaagtagccactgggagagacagagagaaggatcgtcctgaccccgattatgacaggaattatcaaaggcacgtcagaagcaatccatgtaaccagagtggtggagaggctcctcacaatatgcaaaagaggcaacatcc

SEQ ID NO: 252460 - DNA, 345 bp, Gossypium hirsutum
atattttgaactgctgggatcccatgttgaaactgaaactcatgagttttcattttctcttcccctgcttcctatagctgactataaagaaagcttcaacactatcagtaacatcgaggagattgcatataacgccatttccttcacatgggacatcaacgatgaagcaaaggtgggtggtgaggtctgggcgccttatgtccagccatttgagaatgggaggagtttaatgatttgacaactgatttttttttttcccacagttttatgtgttttcattctcaggtgttatgaaactatcctctcccctttctattctcccctcctccaaaacagatcattttt

SEQ ID NO: 252461 - DNA, 370 bp, Gossypium hirsutum
attccacagttcctggtgtttttcctttttttggtataagtagctctcagacttttacccacatgagtttccattaaaattgtacaagctttgacttgaaatcagctgatgaatcgaaggagttggtgtgtgatcagctggtgccattgggaaaactgatgataagcagtggagcaggtaagaacgcattgttcctgagccattggaggaactagcagcaatgacctctgaggagccctgggaacaccctggagctcctgagcaacatgttgcttatgatcagtgacctggatatcatgactgtgtgagcaataacccccaacacctcagtagcaaaaacagagaacagtggcagcacatcgtgggctga

SEQ ID NO: 252462 - DNA, 389 bp, Gossypium hirsutum
gcggtgttttggtttcattgttggcgcttccttcactctccctctcaaacgatcgcctcttattttataatatgaaaatatatccttttgtttttctcttttgaattgagagagtcatcttctttcttcccgctctctacagatctttgggaaatatttatattttccgttcattactcgtcgaaacaactagttactgagtttttttatttgctacgatggcggcttctttacaaatttccggcgtaaaaaccgccccgtctcattcatttccaaagcagacttctttccactgtcgttcggcattttcgagccagcttcatttcgggtcattccggtctacggattcttgtaggaggctaaggcattgttgtaaaagtagagtgttt

SEQ ID NO: 252463 - DNA, 199 bp, Gossypium hirsutum
gattgtatgaatgaaaaacacccttggcagttaattaggcctcttcaaaccagtgtcgagattttgaaggtcgtatgctccccctttgagtttgaaattggatgccgcgacattgattgctatatgctcttattttgagtcgaagttggatgtgttggaaaaaatccatttcgaaaatggttttcttgcacagtgaaaa

SEQ ID NO: 252464 - DNA, 349 bp, Gossypium hirsutum
agacgaagtgagcagctgaaaccgcttttggctacagcaacagggtggtggacctcatggcccacatggcctgcaaggagtaagacccccagaccaccagccccagcgagagcacaagatgcttgagagagggcgtaactgctggagggatactgccataatctattgagaccaaactgtatcttctctaacaaaaccgaggtttactttagataggcgaggggacttacagagcccatcttgaaagtggcattcatcaaagtccctgtgctcagcccacaaaggatcgatcttcgtaccggactacaattcaaaggctacatttgtggtcctcgtcaccgacggaaac

SEQ ID NO: 252465 - DNA, 269 bp, Gossypium hirsutum
ggaggggcttatcctatatcgatcaaccatatccctctatatagatcgtggtatatccaacatcagcatttatagaacaaccggttacaatgtatgtttgactgtatcaaaatatacaatcacgatgttgggataatgatgatctcaagtctgaggatcatatacatattaatcattatgagtaatgttgtgacaattacataataatccaagaaacatactcataacgggttagtccaatatgttgttctctaacatacatattcatg

SEQ ID NO: 252466 - DNA, 271 bp, Gossypium hirsutum
atccagcctggacagcagagtaagactctgttttaaaataaaataagtaaaataaaatatttattgtgggcataaatggcagagttatttttcacatgattgtacaaatgccctcccgttttttaaatagggatggaattaaaaaaagtttagagaatgtctcacctggtgaaaaacaagctattcacaagacttgcgataaaggggtttgccttttttttttttcttttcagtataaaggcatatttttatgaatggtgctacgtaacta

SEQ ID NO: 252467 - DNA, 315 bp, Gossypium hirsutum
attttgattttgaatgagaataacaaggaaggtttgtttttataagatttctggattttggtgaaatagggctagagcttattctaggatcccctgtttcaactttagaaattcaccatacattttgaaaaaataattatgtggggtactttatatggctagaatccttatttaatctaggcgtaataaaaataaactgaatagttatatgattcttggacagaaagaaaagtggtttgatgtaagtagagggctaggcagccaattctgaaacaagggcaatttgactaataaaaagtactaactctgttaagt

SEQ ID NO: 252468 - DNA, 414 bp, Gossypium hirsutum
attgcatttttaaccaacagaacccacagtagaggggtctcatgtctccccagttccacagcagtgtcacagacgtgaaagccagaacctcagaggccacttgcttgctgacttagccaccccccaaagtcccctcctcagccagcctccttgtgagagtgggtttctcctgcacgaagcctgtccctgggggagtaattctgtcattcctaaaacaccttcagcaatgataatgagcagatgagagtttctggattaccttttcctattttcgatgaagttctgagatactgaaataagaaaagagcagtcagaattgtgctttttctccctcctctattcctttaggaaatcatattcaatacacagtacttcctcccagcattgctactgttcagctgcttctttcattct

SEQ ID NO: 252469 - DNA, 306 bp, Gossypium hirsutum
aaacaatggaaaacaacttgaatttttcgttcaaggtgtttctaatgtgctaaattcatgaaatttaatatttttcgtcaccaaatttcacccatagaaatttttttcgactttttcacttttttgaattttttttagaggttgtttaagtaaaattggtgaagcacaaggaaacaacttaaaacgcccaaatctgataccatatgataaggggtagtagaagaaaatcatgttcaagttgtttaactcgagaaagaaagatttggatctgacctgcaaagaagaaacccaacagatttacggctg

SEQ ID NO: 252470 - DNA, 384 bp, Gossypium hirsutum
atcgggtgggcggcatgtctgtggccggtggggagattcgtggagacacggcgggagaggacactgctgctcccggccggttcagcttcagcccggagcccacgcttgaggacattcgccgcctccatgccgagtttgctgcagaacgagactgggaacagttccatcagcctcggaacctcctcctggccttggtcggggaagtgggggagctcgcagaactctttcagtggaaaaccgatggggaacctggcccccaaggctggtcccccagggaacggttagcccttcaagaggagcttagtgacgtcctcatctacctggtggcattagcagcccgctgccgtgtggatctgccgctagcagtgctctccaaaatggaca

SEQ ID NO: 252471 - DNA, 311 bp, Gossypium hirsutum
ctcttggtctccttgattaggcattggagctgccctaggattgggcattagggacttcaatttttgatactatggacctctgccctaatttcaattttagcaacgcaatatttctctaacaagtcttttggcaggtacactatctcgtggaagcggctgctgccctttataggggaactgggggagctagcataacgctttcagtggaaaacagaaggggaacctggcccacaatgctggtcccccagggaacggttagaccttcaagaggagctcagagacgtcctcatctacctggtggcattagcagc

SEQ ID NO: 252472 - DNA, 350 bp, Gossypium hirsutum
aaagatttgatcaaaagtgactagaaaagaggcggtcgagaaggaatgagtggaaactatgttgattgagtgcaatttctaaattaggaaagattagacagaatcctaccaatctaaatcaatgtttccaacagtgaaaggctgcccctgtcggcgggttgcttaggtccatgtagtccaaatctccgcttaggaaagaagtccaagttgactttttgcgaaagggaaaatggctttctgttagagagtgatcgagagaaattttcagttgggagccagtcttttgcagctaggagacattgttgttatgttttccagttatgagccattgttgtgtggtccctttcgag

SEQ ID NO: 252473 - DNA, 277 bp, Gossypium hirsutum
ctgggggagtccttaattaggcattgaaaggggcctaggaatagccattcccgactatcatgcttgatgctataaagcctgtgggctcattttaaatttagcaacactctatacaactctacagcgcttaaatgagggcaaactatttggagcgaggtgcattgttacaggatatgcctttaattggctttacaacttctttggtatatttccatcatgttgacccaatgccgttgcattactgacaggaagtgactgtttttttctaaggcaaggc

SEQ ID NO: 252474 - DNA, 352 bp, Gossypium hirsutum
tcgggagcactactcgccctcatcttttgatttttctctatgtcatttatttcaggacaatctcgaatgaagtggtctagcgacccacacttgaaatacctgtctcatttactcagcattcgcccaagtgacgtcttccacattgcgaactctctggcctatttgtccgagcactaccaacacttgcaactgaagtagtttgggcttcagatgccatgttctgatgattcttattccttcgcgaaaatcccactgaagtgttccatcgggcattaattcttttagacctcttggtggaggactaatgcgtctttcccatctaggttctctttaaatctcgcgacttgatggc

SEQ ID NO: 252475 - DNA, 212 bp, Gossypium hirsutum
attcgttcacgcgggcgtgtaaaaacacactagtatgcaccgctggcactgattacacacttactattaaggactgtgtaccatggccgaacacctgaggactgacgagggcatatagattcttccctgagggcctacaaacgggcaccgatatataactcatgataaaactatgtgaacaaattatttcattactagctcctacttcattt

SEQ ID NO: 252476 - DNA, 302 bp, Gossypium hirsutum
ataatcggccaaggtaatgataagattggaggaggatactctggtggtggtagaggttgggttccacaaccacaacgtccagcgaagaggttatcgtggtggttaggctggacatggcagtcgtggagaaccttttccagtggagtttcgagttattaggtgatgatgagctttggagaaacgcaatgccttggtagagggaggggcttcggacgtcgatagtgatgctatggtcggcacacgagcgtggtaaggaaggcgtgggcaagagttgaggcggctagggttagggattttgggga

SEQ ID NO: 252477 - DNA, 238 bp, Gossypium hirsutum
gaagaggggggcaattcacgaaaaccaggctgcaatcacttacctaagacatcatgcgaggaccggcaatactaaaagtgacactctccttattctatataaggtaccggcgagtgaactgaaatcagagtttacacacctgaacatttaaccaaaccatatacagtagcacttattagatggtaccatcatgccttagagactatcagacagcccaagcaatgaatccatgcatatt

SEQ ID NO: 252478 - DNA, 349 bp, Gossypium hirsutum
accacactttcgttttcatctctccatatcggttgtgttccttggcgatcaacaacacaggagccgtgagctgtggaagaacaacaacacaaagtggtgacttcagtcggagccgataacgtttcctacaacaactacactaattgcccacatactttcaatacccaacaaactctttatttcatccctcacaatagcaagaggtatatgcatcgctacattgatgtggtacaagtcattgttggagtggctaccgctagagccgaaaccaatgctgagatattggatcacaacatgcgggatgtggtgcaaacagacagggatgataccatcgacatgtaagatgaat

SEQ ID NO: 252479 - DNA, 354 bp, Gossypium hirsutum
cccacgcgtccgtggacgcgtgggcatatatgttcatctccatatgtgaatcaatactccaaatcatcacaagttaccaaactcatcaagatgtcttatacatcaaggatagtgtaagcttcaagaaaattcggtttgacgtgattcgcaaggtgacgatctataaggaaaagagaaaacaaactaggtaagctaattagtttatcattaacaaccaaaaatcaattactatcgagttaaatttacagtttattcataaaatcctatttacatgctcctaatcaatcacttgtatttctacaagctcaagcacacataagcacacaaaattaaaattaattattaagaaaataa

SEQ ID NO: 252480 - DNA, 259 bp, Gossypium hirsutum
tcgcataaagatccgaaaactaaactttatgtgactaacatatacaatgagaacatcccttacagaaagtcccatctgatgtggacttgaatggaagggtactatgggttacttgtgagaaatgttaccgttggtacaatgggtagggtacataaatatttgttcactcgtgcaccttacttcatactgcatagagggctaccaagcactgtgcaaggtgtggctcgacagatgcatatgtctcatgtgctatacgcaa

SEQ ID NO: 252481 - DNA, 362 bp, Gossypium hirsutum
ataggcgtccaccatttccactcagcagtgctatatcctctgtagaggtagctgatgatgcgtctactagaattaaccagtcgtcccctcgtgcagctgtggaggcttcagagccatatggtaagaaagggagtgatgaagtgaacagaaaacttagcatgacagcatcaggcactcatgatgattctagcgatgatgacagtgaggaagagcgaccaatacagccttttagtagcactcgagaccaatacaacaaaagatcaagcttaagagtctctctcccatattttggttcaagaaatagtgattctgatgaagaccttcctaaaacaagtttaaaggctcattcaaacacgggtttt

SEQ ID NO: 252482 - DNA, 354 bp, Gossypium hirsutum
cggacgcgtgggaaaatatgaaaaaatctatgtacgtaaaaatatatgtaagtatgtaagtatttatatatgtgtataaagttatgaaataaaaaatatataaaggtaggtatatatgtaaaaattaaaaaaacgtatgtagatacatatatatatattatgtgcatgtatgtattggaaaatatataaaaatatatgtacacatgaattataaactatagaaaatatataagaaaaatatagattttaaatataaagaatatgtacaagtatgtgtatatatatttatgaaaataaaaaaaaaaggatacatgtaagtatgtctatatatatataaaattaaaaatgcgcata

SEQ ID NO: 252483 - DNA, 356 bp, Gossypium hirsutum
cccacgcgtccggtttttaatgacgtcatacaaatatatatatatataaagaaaacgttgcatatagaaaaaaaaggtcataatttaattattttcttagtctcaaactcaatgtaaaatgtttaactttgtggctttcctagtcatactgtatacataattataaagacagcatatatgctaatggagatgtaaaagcattaaagttgacaccattccctggcctctcatactctccttccacacaaatgtagggtagggaatcttaaacagaacaaatcatcactttgttagttaattaatatatgtctcaaaattttgcacaaccaaaaaagaagctctttctattagaaaac

SEQ ID NO: 252484 - DNA, 353 bp, Gossypium hirsutum
attaatggcaacttgggaccatttattaataatgtacggagtcgtcctcactgatatatagaaggattcacttacagtaatagtctagaattgatcttacacgagcaatgaaaatttaaggatactatttcatgttttatttgtgtcaaattttaagtaaattaaaagtaatggattatttttatgataaataaagttaatgagaggatgctcaatttgtaagtgatttatagctagtgaggagggaggatgctaatgatctgacctagagctggcaaaatgatgaagcttggaggtgctggagaagataatcaacccaacttcagcatcgctgaggatggctaactctttag

SEQ ID NO: 252485 - DNA, 352 bp, Gossypium hirsutum
gttcaatgtttgttaagttattgtgttgttgattgttatgaattctttagcttgttttttttagaaatgttctctcaattattacgaataattgtttaattaattaagaagaatatatagaaggataggtagaaatagaagaccttgtacaatggccaccatcaccatccttcctctgtgttgtattgtttgtaagtttccatcaactttcaattttaaaatcctaaatttctttttattatgagtttaatttttttatcaagaataattactagtacttattctattaatttaaggttcctgatatagattgaagtttgaagcttatctgctttgttgtttgtgatttaaa

SEQ ID NO: 252486 - DNA, 363 bp, Gossypium hirsutum
tttcaaatgaggggacaattttgtaaaatggttgaaagtataaggttttgccatgagagaaaataggttgttttctaaaattttatggaagaatataaatcttaaataaacaacttttgtgaagagatttctcatgaaaaccctaataggaccattttgtaaagtttgttaaatagatagtaatattgtgaaatattggaaatttggggttgtcataagagagataattggtaggttaggcttggatgataaggaaattcgataaaaatccattttcagatctaggggtaaaatggtcattttgccaaattatagatttattgaatgcctagatcaataaaatgattaaatgtgtgaattttt

SEQ ID NO: 252487 - DNA, 358 bp, Gossypium hirsutum
cccacgcgtccggttaacttacaagctcatttagcttaagataacatttccttagagcattaaaaaagagtttagaaaaggggtgtcaatgttaaaattgtgtttcctttcggtcatcagatttggagcgaggaacccatgggtggcacagtttgtcaaacaaaaaatatgttgatatcagatattataactataaatagctcttcagttacattgacttgattagaaggcagggcaaaatcaggggctagcgctttgaaatttttaaaattttaaatttgtaaaagtaaaattgtactctactccccttaaaatgataaaaaaattgatttaatcctttaaaaagtataaatattga

SEQ ID NO: 252488 - DNA, 373 bp, Gossypium hirsutum
attgctgttttagaaaacaaaaataaatttaaaatgcgtttttgagttaatcctagatatcacaccagagtactgtgatttttcagttacaatccatttgatatattctgtagtaaaattatatttcatgtacagttttcattttgtattgttccttatatcacaatttgcaagtattttggttgttcttgttgatatgtaaagaactaattaactattccttatttgttcatggtgcagacatactgaaagacttcaatatagttgaaacaatctttcccacatgtgcctgcttttatgaaaatattcattcagagtacttgacatttgaatatgtgctatgaaacttcttctttgatactttctaattctc

SEQ ID NO: 252489 - DNA, 196 bp, Gossypium hirsutum
tttttttgcctgtaaaactcaaaactatgaaaagcataaataaagtgcaaaagagtgaggaaaagtggataaactttatgtagcatttttagaacacatataattaaatggtcaaatatcttaaagaacattcaacttaaaatgctaaaaagggaaaaccaaaaaagaaaaaaagagcacacttaattgaacattc

SEQ ID NO: 252490 - DNA, 333 bp, Gossypium hirsutum
ataatattaaaggaaaataaaataaaaagtacttaaataagataaataaagataaaagtggaaataaaaataaaaataaaaagtctttaaacattgtcatcgtcggatggttcgcgaggtggtggtggcgatgagatgtgaaggtgctgacaaatctaatgaagagtagcatcaatgtgatcaaagcgctgaaaacactactactcaaatcgagtaaggcattcagagatgttagagtatgaagccaccgtatgaactggacgatggatgggtggtggttgagacggtgggtcctcatgacgtagagggacatcattagtaatgtcctctggg

SEQ ID NO: 252491 - DNA, 351 bp, Gossypium hirsutum
atcagggatccctagccctgtacaatgtaatttaaacttacagcatttttactgtgtataatatggtgtcctctgtgccagttttgtaccttatagaggcagattgcctccgatcgctgtggttcttattatcaaaattaagtttacttgtatacggaacaaccacaagaaatttgattctgtaaagaatcctctttagctgtggcctggcagtatataaatggtgctttatttaacagaatacctgtggaggaaataaagcacacttgatgtaaaaataattgttttatttttattgacatgactgattgctattctgtgcacttaattaaactgattgtgatgactttt

SEQ ID NO: 252492 - DNA, 344 bp, Gossypium hirsutum
cccacgcgtccgaaaacacaccaagcgtaaaaactatttgcgccccaaaatcctgaaaaccctcactaaacctttcccttcttccactcctatcaatcccataacccccatagaatcccaacctgaaactaaacctctcgacgtcgtcgttttcgagccgccttctgatgaaaccgataaagttgaagaatttcgggtttcagagacaccgggtgttcttaatggagaaaacagtggcggttttggtaaattttctccttattcagtaatgaaatttggattttattttgttgggatttttttgtttcagactttaattgctgtttgggtgatgggaaattggg

SEQ ID NO: 252493 - DNA, 323 bp, Gossypium hirsutum
ctttgcacgcttgttctaagtagtagttttgttagtaaggcatgtaatggtggaataaaataagggtggcctatgtaaagaggaagagccttttttgttgtgtgttttggagtccttttgttttaaggaataaaataagagggaaatctttacttttccttttaaaaaaaaaaaaaaaaaaaaaaaaaaaataaaaaaaaaaaaaaaaaaaaatgttattaataaaaaaaaaaaaaaaaaaaattaaaaaaaattaaatacttattcgggggggccaatttaaatgttaaatatgttacgaacgcggggggggccggctttaa

SEQ ID NO: 252494 - DNA, 357 bp, Gossypium hirsutum
ccgaaactcagtttggaaaaactcccaagttacttgctcccggggcacaacagaagtcagagtactccaccaatagtaggcagaatcacgtagcaaggagatagcacactttaggcattcatcgggtgtacaagatagctcatcgagtacccggatagtgttgtccaaccaaaattcagcttgctcggcatcgtcgctatccgtagctttaaattcagtagccccaggttttcagattctgtcaactgggggcttatttgaccttatttggtcagttaccggaggtattgtaggtgcgggggttgtgtttgtcgggaatggaggttgtggaacagccgtattagttcgaatgtattg

SEQ ID NO: 252495 - DNA, 354 bp, Gossypium hirsutum
cccacgcgtccggccttaaccaattcttaacctttttccgatcagtttcctactttcattcttcttcttcttcttcttcttcttcttcttcatattcttcatctttatcagaaaaatggagctttgcatggaagccaaagcgttgaaatcaagtgtaagaggagaattcacgaagaacagccataaccagaaccagcatgttgcttttgatgatttttttagctcaaacggtggcgtttccagtgaagaattttcagttgattgtttttttgattttactaatggagaatttgaagaagaaaatgaagagaaaaattctgcgcttattttctcgcaagaagaaagagtaacaga

SEQ ID NO: 252496 - DNA, 294 bp, Gossypium hirsutum
atggcggagcggagccggacaagttggctgcccgtgttgggagcactagaggccgttgctgtgccgcccctgctctttaaactcggattcccaatggaagcagccgcccctgacctttacactgaaccattttgtaagagaacccagccgacccggctgttgtggggcttttctttgtagaatgccagggcacaaatgaataatttcagaatgtgaaaacttgacagactctaataaatgattcatacactacttctccatgaatatgaaaaccattaataggatgatgagaaa

SEQ ID NO: 252497 - DNA, 303 bp, Gossypium hirsutum
aactagggaaaaaagggataaagggcaaagcgaagagcagcaaccataggaactaaagacagaagcaaagccaatttagaaggggcccagatatacccgtggaaaaggcatcaaaagggggcggccgccattaggggcccatgcttctttccccgtgcatgcagcaagatggccttttttcagggcgccccaaaacataattaccggcccgggctgtcccgcacaggaggcgggaaaaccccggcgttgccccaactgatgcgcttgggaggaaacccccttttgagcagccgtgctataaat

SEQ ID NO: 252498 - DNA, 327 bp, Gossypium hirsutum
cccacgcgtccggtttccacttcctccatagccattttctactgaccagtccaaaaagtcttaacccttcttcattggcttcccgagccataagctgctatcaatggctcaacgacgcccattgccacccttgatcatggacctgaccatcgcagttcgtccaccaggtcatcaacatcctagctcaagaaaagtagatttcatgttttgaagtagatggcaatatctctcctgagctctttcttcttatatcttttcttctattctcgaaattctttgatgattattcgagttttcttgaccttgcaagtccgtaagcaaggtaaa

SEQ ID NO: 252499 - DNA, 318 bp, Gossypium hirsutum
gtttcagacaagatcatcacagtttcaagtgcctccactggtttactggaaaggatactattcttacatgcatcaattatgtccgcttatgtatcatataagcaaaacgcatcactttggcatttgcacaccatagtgactctgagaaaatttaccttgtggccgaacctatgatgaacgctcacgttcttgcacattagaacaaatattatgtcacattatgacctgtagtttgatccactgacccatcaagtagcaccgtgtacttgtctcactcaacgacacgaggaaaagattatcatagcattgctttaccga

SEQ ID NO: 252500 - DNA, 355 bp, Gossypium hirsutum
ataaacatgaataagtttcatataatctcttaacacattaacttcttccatcaacaaccttttgtttctttatccatcaaaacttaaaggaaataatcaaattccttctttaatagccatagccgaatggtccatccatccatcaaagtttttttaaaaagaattagcatggtctaagtaagaaccatgataattaacctaaaacaagctaaaatttcacaactttaacacaatatactaaccttattaaacattcaaatggccgaaagttctttgcccctattccttccttcaattcggccaagaagacaagaatgaagccccttttttttttcatcacattttcattcttttc

SEQ ID NO: 252501 - DNA, 322 bp, Gossypium hirsutum
gagagccttcctgctctctctctccctcctccttcttctcatttgggtagggtaatatacccatcatcgccggaccaccgctcctccaccgtagacggtggtcggggagacgcaaattggtccccttagcctcgtttgaaacgcctttgaaggctaggctaccaaaactcaaagaatcgaaggagaacctcaacccccccttttgggtccgatgtcggcgatggaaaagtgttctccgacacgcgaccaagagatccaagtgagcccctcccctttcctttttaatccttaattttttatgcctaaaatagatatcttaaaa

SEQ ID NO: 252502 - DNA, 368 bp, Gossypium hirsutum
atgtcgcgacgagggcgctggtcgagaggcatttggcttgtagcaggtcccgcactccaacctttcgcggccagggtttgctctctgcttgtcctggactgaggtgcccatgacggagttatccaaggaggaagaaatctgttccgggtgagcccaggccgccccggatatgcgatggctgaagagcggacaccagggaccacactgaggttgggtttgagaccaagatactggattcttctagttaagataaagagctttgggtgcctgacagtgaaaatggtgtaatctgcgtaacagttcacagtttgaaggcatgacagttaaagaacacacatggacttgtggcacatggaaatgtgcacaca

SEQ ID NO: 252503 - DNA, 360 bp, Gossypium hirsutum
cgttttcctgcctcgtcacctgacaacgcgctgacgtggacgcgttttcggggtaatagggtcatttcggtaattaattttttaatgggcccattttagtaatttaaaaaaaaatagggcttttattggtattttgccctttttaaaaactataattcttttgcatttctatttttttttacaaaaaagaatttttattaacatttttgaaatacttttccatttttttaatctatacagtttaaaagtttgaagagatttcataatttttggaattatactcttatttatgttttttattcattttataaaatttaaattattttctaaatggtgtataagacaaatattatcatgtta

SEQ ID NO: 252504 - DNA, 366 bp, Gossypium hirsutum
  unsure (1)..(366): unsure at all n locations
atcgggtgcattgaacctttagaaaaggttagaaggcaaatttagtaacaaatctttgttagtaattttttaatttgagcaccatcattttaaaaagaggtagttctgggtaactttttgcccttgttttccaagagggtgtaaaccagtgtgtataaaaagaggtgtgaggggtgatttagagcacataatattgaagataccgtgtagctgtgatgtgctttttgttcattacttaaatactcatttatgggcggttgtcttattcttatataatcacatgtattttcctcattatttttctttctcgncagagcccacttttgccctcacacttctaaatagaagcatatacgagtttttttt

SEQ ID NO: 252505 - DNA, 368 bp, Gossypium hirsutum
atcgggtgcatcggacctttagaaaaagctaggaggcaaagtcagtgacagatctcttgtcggacttgcttcatctgagcaccatcatcttcaagagaaggtagtatctgtgtagacattatctggaccttggttttcccaagcaaggtgtaaaaccagtgtgtgtagaaagaggggtgaggggtgattcgagagcagataatcttgaagatcccgtgtagctgtaatgttctttttgttcattacttaaatacttatttatgggctgttctcttattcttatataatcacatgtattttcctcattatttttctttctcgtcagagcccacttttgccctcacacttgtaaatagaagcatatacga

SEQ ID NO: 252506 - DNA, 358 bp, Gossypium hirsutum
tccgatttagtcccgacttgtttctaatgtctttgtagggcctcgagggctcatataaggaagaatatgtattttattgatttgttttgctgttattaatggtaggaattaaatgttttaaaattgttgatagtgctccgtaaccttattctagtgacagatacgggttaggggtgttacagtaattttgtctggtaagttcgtatgaactgtaatcgctataattttattgaaattaaataattactatgttgtttttaatgtaaatgaatcaatatatatatgaatgtgtctatattatgatgaattgatagatatcaagtcccggttgaaccttaagaattcataggatgcaaat

SEQ ID NO: 252507 - DNA, 365 bp, Gossypium hirsutum
atctctgtgagtatttttaaataaacttattttggacagtatgagctttgggaagggaatttatatacatgactttaaaagattttccttattattttcagatttcaatgttaagaaatagtttttttttaaagctatattttcagtgatggctttaatgtcagtgagaaaccaaaccctatatctgttctcataagcaatctaaaccatagaaattagtgagacttaaatgcatcttttaattttattcttagaaatttgattttggtcttgaagtggcaggtgcaaaatacaaaaacaaagattagaaaaaagaaattaaagaaaagaaatttaattttgggctcttggcctttctagagtct

SEQ ID NO: 252508 - DNA, 254 bp, Gossypium hirsutum
tggagtttctgcatggattccgggttgacatcgtttttggtcccggacatccctctcgatggaaccgctgaattgccaaacttgtttgatcatgatgcgggatttgaggataacttcgacttgatattcgacgtagggccgcctaacaaagaagaggctaatcggaaatgcatgatggatgaagatgtgattggagtcggtgtttccatgaacgtggaagacgataataagaaggagagattgtcatcactgtc

SEQ ID NO: 252509 - DNA, 365 bp, Gossypium hirsutum
atgcttttttcttttaaaagctaaaaaaaaaaaaaaaaaatacttttaattcctttttgttatgttagataattgagatcacatagaaatgcatttaatctgttcacccactgtaaattttattttgaggacccagaattttcttgtctaatttatactttcacccatgttgcagttaacaccagagaaggaacgtgaatgttgagcacagccactacccttgttggcactaaatttagaaatagggtgagaaggtttaaaagcctgtaaacacccatcttgattttattttcattccttttggttctctgtgtaataatagtaggctacatagtgacattccagttccaagaaggtacatcctg

SEQ ID NO: 252510 - DNA, 227 bp, Gossypium hirsutum
gaagatgtcagttgtggatgctgctccacagaggagcagcatggtaacacaaggaatgatcaaaaaccaatgctgtagattacggattaaatacattgtgtgaaaacaaacgcgaagtgaacacgtacattgtggaagggattcaaaccaataacaaggcaactacacatacatgtgtataacacaaaaaggctattagtagtcatacatgggcgaagatcttattg

SEQ ID NO: 252511 - DNA, 354 bp, Gossypium hirsutum
cccacgcgtccgacaaaatcggagaccaaaagaccaggaaaatcccagaaaaaccaccatacgaattctccatctgccgccgtcaatggttcattacccacacccatcacacagacagtaaagtaatagagaagaaaacaaaacaaaacaaaacaaaaaaagggtgcatgcatttgcaaaccattgccatatttccttgttgcatggacaagtggacgatgaaaaatcaagtttggagaccctcagctgtgcccgcgttggtttctccgtcaaatggtagtgcttggaatcccaggtgccgaggccgagacaatatctctctttggttctatctcttaattactacagagaatt

SEQ ID NO: 252512 - DNA, 353 bp, Gossypium hirsutum
gagggattcaagtgcaattatggaggattctgttgaatgtaagaaatgcacacattgtgatgatgatgttgtgaagttggattcaagtgacattaaggaaaaattgtcttcaaataagaggaagagggattcaagtgcaattatggaggattctgttgaatgtaagaaatgcacacatagtgatgatgatgttgtgaagttggattcaagtgacattaaggaaaaattgtcttcaaataagaggaagagggattcaagtgcaattatggaggattctgttgaatgtaagaaatacacacatagtgatgatgatgttgtgaagttggattcaagtgacattaaggaaaactttt

SEQ ID NO: 252513 - DNA, 341 bp, Gossypium hirsutum
cccacgcgtccggccatgcgttctaaccaagccaaatcaaaagcttcctttatttgtgtttgagactccgcacatatatgaaacacccacattttcctacaaatattacattgctgtgactgtgaaacttacattaatatcagaaaaacttcctaaaacaccatgctttctttaataaacctatccacattttatttaactaacacaggatgcttactcagtcctacttggatctcaacaccagaattatgtgcattgtgcattatgaagagcctgcacagtggcttacgcagccaacctttatcttctaaaaaaccgctacatgttgactccattgacaa

SEQ ID NO: 252514 - DNA, 359 bp, Gossypium hirsutum
cccacgcgtccgcaaaactgttagacagcagaataggggaaggaaaaagataccaaatttccaatttggaaacaagataatagagatctaacatttcattacatataaaccaaacatttctttcaagaacttccaaatcaataggttaaagatttgagtttgttttaagataagaaacttacacataccaaaggaaaaggggtcaactttgctctgcagaaaatacccagaacaagaactaaacaagatctttcttttcgtgagatcaatgaaacatgaagaaaggagatttgggcttggtttttgaagtcaggtaacggctggcaggctgtgcaaatgttaccatccttctatactta

SEQ ID NO: 252515 - DNA, 373 bp, Gossypium hirsutum
atacagccctccccactaaatgaacactgttaacagctctgtttatgctcttcttggttttctttctgcctcttaagtgtatattatctgcataaggtacagaacaaaaatgccactctttggctgagtgcggtagcttatgcctataattgcagcactttgggaggtcaaggtaggaggattgcttgggcccaggagatcaaggctgcagtgagccatgatcatgccactacactccagtctgggtgacagagtaagactgtctcaaaaaaaaaaaaaaagctacttttaaaattgccagtgttaattagataatcagtacatgttcagacctttgaagtatacagaccacatgcagtttctcctggctaga

SEQ ID NO: 252516 - DNA, 373 bp, Gossypium hirsutum
atgggcaagagggcagggacggagcgcagggtggccagcgtagggtccagcacgtggggtggtaccccaggcccgggtcagacagggacaaggcaggggacacaaaacagaggggtccccagctgccacctcacccaccgcaattcatttagtagcaggcacaggggcagctctggcagggctttctcaggcctatgccggagcctcgagggctggagagcgggaagacaggcagtgctcggggagtagcagcaggacgtcaccaggagggcgaagcggccacgggaagggccccgggacattacgcagcaaggaggctgcaggggctcggcctgcgggcgccgttcccacgaggcactgcggcccagggtct

SEQ ID NO: 252517 - DNA, 352 bp, Gossypium hirsutum
cccacgcgtacggtgcctagcgctcatcaatgtgtttgacacccagtgccttataggtataactgaattataaatgtgcccagcacttatcgattcgtagtcgaagtaacttgtacatgatctatcctacggcatgccaactatatccgactctgcctaaaaagttaatagggtaaccttttattcaatcatcatattgttcaatatgcatttaaacaattcaattcatcattttatcacatagcatatcctatttcaaaccattttaaaatcaattccaatcaaattacactattttcagttatattcaatttaatcctttatcttaataatcagtcaaattcataacatt

SEQ ID NO: 252518 - DNA, 336 bp, Gossypium hirsutum
attttcacccgggcgcacagtccgctcagccagcccagtccgtccagtccttaccgcctgtcggcctgtccaccccccaccgcagtcatggacgcccttataagaagatcagatttttactttcaagggggaaagcctttttcgcgccgagcaggccgaagccgacaagaaacaagctgaggaccgctgcaagcagctggaggaggagcagcaggccctccagaagaagctgaaggggacagaggatgaggtggaaaagtattctgaatccgtgaaggaggcccaggagaaactggagcaggccgagaagaaggccactgatgctgaggcagatgt

SEQ ID NO: 252519 - DNA, 372 bp, Gossypium hirsutum
ataaggacattactaatgacattttgcaaagtaaaaacattcatttgaacatagtcccctagaaaaacaactctacaaaaattttgcagccttattcattataattttaataaaattaacacaaaatcagtcaagaagaaggaaacatgtatattagcgaagtgtttttggagactatttgaatgtgaccaaatgtggttctggttgacttcttttcactttggcttatatcagctcttgagagttaagtctgatcatgatattgcaaacaactgtaaatggtctctaggccttactttgtgattatacgttatctcctgctagaaaaagaataatgtagtaaagaactgacaaactgaaaaaaagaaacaa

SEQ ID NO: 252520 - DNA, 366 bp, Gossypium hirsutum
ataaaaaatgtttatttaaaacaatttttaaaattataaatgtatttttatagccatatgtagggtataaagattaatatgatgttctcaagctacttaatactttgattcgtgaaatggtaagtaaacagttttactgaaataaactctacagatagatgcaacatgaggagttattgaagcagaaaatgtgttttgctttgtacactgtgtgtgtgttagcagacagcctcaagtaggtttccataacagccactgcctttgaatctaccttctgtagcttaatatgtataggaaaatatatcctgattctgtagcaagtagattgtttgctctttgtcttttaagaaatactaagggagggct

SEQ ID NO: 252521 - DNA, 365 bp, Gossypium hirsutum
atcacaccccatgtggcctcagggacttcactctaggttcatcctgtttttcgagttgcctggctgatgtgaaaaagaaaacacggtttgaatcagtagaaagtgtcttgtcagactgactcatgccatctgtggtccgttctgccttgtcctgatgagtcattgccctgtccccaaaacatctggagctttgagagggccgggtggaaaccgcagtggcagtagggggttctgccgagggtgtggtctctttgcaattttgcagagaagctgaacaccgtgaacattcaacatgggcacctgagttctccaccaggctccttctctaagggcatggttgcagctcctgctgggtgggttttgat

SEQ ID NO: 252522 - DNA, 365 bp, Gossypium hirsutum
ataaaacacttaaaatagttggtttaaaagaacttttatttctggaatgggatgatttggatgtgacctgataaataagagtttattattgtggtctcattaaattaatcagctttttcacattggggtaaagaaacagatgacgatactagggaatggaaacaaaattggaaacttgggttatctggggatttatattgtactctgcacagttgcccttttttttaggagtgttccctggaaaagagggatggatgaacctggaagtaagtaaaagacattctaggtgtgtagcatcaaggcagttaatatccaagcatcagctttctctttatacatctacactgcatggcctgcaccaaata

SEQ ID NO: 252523 - DNA, 352 bp, Gossypium hirsutum
ggataaccccccccccccaaaaacgattttactcgaaaattctaaagacgaggaaatgcagagggcgaatgaatcggcgtctgcgtctgcgtctgcgtctgcggataaatttgaagaagaagtagggagggtgatggagcaagccagggagttgcacgaatctggagcttcgcttttatggaagatttcaaacgaggagcagtctcttcgccaaaaagccatttctcttgaatcctctattcgccgtgtgcgttcttcgatcaactcgcttgtatctaaaaagcttttggatcctaagttcgcaagcaagctcgaagaggatttacagagagccagctccatcttaacagat

SEQ ID NO: 252524 - DNA, 344 bp, Gossypium hirsutum
atgtcatccactgaacaaggtggttgggctggtggcaggagctgggctcaccgggctctaagggccagcaaccccgtcggtcctttgttcagggacataaggaccccggataatgggataccgttactagctgggacaagcttaatgcatgacagtagctgccacaggaaagacgccttctaagaagctatgttccaactggcaactcttgccttggctggcgtgacctgtaacgtgttgcagggctgtaaaccaagtgtcgcatctgcgctctgacaaacacaccatgccagatgactaagaggctccgtttcgaaaggtccgacactttgcattatatgcct

SEQ ID NO: 252525 - DNA, 399 bp, Gossypium hirsutum
  unsure (1)..(399): unsure at all n locations
agnnnnatcctggggtgaataataatcaagtcattcatcacaaagacaaatgacccgtgaccacgtttacaagtaagtaaatccataaacagatttaagatctaggtatgccacattatgaacgtcacaagtgaataaatacataaatagatttaggatctattcttcttgggtcctgtccgatgtactgtcagtttagtcagttacatctatgtctttattttctgggagtcattcattccgatgcccaaaacaaagcatcttcctaattggacttgataaatgacatattagtcattcaatcgattcgttcattttcnattagactgaagacatgtttaannntgtctacaagctgccttttcgtattacaattctatcacgtaatattgcttagta

SEQ ID NO: 252526 - DNA, 318 bp, Gossypium hirsutum
  unsure (1)..(318): unsure at all n locations
acacccaagaacaagagggaacgcaaaagcacgctggtgccccgccccagtttcccggattcgacccacgcttccgccttcttnnnnaaagcgcaagaggttagtcccgtggatagaagcccccgtcaagactgctagcctttcccgttcactaagcagaggctacctccaatacacatccagacatgatctccttcaaccgaagctaagaaatctggacacttaaatctaccttgcaaataagaatactcccactcgacgagatcgtaccacggccacacatttaagccggggctcattatttctatccggtcctaa

SEQ ID NO: 252527 - DNA, 394 bp, Gossypium hirsutum
  unsure (1)..(394): unsure at all n locations
nnnaatgtttacctcggancaagtctttattatattattagggacttaagaaaaagaatgaagtaatttcattagggtcttactttttaaagaagttaaactctcttttaatcaggtataatgataaacttcattgtttacctcttttgttacattgactctaattattactttttgatcattttaacttttaaccttaaatttttagttaatttacttttgttccggcaaaaaattaagtagtttggtaaaattttaatggtcatgacatgatcgcctattgaccattcgcgtgtacataaaaaatccaaacttaaaaaaaaattccatttgttttgnnaagattattcacttcaatagtaaaaatatatgtatattgttacgtgagctgtca

SEQ ID NO: 252528 - DNA, 362 bp, Gossypium hirsutum
  unsure (1)..(362): unsure at all n locations
atgagagatagcaccggcctgaggtnnnnnaggagctgaactatactctcctttgaagactgccggacgacccccgcgggagccggggcccagaaacccgcccgggcagcagtaactggaacggagcccgcaggcctgggccggctgggctgcgcgagctggaagcggggtccccgggcccctttgtgtgaagggcgggggagggttgcgggcagccccgggctgcgggctactctgacgtccgcctcgccgcggggtcctctcgtcgcggacccccccttttgcttcccgggggcacgcgcgccaccctagccgggcttcctccagactttgactcctgcccacgcccgctgattgttttt

SEQ ID NO: 252529 - DNA, 349 bp, Gossypium hirsutum
  unsure (1)..(349): unsure at all n locations
atgagatttgcctgatcctcttcaannnnntcgtgctgtgccggctccagccctgtaccgacatcccacttcccgctgttcccatctgtgttctgggtgggatcggtctggaagcggtcgacgacttcccaggcaggagctcggggcacatgccgagtccgcgggagaccacggcagccaggcgctggctggcaggggacaccgcggtgccagcctgaggctgggctgctccgcgaggatgcagcggcccctgccctgctctgccctgtcctgttctgccctgtgtcctgagagaacatgttaaccgtgcactttgacaagccgggaggaccggaaaacccctacgtga

SEQ ID NO: 252530 - DNA, 145 bp, Gossypium hirsutum
  unsure (1)..(145): unsure at all n locations
aagagaccccnnattnttagatggatnccataatgatgacgctgtcgatagtgtctggagcattggtctgaggaaaaaaggcaaaccaaagaaatgggggaaaatgtcaatgaatgggaaaatcatgaatattttctgcatggag

SEQ ID NO: 252531 - DNA, 293 bp, Gossypium hirsutum
  unsure (1)..(293): unsure at all n locations
attttatgnnnnatgaatgagattttttgntcaagcaaacaaaagagatcaaactttgtaaaacaacgatcatcccctcatttccttccccaatcatcttcaagtttttcattattcttatactctcacccaaacctcacaatctcaaataccatatcaaatcgatacccaactttactagacacaaactacatcaccacttcatcattgagcgctcaccgctaaacccacatcgaaagtttttttttttttacaaacatacccaaactttgttttgcatatttcttttcatg

SEQ ID NO: 252532 - DNA, 410 bp, Gossypium hirsutum
  unsure (1)..(410): unsure at all n locations
attccggagctgcgggctcactggtnnnttgggcgtgggacggcgcggcgcggctcggtgcatttccaggggccgcgctccagtgcgccgtagagaaccctgaactcggagcgctgaaagtcccagcagggcaagggggcgcggcgtcctggtcctcgcgcttgggagacagatgcgcctgggcgtcggggcatgcggacctaagctcgggtgaagctctcgggaagggcatgacggctgcgacaagatgcgagcagaagagcccagcgtcccgggagcccagcgcgcgccgggccccgagctgcgcctgtccagccagctgctgcccgagctctgtaccttcgtggtgcgcgtacttttctacgnnaggcctgtctacctagctggctacctgggggttaacataacct

SEQ ID NO: 252533 - DNA, 300 bp, Gossypium hirsutum
  unsure (1)..(300): unsure at all n locations
nnnncgttcgagtttggcgttattacagtgagctgtagcttacatagtctatagtgtgtagggatggttctgatgatctgaaactcttgcaccctattactgtaaggttgcatctagctgctgttgatcagttgatgtttctacaaaataatctgaggggctgcattgaagtgaaagctgcttatctttaccagtaacggacaaagtctaaactctcagaacctctttgtttctctaaagtagatcatttctgcttttagtccatattggagacgatggaggacatctttattgacaccc

SEQ ID NO: 252534 - DNA, 383 bp, Gossypium hirsutum
  unsure (1)..(383): unsure at all n locations
attgcacgggagcttgcgnnnttgttttatcccagggtgtcctctgtcccttacccaaccccaactcctcttcctctgccaaaagctattcgaattcaaagactttaacctgggctggatctggtttggagacataaaggggacagctctgggtcaacatgaccttctttagagccaccaaagctaaaaataccttttgggaccaggctggcctagacccaaggatgagaatgcaccctaaaataaatatacgggaagcagcagagggcttccctgtctagtgtgtgatcctaactaaaggcagctctcttgaacagccttcccctggattaggtcacatacacccggtgggccaaaaaaaaactgggttccaaatacacacc

SEQ ID NO: 252535 - DNA, 401 bp, Gossypium hirsutum
  unsure (1)..(401): unsure at all n locations
cattttnnnnnaaagagtttgggagtcctcgattatcgttactgagaggagatccaacgagagttctaactttatagcctgtaatcctgcataagcttttgctgcaaacggagatggaacgcttgagttcaaaacaatcttcgttgctaggagtgcccccatctggccccaaacaaccaagcccgatgccgatttgaaatttcttttgtcaaaagctgcgtcaatctgaatcatcgccctggtatttgcaccttgttggctgtggcttctgttcgtgtttaagatgaaccacaatctgcggcagaacattcggcactgtttaaaagtactcctcttaaaaatccaagnnattgtcgaaaaacatgagtgctatcttctttcccatttctgcagcgaggaca

SEQ ID NO: 252536 - DNA, 400 bp, Gossypium hirsutum
  unsure (1)..(400): unsure at all n locations
tctctgatnnnnntagatgtaatatttcttacccgagactgttgccagaatcgagcacgaggcattactaaacttaatctatcacttaaatagttttaaattgtttatttaagcttttcggaatgtgctgccactctgcgtcgtagtcgcctaaaaattcatatcttgagttccaaaactcaaaattaagatccgtaaatttttactgaaactagactcatatatctatctactaatttttttcatagattttttgacttggccaattagtacagtttattagttaaagtttcccttgtttcaaaactcgactgcactaacctcttcttgctacgaaccatgtttnnntctgtacaaaattcatatcactaagcccgttgtttctattaaaactagactc

SEQ ID NO: 252537 - DNA, 403 bp, Gossypium hirsutum
  unsure (1)..(403): unsure at all n locations
ntgggaatnnnnatggtgtgacaaatggaactgataaagcagcacttgtagaagtgcaagtaattgaacctcctgaaagtgataaaagtaaaaaggaaacatatgtattcacatctaaagtcattcaagtagaagcagatatagtagtagagacatttcccttgcggcctgttgctaagccaactgatagcgtcaatggaatgtctagcgaagttgggaaattagatgaaaatttgtataaaacggaaaatgggaagctgaatgtgagtcaagaaaatggtagttttaagttggatggtatgaattcctctgaggtttctgtgttgacagatgatggtaaagaagtannnaacaatgtgggtttgttgttggaaaagaattccaatttaacagattagaaaat

SEQ ID NO: 252538 - DNA, 218 bp, Gossypium hirsutum
  unsure (1)..(218): unsure at all n locations
ggttannattttatggacccgacactacaagggatgagcttcctaatatctgatgccatggctgaatcaagacataccaaagactggctgcacataacacaaatctgagagttgtagacctccaagagccgagtgactcaagaaactgctgaaaaaaactgaactgagagggagtgaaatgacaaagagagagagaagggggaggctaactgacattt

SEQ ID NO: 252539 - DNA, 267 bp, Gossypium hirsutum
  unsure (1)..(267): unsure at all n locations
atctctcgggtcctagggggnccgttctcgtctaaacacgcttatcgcgcgtccgggccttccacctcgcggaaggggctccccaccacttggatttctgttgcaggttgagaacaaaaagatgcacctggactttccccggagccctctgcgtggttgagcttcgggggaatttcggggctcttggctgccagccgcgcttgcctggtagcaacaaaaaccaatcccgctcgcctccgtgccacaaaaaaaccacacccaagatca

SEQ ID NO: 252540 - DNA, 296 bp, Gossypium hirsutum
  unsure (1)..(296): unsure at all n locations
aaaanaagaaaactataattncgaacacgatggaatcctgtctgctatctcttattgcacctcggctttcactttcaccgaccctcaagaatcgccttcgcaacaagatctcaagcgccttaagcttatggatgttgtctctctgctcaaatcaccaaagaagccattgcacgaacagcttttttcacctctaatagtccatagagtctgtcaatctcttcaagccacttcctccaccttccaaaacttacatcgtctctgccttgcctgatgatgaagaactcttcactttcaca

SEQ ID NO: 252541 - DNA, 397 bp, Gossypium hirsutum
tcggggaattttaaagtagtgagaagaatgcattcataagagtcgaacatgataaattcttcattattttatataatatatattatatctgagacattcaacatcaaatcaaatcaacacaagagtttatgttttatatatatttgaagcactttgggtgattagtaaaacccgagtggattgagttggaaacataagtaaaaagttaatgaagacatcaatcaaatcatggcattgctggtgttttttggtacacagattctgaggacaatttgacctatcaaatcatatctagaaaacctatattactttttttttcctaataatattaatgatttaagggtgttcttaaaaatataataagaatttttaaatctcattgtgaataaaaatgatc

SEQ ID NO: 252542 - DNA, 260 bp, Gossypium hirsutum
  unsure (1)..(260): unsure at all n locations
tgnnnncatttgggagggcgganatgccaatggcgtctatcagagagaggtttcctgtattggttggttttataatcaccgccatcactatcattcaaagtttattcgctctaaggttctgaaatgagttttgaaaaattataggtgaatgtatagtagaggttcctatattaatagtttgattgcattttaccccatctatttaataaacgagtcatttaatcattgtatgtttgatcaaaattaaacaaacttttaaa

SEQ ID NO: 252543 - DNA, 402 bp, Gossypium hirsutum
  unsure (1)..(402): unsure at all n locations
tacaaaannnnntgtntgaaggactcnaaggtgaaataaatgaaatgtatcgacttatatgggtactaggaagattcggcccttaaagagtgtgaccaaactttgtgtattttgtgttttgtggaataaagactaaattgtgaaagtgcgaaatattaggggtaaaaatgtaatttaccgatttatgcgttattagactaaattgaatgaaaatatgttaaaatgagatttatttgaatatgttaagatcaagaaaccaaggaattggatttagatcggggaaaatcgaaagtagttgagtagtcgatcatttagtcgacgacatccgaagaaagtttataagcannnagatattaaaatttcggaataaatgtttgttatatatgctgaaatggaaatatg

SEQ ID NO: 252544 - DNA, 331 bp, Gossypium hirsutum
  unsure (1)..(331): unsure at all n locations
ggnnnnacgnatgggatgacttaaggaacaaagtgaagttggaaggagagcagcgggatgatctcgtctctacttccagtcagaattctcatttggtttcgaaggctactcgcttatgggagtctatattatctcgtaaaagtcagcatgaagttcttgcttcaggacctatcgaagatttgatagctcatcgggagcataagtatcgcatatctgggtctgctttgctttcagctatggatcaaaggtcacaagttcctcctacagatgtcttatccgttcagtcgggtgatttaaatggccaagaacaaaatgaaggatttcacacaca

SEQ ID NO: 252545 - DNA, 346 bp, Gossypium hirsutum
  unsure (1)..(346): unsure at all n locations
atcataactcttgttcatcttcatgnnnnatganagaaaagagtaggttataaataaaattttacggggacaaggccaggactggaattgcacagaggcaatgagaatgaatgattggaaccgaaatactcttaagatcctgatcactgagatagctcttcataccagtatggtcgataagaccattagtttattatattttctagtactaagtggccttcactgcctacttgtccagtctcttatgattcttcctcatatccaaatagatgacctttctgaacatcatcctgctccttgataactctagcactcattgattgctttcacccttaacccttttcct

SEQ ID NO: 252546 - DNA, 321 bp, Gossypium hirsutum
  unsure (1)..(321): unsure at all n locations
tttttaggnnnttggcggggggtttgtgtgtcggatctgagggccggcgccgttgactgtgaaatggatgaggaagtttacgctggggctcctggatctctttcggtggaacaggcgagggctgacgaatgggcgctcggccagaagcaggaccttgttgttggggagaagatgcatgtggtcgatccgcaagctgatttactgtacggcttggccgcttgcataggaccacgggggatcggagaaagagctgagtcctttgtttcgggaggccgaggggacaggaggcttctgttttgatccagaatctaaactcttgtt

SEQ ID NO: 252547 - DNA, 406 bp, Gossypium hirsutum
  unsure (1)..(406): unsure at all n locations
tggacgcgnnnnattttggccagtctggtttctttttcaatttaaataagaaaagttcgaggacttttattgttcactggctgtagcctgtagcagacatacctctcgaggcatgagcgtcttgggaaaactctgcggtgaaagagagacagtaacatgacaaaaaagtcagttgtaatggaacccaaaactaagaacagttatgcaataaggaagacaaattatctgcaagaaaacaaagctacttcaatgaattttcttcttaaagcatgttggaatattgtcttagaaaatgggaaaaattggacattacccaatgacatggcgaccaccatcattatcagccttttttttttaacccatcaaaccaatgctacctcctccatagaccaaatcaatgttcctt

SEQ ID NO: 252548 - DNA, 260 bp, Gossypium hirsutum
  unsure (1)..(260): unsure at all n locations
atgctagccacgcctccgggggnaaggagttgtttggatgatccttacctattggcaaacggggcgcaaattatctggtaacttgataacgttccgttgccacatatttttttattaagaacacctctctaaatttgagtctactttaaaaacaaatactgcgacctcaattctagctgtggagctgctgcctaatcttgtaaagaagtcaccctccactaaaacgaagcctaatcgtgaaaatgcattatgtcttttaa

SEQ ID NO: 252549 - DNA, 334 bp, Gossypium hirsutum
  unsure (1)..(334): unsure at all n locations
tttgnnnnatttattggggcggggataataatcagaaccatcaaactggtttctgtcttatgtccatgttggagttacaaaaacccattatcgatactccttgtcagcccgtcaagaaagcggcggcttccacaatcatcgctgtctttctcattaccgttctgatggtttccgttggttggcttgatatttgcttcttttcaggtgtttcttcatatcaaaacatagtcgtgggttccaaatcaacaacggcaagacacaagcccgagttcccactcgaatgttccactgaaaaccatacacaaacatgtcggaaggactatcctaccaccac

SEQ ID NO: 252550 - DNA, 198 bp, Gossypium hirsutum
  unsure (1)..(198): unsure at all n locations
tcggnnnnnaatttctgaagcccggctaatcctccacaagtccctactatgtcacaagttaatccgaatcagttgaataagcctccagttgataaaattagaaaatatggggccaaagagttctgtgctaaaattggaacaatgggtacttatataccacttttagctaagaacacgcctatatactgttgataatgc

SEQ ID NO: 252551 - DNA, 407 bp, Gossypium hirsutum
  unsure (1)..(407): unsure at all n locations
tccacttcgnnnnntggtcgcgtagaggtcagatctgtcgagctgtgaaacaggggatactttaatgaataaactgtactaatgtgctaagtcaaaaattctaaaaattttatggtaagtaggaatatgagtccagtttcacggaaaatttacggatttaaattttgagtttcgtaactcaagttataattaaattagtgacagttgcgcaagtggacagtgttgttatgaacagtgaatttaattttaaaagcaaatttttatgctccgaatcggtaagttaaattggatgacatctcgtactcgattccggagacagtctcgggtaaagggtgttactagaatcttctnnnagattgagccctaacgtattgggtttcaactctttcgttgaatctgaataatca

SEQ ID NO: 252552 - DNA, 336 bp, Gossypium hirsutum
  unsure (1)..(336): unsure at all n locations
ggnnnncatntcgagaggttcngggatttaagaaaaatggggatttgatgttgagaacttatgacaatctaagattggtttcccgtgatccagagagccatgaaatcgattattttggaattcaaggaagacgtacttatgtttgtaattatacagagagcctaatgttacttgatcgagtaattgatggtgctatgactgagaattgtgcaaactatgcggataaagcttatcgttgaatgagcggctttatggatttactgaacttgctgccaataatgaagcaatcgatgattctagttatgtaagaagaatggtctaaccatgaactctttt

SEQ ID NO: 252553 - DNA, 265 bp, Gossypium hirsutum
  unsure (1)..(265): unsure at all n locations
gacccacgcgtcccaagattctcttttcatatatctattccaatacgttaactannnnatattacttggaggggaaaacatatctctctttttcaccctttctaaacactctatcctctggatcttcaacacgtttatcaataaatatcaatcacttcttcccttattctttctaatacccttttccttaattttatttattcctatacatacaataaaattcttcataacataaccccaatttcccctttctcaattctttttt

SEQ ID NO: 252554 - DNA, 283 bp, Gossypium hirsutum
  unsure (1)..(283): unsure at all n locations
gtctcnnnnttgtcattgatgctgtgctacggtttcttctcatgagttgaacagatggagatgatattatagagtacatagatcacaaatcacttgcgccttaagaatatcggttcaagttttcgagcccagtgactgatataataaaaagggccatgcgctctttaggattcaggctctcatacgcccacctgcctcacggtttgtcatctttatttattcgctgattattgtttactcgtcgtgggtgctcaacgattttgccatagaaaaccctggcgtt

SEQ ID NO: 252555 - DNA, 401 bp, Gossypium hirsutum
  unsure (1)..(401): unsure at all n locations
atgtttgtctgcagtctnnnaagagnagcaaagctgtngatcactgttttttgaaattaagtgccaatcccatgccatgcagtattatgcccctcttctatctctgtattacacactcccctctcccctgtatcaaaaccatccacctgtgggttcttcttgacagttctagaacagccttgcaaattaatacaagccccaagcccaatgcctaatagaccagacatgggcaaagacaagtttggatggaaaggtgttatcattgaaccctggttcagctcctaaaattcttcaagccaatgacacttttttgctgctgatgacccatgcctcttatgaaaacacttgcttattttggnnacaaaaaaagagtaagctggatgttttcacaagctcacaaa

SEQ ID NO: 252556 - DNA, 128 bp, Gossypium hirsutum
  unsure (1)..(128): unsure at all n locations
gtnnnnaagagcgaatcaatttaagcatcaaaatattccaggagtgaacagcattagatgatttgagtgaaaaaagatcatggggaaatgtgtataaagactatggtatcaattattgtagcttagag

SEQ ID NO: 252557 - DNA, 424 bp, Gossypium hirsutum
  unsure (1)..(424): unsure at all n locations
atgcaagaagagtgaatctccatcgnnnnataaatattaaaaagaaaaaaaaagtgaggcctggactaaggggaggtggagggcacaagaagggtggagaaaggaggaagcccaaagaccctcaagagaaagagccttcaggatgcccagctggggagaaaggggtctcaggtaagatctaggtatccggccctggtggtgggtgaatgatacgctggtgatacagcaagaggaaagaagggcagagggagggacactaagcctgctggagaccagagaacttccagatggaagggaccagaaggctggagcgggagagggtctcaaaatgcaccaacagaaacagcattttgcaaagagctgccttnnttttttgaacaaaaatagtgttgggggattaaataactaagctttaaaacaaatt

SEQ ID NO: 252558 - DNA, 405 bp, Gossypium hirsutum
  unsure (1)..(405): unsure at all n locations
ccgnnnnttggataacattctgaggcatcaactaatagtacaccaggatggcagataggtgtaagaccatggatgaaagacttcatggcatccgcaaggtaagttcatcagggtagtatacatagaacagagatagtctgtcaagacagtaaacatggaatagagatagtccaccgaaacaataaacacgaaatagagatagtctactgggacaataaacatggaataaagatagcccatcgagatagtaaatacaatacaagtccaccgtttaagaattttaataaagcaaactacttttaaaacaagttagaattgctccaagccaaaaagtatcgataccttttnnnaaaaatatcgatatttttaaaatattgatacccttcaaataaacgataccaactt

SEQ ID NO: 252559 - DNA, 344 bp, Gossypium hirsutum
  unsure (1)..(344): unsure at all n locations
atacttttcatagctgcctctttttccttgacaagaagatnttatttttgcttcattcatattattatgtaatgaactgaattaaggaaaatataagctggtttgtaaatgttaagagataattcattgaaaataccatttaaaaagtatttctgttgacctgaatatagtgctggaacacaaagagaaaataaagtaattatgggatcaggctgggaataagcctgaaaattctcttcacaagactgaaaaatcacttaaaaacttcaaatcaatttaagcatttaattttagaagtttttcacatcatcttatacttaaacatctatgcattgtattttctt

SEQ ID NO: 252560 - DNA, 332 bp, Gossypium hirsutum
  unsure (1)..(332): unsure at all n locations
ctccacttgttttnattttgtgtattccntgaaaagctctttgagatcgatcctgatgggtcagtctttgcatctgctgacatgattaggaagtaaatctacatgccaccccactcttattttttatggcaccccttaaaacaagtcttacctctactccattgtgagagttactattcccattatcaccctccctgcctgttttgttcctgttccacttccacctgcacatattatatttgccacatctgttgacatttttatttttatttttcaatggatactgattgttcccatttttattttaaccattatttcttctgcaccctctt

SEQ ID NO: 252561 - DNA, 387 bp, Gossypium hirsutum
  unsure (1)..(387): unsure at all n locations
tataaatatannnnttatttaaaggagagagggagaggcttctccggcctaagcgattttcggccatcagatcacggcccattcgtcaccggcgaccactgtgcgcggcggtcggatgtgcaaaacgaagccctttttgcccctttcgctctcctcactccagatctaagccccaagcacataaaaaaccccgagcaagtcgaagaaagccaaaggagccctccgattccgacttccccgactcgacgaaggtaagaccgatcatattcttcccctctttttatcctttggtttttaaaaatcgattcgagagcaaaaataaaataaagaaaaaaaaaaggaacagagagtgannntccacctttttgttttttttgattgcttaat

SEQ ID NO: 252562 - DNA, 335 bp, Gossypium hirsutum
  unsure (1)..(335): unsure at all n locations
atgcaagcttctgtctgcacctgctctggggnntggcggtccatgaacctccgcctgcagagctcctccgccagctatggaggtggttttgggggtggctcttgccagctgggaggaggccgcggtgtctctagctgttcaactcggcttgtctctgggggatcagctgcaggctccagtggcggcgccacccgcctctttgaccgaggggcctgctgtgagctcctaggtggcctcacgagtgcccttgcacgacccttccgtggggagaccgctcatatttttcccctctttttatcctttggcttgtaaaaatctcttcggcagcgagaatt

SEQ ID NO: 252563 - DNA, 415 bp, Gossypium hirsutum
  unsure (1)..(415): unsure at all n locations
atctgggtataaagataaggggncttntgttttaaagggcttaatttgccaaaaagaaaagtaaaaagctagagaccctttttgcagaacatttggtgcccacacatttgagggaagatgtggctttagatgaagcagaagcaaaccctgctcttagggtctcgtctagatgagtgcacagcctatgacactacagggagaggtcaggaaactgagatccagccttctgggtgacacgggcattgtttatcacaaaggttctgaagtttaagtagcaagtacataatgaaaagggctttaaaaattgctgagaaagcgagtcaccaaggctggcaagagtgtaacggggctgtcctgaggnnttaggagagtagatgctgggagggctggtgacctccatgggtttatctgttgg

SEQ ID NO: 252564 - DNA, 341 bp, Gossypium hirsutum
  unsure (1)..(341): unsure at all n locations
acagnnnnnagnagagcttttatgacgataagtatcctccctctccttcatttttgctttttactcatataataacgaaaatcaaagaaataaaagcaaaatgaaaggaaaaatgatatgaaattaccacttaaaaactgctctttattcacactctttagaactgatttatatgcgaaaatatacacgtatcttttttctttttcagattacactcggcctttttatagccaaaataaataaaaatacaatggccttagattttctgctatatatttgctgtcaattgcgggatatctgctatgtgctctttctgttgcaaacgtgtatgagcacggtac

SEQ ID NO: 252565 - DNA, 362 bp, Gossypium hirsutum
  unsure (1)..(362): unsure at all n locations
atgcgcgccccggccagtgaagggctcggggatggactgcggctcggtcggcggccagaggacccagcgcctgcccggccatcggcggcttctgttcttgcccgcgggcctcagcggaagaccgggaggcagcgaaacctcagcacgccgctgcctctctgcgctctgcgacggtctgggggcgctgcgccctcgcgccccggcgacccgcggctgcgtgtcacgtgcctcgccgctactcctcctcctgctagtgccctccccgcgcttgggcgncgcaagcccgcgccgggagctcgggggactgggagcgcttcgcgcctcgggattgccggaccccccggcgggcgcagcggcgcatg

SEQ ID NO: 252566 - DNA, 338 bp, Gossypium hirsutum
cggacgcgtgggcttgtatctttctacattacaataatagatatagatagtatggtagaaagattcatattttttttctaccatactatcgagttttataggatggtagaaagattcatattttttttctaccatactatcgagttttataggatactgctgattctagtccattcattttatttaagacgtgagatttgaatcctttttttcttaactccttgataaaaagtcaagtttcattcaaattaatcactttgactgacagtttttacgtatattataagtaaaaaagcggtaggaactagaatgaacagcgctgtagcaataaatgcgag

SEQ ID NO: 252567 - DNA, 261 bp, Gossypium hirsutum
tggatgtgggaacccccaactttttagctgatcagtcggaagaaccggtgacctggacttctgattctcacctctagtagaggcatgagacataccccttaaagagcaggggctgtgtcacctctgtgtaatagtgtctgaattgaattgatgaacatccaattattgtttggaaaatgattattgtcctagcaaaaacccacccctttcgttttagaagtgtttagagtagaaaccaaacctaagaatatgtgtaattta

SEQ ID NO: 252568 - DNA, 207 bp, Gossypium hirsutum
aaaagatatccttccttccttcctttatttattcttcttcttcttcttcccaatggcttctgcttgtgttaacaacctcaccgtcgtctcaacggagaccaatttgcattccacgccaccttactctccctacgtttcgtcgccggagattcaagacacggctgcaggtggtgattttgagttcagactcgaagaagatcccgtcac

SEQ ID NO: 252569 - DNA, 390 bp, Gossypium hirsutum
atcaaaataaagcacaaagtgcatagagaaaagaaatagggactgaagataaaaacagagcttcagtaagcagctgtggaacaatatataaagttgcttatcatacatacaattggacttttcagaagagggagatgagaaaaaatatttgaagaagaaaagctggacgttgttcagataggatagaaactataaactcacaaatcccaggaagtttaatgagccccaagcagaatgaatgtcactaaaacacataataatcaaattgccagaaacaagtaatgaaggacatagtcttaaaagcagccagggggcgaaaaatacaccttacatattgaaggaagataaatcaagtcttcttatctgaaatcagtcaggaaagaagaaaag

SEQ ID NO: 252570 - DNA, 382 bp, Gossypium hirsutum
tgattttcgagttgtgaaactcaagatatgatttttaaagcgactagtacgcagattggcagtgtctgagaaatatttttataaagggtttaaagtctgttaacacctcgtgttcgactccggtgtcggtctcgggttcggggtgttacaagtttcccatgatttgacaactcgatcttggtccacgtgcaaccctctatcttgtcgaatcagattttgggcgatttgggtgttcttagttgatttctaaactgatctctattttttaaactacaaacagcagttttacctagaaaagttttttgaaaaaaattcatttgattggataaacattgtccgattgatctgaaattttacatacatatttttggcactgtgattg

SEQ ID NO: 252571 - DNA, 213 bp, Gossypium hirsutum
cgacgcgtgggcttttttacgtgttgaaatgaaatgtgaactccaatcatctttttggactattatttaaccattaattaagccatggccttgttccccacacaaaaatcattattaatttggaaacaacatatggtgaagaaaactagaaacggtcgatagtattttggtcttcaagatacgtcactcaagccacaaacttttgaagtatgg

SEQ ID NO: 252572 - DNA, 192 bp, Gossypium hirsutum
acaccatagaacaagtttgtacaaaaaagggggctggtgctccgcgcccggttttccgggtgcgcggcacgagaccctccccgcctctattgaacacgggggggatatcttggagatagacattcccactctctctgggtgtctttacgctctcatatttgaaaaagcgttgccctttctccaacggggggg

SEQ ID NO: 252573 - DNA, 388 bp, Gossypium hirsutum
cccacgcgtgcgctttttcacactaacaagtcttagcctaacatcctctttctttgaagatctctggtggacttgtcgatcaaatcatttagcttaaaatctatttcattgactcacccattgtacccattgttagattattcgccaatcgttggtgaactaataatgaaggatatcccataccttaaatagggtaccccttctattacccttgccttgataataccacacatataccaaattcctttttccatcacaatgtggcgaattcccctattaacaggcttacccgcattcttgggcacatctactagctattctcctcttcatagttaggcagattctcttactatcccatttacccgcattcttagacacgtcgcattca

SEQ ID NO: 252574 - DNA, 401 bp, Gossypium hirsutum
atgccttcctgtcactgccccaccctgccccactgctgtctcagtaccaagaaaaagcccagcagcatctgggacttggagctgcacatgtctggtgaggaccttgccctcacccacagatgccatggggcagagatgctctttccacggcctcagagccactcccagccacagtctccagcatctctgtggacagggatcacagctcccagcttcttccagttcctgcagcaccagaccagcctctgcagctgcacttcagctccgcagacctgcactgtcccagcagacctcacttgccccatggccttcatggcgccttccaggcctcaaacccttctctgcgttccatcctggccacaggcttgttgcagtcagcaggtgtgggcttaggcgggtac

SEQ ID NO: 252575 - DNA, 397 bp, Gossypium hirsutum
ggacaatagtctgtgtaaggaaaaggttctacagattgagcttgaagcgccaatgccatccttaggggctccagagctactattgcaccgaattgttaggtacttggcagttgcatcttcaatgaaaaataaagatgggaagccaggttactcgtatgttcaaccaattatcttgaaactgctcatcacttggctagcagattgcccaaatgcagtgcaatgcttcttagattcacggccccacttaacgtatctgctggagttggtgtcaagtacatcatcaactgtgtgcgttagggggttggctgcagttctcttgggagaatgtgtgatttacaataaatctagtgaaaatggaaaggatggttttaccatagctgatgccataagccagaat

SEQ ID NO: 252576 - DNA, 397 bp, Gossypium hirsutum
atctcttcttctcagcactatgccttccttctttgggatagagaatgttccagacattctcgcttccctgaaagactgaggaaagtgtggggtatgggaaccacgaaactgccctggctccagtgaaacgtgggcacatgctcaggctactataggtccagcagcccttatgttaaaccctggcaggcaggtgtttattcaaattctgaattttggggattttcaaaagataatattttacatacactgtatgttatagaacttcatggctcagatctggggcagtaccgtataaatcaacaccttaatatgctgcaacaaaatgtagactattcagacaaaatgcatacctaaagactagctcataaggggtcaaatgttgctggcaaatgcgtat

SEQ ID NO: 252577 - DNA, 391 bp, Gossypium hirsutum
tattaacaacgtgaaaacatgatgatagtattataatagctgatatcatttacatatattataaattataacacccttaaatgtctcacttaacaagaagaagtatttcaacattaattttattataaaattttattatatttgttctttattttgatatttcagcgtattcaaattcacgtttccttatgctgataacaatgtcaatactaatcaaactaatacctaatcagcataatgaagaagttattaattttatacaatattttttaattaataactttttggtatttgtacctttaattaaaatcaggactataatttaatatcatgatagtcttataataatagtagctaatctcttgcaggttcaggtaattgattagataat

SEQ ID NO: 252578 - DNA, 383 bp, Gossypium hirsutum
cccacgcgtccgacgatttgtattttgaaaggggggattttggaaataaaaaaaccattgtataaaacacaaaagagcaatcgaaaagggagaaatcaaggtgttccttcattctgtttttttgttatttcctttgtaagttcatttctgaatatagtgcatacatatagatattaaaagaaaacacacacaaaaaaagagaaagcttacctttttgaggtcggggaagggaacctacccgcggtttcagccatcggagaccctttcaacggcatggatttggaccaatggacgcctcccgtctcctttgttcccgagccatgagccacgataggtggaggcgcatgggacgccgatgaaacccatgatcggccaagcagaga

SEQ ID NO: 252579 - DNA, 410 bp, Gossypium hirsutum
atcgaggctgcagccagcactgccaccggaggcacagtcggtgcccgagctggaggaggtggcacgggtgctggcggaaattccccggcccctcaaacgcaggggctccatggagcaggcccctgccgtggccctgccccctacccacaagaaacagtaccagcagatcatcagccgcctcttccatcgccatggggggccagggcccggggggccggagccagagctgtccaccatcactgagggatctgaggccagggcagggcctcctgctcctgccccaccagctcccattccacccccggccccgtcccagagcagcccaccagagcagctacagagcatggagatgcgctctgtgctgcggaaggctggctccccgcgcaaggcccgccgcgcgcgccttaacc

SEQ ID NO: 252580 - DNA, 352 bp, Gossypium hirsutum
cacccttccaaaggggaataaaaactcctgcttctgatcaaatggtttttaattaattgagagaggggaaattcgataaagaaaaatggttctctgataaaaatttacgcctgtttcttcagcaaatatcgggaaggaataccccctttttttcccccctggtaactaattgttattgtgaagctttcttttagagaatactagttaactcgacccgcctaccccccaagaggagaagatgacaactcctcccctgaaaagaaagatttggtagtttttttagaagcttcccgatgctccttcccgaaatagaggtgcgacctcagataacaacattatgctttgggatgct

SEQ ID NO: 252581 - DNA, 412 bp, Gossypium hirsutum
atgtccttctcacttcagagagacactcactcgtgttcttttcaaatattttgaggttccatctgtcttgcttgctccaagtcatctgatggctcttctgacgcttggaattaattctgccatggtcctagattgtggatatagggaaagcctggtgttacccatatatgaaggaatcccagttctaaattgttggggagcactacccctaggaggaaaagctcttcacaaagagttggaaactcaactattggaacaatgtactgttgacacaagtgctgctaaagaacagagccttccctcagtgatgggttcagttccagaaggtgtcttagaggacatttaaagtgcgtacttgctttgtaagtgatctgaagcgaggactaaaaatccaagcagcaaaatttaatat

SEQ ID NO: 252582 - DNA, 397 bp, Gossypium hirsutum
atgagttttccctttttccactctgagtttcttttgtatggcctttacagtcatttgaaggtcatacctttaggcttggtgacttttgagtaattaaccctagatagcttcatgaatggtttatttggtggctcttagaacctatagtcatatctaaagagaattaaaaaccttaataaagtggtagtaccagcctgtagtacacagaaggctctgttctggcctttagcctcctaaaaagtcatagccaaacatttgctaatacttaatcctctgttatagcacacattcctgatcctagtttatgaggttttcagggtaaaaaaaaaaaaaaaatttaattctatcatgttttgctctgtcagtagaaataaaaccagataatcaaataatttgt

SEQ ID NO: 252583 - DNA, 391 bp, Gossypium hirsutum
aaatttcttcacgaaattttcacacaatcatgcaatcatatcatagacctcaaaataatcataaaataattatttctatctcggattttgtggtaacgaaaccgctattccaactaggcccaaaatcaggatattacagtatgagaaagattacactcaaaatttagagtaggggtttaggctactactaaattcccaattaacacattgaatcgtgtccacaagcaactattctaaacactctccgatacactttcgtcaaaatgtcgaaagctcaaactagcctttctttagcttgtagaaggtcctaataaattcgaagcttcaacataataattcacacaataacacaatcaacaattagctaatgattcatcttaaacaataaaaa

SEQ ID NO: 252584 - DNA, 391 bp, Gossypium hirsutum
attttcacacaggcatgcatatatatcaaggatgatcgcgaggtttcgtgataggttttaaatatttataattacttgttcttgaactaactattatcgcgatgtaggcaagtgtacctatcgaacattagtatagtttttgcaaaaccggattatcgaacccaaaggaactaaaagtactagtaatgactgtctttttattatctagcctaagaataaagaatttttgttttaattaactaattatctaaactaagaaatcaaagagaaaagaattggggaattgctttttgggaaaaatcgattgacttaagacaatacctaaggacaaatccacctagactttacttgttattgtggctccgaatcggacgatgtattcattcaactt

SEQ ID NO: 252585 - DNA, 398 bp, Gossypium hirsutum
atcacgacaaaagaagcgcagaagttttctttatttacttgaacagccattatatcagcacattatgtatagctcctgtcaagaagtctgattgtgtctggaattgatgggttcttggtcttgctgacttcaagaatgaagccacggatactcgcgtcctgataacaacagcgtgacagcacatatacgactggtattcaagggtcccagatcaatggaagaaaacacaggaaaaggaattgaaagtatcttccattagatgctgaagaaccattcaggatccttgactacagatctgaattctctgaggcttatggaaatcagtaaggtcaatgctgcagaaattatcaacaaccgacaaaaaacccaaaaaactatactgtcagctttggcatgaa

SEQ ID NO: 252586 - DNA, 406 bp, Gossypium hirsutum
atcggtatctgaccaaccaaaaaaactccaatagcaaaaatgatcgaaggaaccggaagtttaaggaagctgagcggctcttcagtaaatcctcagttacctcagcagctgcagtaagtgcattggcaggagttcaagaccagctcattgaaaagagggagccaggaagtgggacggaaagtgacacttctccagacttccacaatcaggaaaacgagcccagccaggaggaccctgaggatctggatggatctgtgcagggagtgaaacctcagaaggctgcttcctctacttcctcagggagtcaccacagcagccataaaaagcgaaagaataaaaaccggcacaggattgatctgaagttaaacaaaaaaccacgagctgactattagaagacacgttagtg

SEQ ID NO: 252587 - DNA, 343 bp, Gossypium hirsutum
tcgcttatatttgggggaattggaaattcatacccatctttcaaatatataattacaacgaatatgaactaattgatgcattttgattctcaaagttaatataacaaatgacatttaagttcaaattgtcaagctcatgttttccaaacatacaataaattttaacattattgatttgaaaaaaaataggtgaggactaaaaaaatgcaggagaaaaaacaattttgtgatattccttattgcacgttaagcttttagactctttggttctttttacggagttaattatatgcgcaatatgattcacatcaggttggataagcggattgctatgtgggagaag

SEQ ID NO: 252588 - DNA, 197 bp, Gossypium hirsutum
attttaaaaataaattgtttaagctgtttaagtaatgaattaagtctgttaacacctcgttttcgactccggcgatggtctcgggtacggggagttacagtaattctttcccatttccattccaaaatcgtaactggctgtaataatcccaaggcacctaatgctcagcttttacttgcagacatatcaaacattta

SEQ ID NO: 252589 - DNA, 240 bp, Gossypium hirsutum
cccacgcgtccggtatgttttgggcctggtaggctcgtattagggactttatgattgaatgcaaaaaattttaatttggacgcaaattgatgactcagaattttatgaaagtttgtgtgataagtccggtaatgcttcgtaccatgttttggaagtgatttgggactaaaccacctttctttgcttgtaaaacaaaaaaaaggaagtgaaaaaaataaagatgcaatacaaaataaatgg

SEQ ID NO: 252590 - DNA, 377 bp, Gossypium hirsutum
atgcggcgcacaagtcaggtttggcacatgtttccgaggagaggacccctcattgacggatgatatcacctcttcttctctggtgagagtctgaggatagagacctttttctcaccatgaatgtcaccccagaggtcaagagtcgtgggatgaagtttgctgaggagcagttgttaaagcatggatggactcaaggcaaaggcctcggccggaaggagaatggtatcacccaagctctcagggtgacactgaagcaagacactcatggggtgggacacgaccctgccaaggagttcacaaaccactggtggaatgagctcttcaacaagactgcggccaacttggtagtggaaactgggcaagatggagtacagata

SEQ ID NO: 252591 - DNA, 240 bp, Gossypium hirsutum
ccctatattttggggaaatttgggggcatacccacctttcttatgtacaattacaacgaatatgaaataatttacatatgccgctaaccaacgtcattacaatctgacgacagctcgctttaaaacccccgatcctgctattgcaacttctcggaaagatttacaggaattaccaccagtgcttttttcttatgttctccaatacatgaaaaaacaacaatattcagacttatcttataa

SEQ ID NO: 252592 - DNA, 373 bp, Gossypium hirsutum
ccctatatataggaaatctttagttgggtttgtggtctggatttaaaggaatccatgtatcatgttggatatatgagtagtaaaactctaatctaaccactaagtattattatgaacttcaattaagtttaattcgaaacatacaaaaacataaaatttacctttctttttgaaccaagctttgtatttttggaaatctttttgatagtgtcctttcttacaaaagtgacacttatctgccatttgttcctttttatcgccattagaaacattgacaggcaagttttttcttcttcttaaacttgttggttgttgctttaagtcctttgccagctccttgatccacaaggttgatggaattacttctttgact

SEQ ID NO: 252593 - DNA, 375 bp, Gossypium hirsutum
ggacacatagaaatcggttaatctatgaaagaaaatgtatgatgggtatggatatttcgaaacaaatctatagctatatttctgagttgaatggcttagaggagaaaaaactcaccttaaaaatagacagaggccacaaactgaaaggagaacgagggtgacaatttattttgatgcagcctttgacaagcgatcttccaaatctattttgggactggtaatacgagatgtggggggcgagatcttggcatcaaagacggttattcacaccgaagtaccatatctgtttgcggtgaaggcacatgcaggattataagccattcggttaggaatttcaatgggttttagcattctggaaatagtgcgggattcaag

SEQ ID NO: 252594 - DNA, 362 bp, Gossypium hirsutum
agcgaagaaaactctcgtatgcaatcctgcaatggacactgacacaactcaattgaagctcgcccttttagccgtatctttgcttttcttgccttttcttcaagccactgatttcaaatattgcgataatggaggtaattatgttgtgaaagtcaatggaatcgatatatcacctaatccagtggttagtggcaagccagccaccttttccatctcagcttctactggtcaagcaatctctggaggcaaagcagtgattgatgtttcctactttgggtttcatatccatcaagaaacgcatccactttgtgaggaaacatcctgtcctattgcagttggcaactttgtactctctcacaatc

SEQ ID NO: 252595 - DNA, 368 bp, Gossypium hirsutum
ggggagccgttggttccaacaacagttatttagggaggaagctattggagaaaatagtcgttgagggaaaacgcttctagctgcgggaagcgttttcattatttcaacccaatctcgtcatttttcaaaaaaaatggcctaatttagtaaatatcttaaaaaactgacatttttttgtaattcagtctaagttaaaattattttttgtttaccttactttcaaaagttacataatagtcaacaacactattagagttgtgagttttaaaaataaattatgatttttcaaaaaaaagaattttttgatatttttagaaattttgtttcgaatcatcattaaagaaattgtaaaagcaccaagctaaaaa

SEQ ID NO: 252596 - DNA, 373 bp, Gossypium hirsutum
  unsure (1)..(373): unsure at all n locations
acgattaaatttaatctcaataaaaaggtaaattaagtaagaggatttcaacaataatgggttaatgggttaatgataagggttaataaataaaaaaaggttggtaggctcaaaggggtttcgctaagggtttaattatgtcggaaggctttttatggagtaaatgggttaaatcctaagtgcctttatcatcttagtatatcaaatcttacgtgtgatctcgacatgtataatcgaagcaagttctagaataacaattcaatgttgacacactcaaaccataaaagaagtgagcaagaaagaaagctatatgctcaaaaggctcaaaaatctcaccaaaaatttgggttnttgatgtcatttctgtatactt

SEQ ID NO: 252597 - DNA, 359 bp, Gossypium hirsutum
tctaagcctactcaaaatattgatttgtatttgttttttgaaagcatattagaggatttagcatgtgaaaaaattatttgacttgataatcacaatagagcatacactgaattacctattgctcaatcatatcgcaatttaaataagaatcactcttgaagctaaggtttttaatttagaagatggatggagcaaacaactacctcattagctactcaacgtgttactacagtggagtgcccctaattttcttctctttattacacactcttacttggactcacctttctagtcaacaacacgatggagcaaacaaagtggtgctgacttacttggcaattctaagcattggagtttct

SEQ ID NO: 252598 - DNA, 366 bp, Gossypium hirsutum
cccacgcgtccgcccacgcgtgcgcgcacgcgtccggtcaaagcgtcagattcagagttatccacattgtggcttagccactagttcagagcagagtgcttcattcttcacaatatgccaaccgatacatatgcgatatacaaatattcatatttacagagtgcagttcattatcaaaaatagctatcacagtacatatacgggtatgctatacatatgtcaatcatagagcatcagagagccatcatacaatcgaattcagatcattcatactttgagcaagacagaatcaatgttggccacacatggcctcagagaaaagagattcaaacccgatttatttgccacacggcctggacacatgcc

SEQ ID NO: 252599 - DNA, 373 bp, Gossypium hirsutum
  unsure (1)..(373): unsure at all n locations
attgccgcccagttactacagctgacgaatctagaacatgatgtctatgaaagacttaccaacctgcaggaagggattatcccaaagaaaaaagcagcaaccgatgatgatctccaccgaataaatgaactgatacagggaaatatgcagaggtgtaaactcgtgatggatcaaatcagtgaagccagagactccatgcttaaggttttagatcataaagaccgcgtcctgaagcttctgaacaagaacgggactgtcaaaaaagtgtccaaattgaagcgaaaggaaaaagtctagacccagaagaatcaggagtttggaagcaaattgatgaagaatgatggtgggggtgggggggagggtttggnttttc

SEQ ID NO: 252600 - DNA, 388 bp, Gossypium hirsutum
atatcgaaagcgccgctgacaccacagctccgacctccctcagcgtggccgggaccctgagcagctgcgcagagccatgcgccccgatgtacttaggtggcacagccctgagacctctggccagcgccaggcgggcgtcggggccggcagaggcctggatctgagtctttgggctctgcctctccctggggacaggagggagcctgggggtgtgggtggggagccggccgaccctgacccagcgcctggctctgcccccaggagtggacagtgcgatgaaggaggaagtgcagaggctgcagtccagggtggacctgctggaggagaagctgcaactggtgctggccccgctgcacaagctggcctcgcaggcactggagcacgggct

SEQ ID NO: 252601 - DNA, 367 bp, Gossypium hirsutum
gttctgttttggccctaaatcgggttgttacaagggtttatgtttaaaaatttacccatgagtgacatgctggtattttgaggtttattggtagattatgcatgtttatgattagaggaacaacttttactgagtcgatgaaacgtccaaaaggaccgtttttgcaaaagttattaaattggtcataaaatggtgatttagtggaaattgggggctgctatagttatgaaaatgattcggctaggcttaaaatgcaaggaaattgaataaaaatcatttgacgagcctagaggccaaagtgtaaataagtgaaagtttaagggtcaaaatgcaaatttgtaaaagtatgatttatggacccacttga

SEQ ID NO: 252602 - DNA, 355 bp, Gossypium hirsutum
agaaaattgaacccatcttataaacaaaattctgatcatcaaaggattttattgtattgcatccgttacctaatataagaagagcttagcagtttggtactttggtctacgcgaaatattttcaaatctccatttaaagttgcacatactatgtagaaatacaatagaaagtggttaatctaaaaatcatcttctccaatctatacttctacacggctacagccgtttcctctgaagttgaaactaaactaacagcctctaaaatttgataaaagctgaattgaaagaacaaaataatcgataaagtgacataaatttcgcaccataaaaaacgaaattgagattcctagaatct

SEQ ID NO: 252603 - DNA, 363 bp, Gossypium hirsutum
aaaatatagagatatcatcatggttgttaaccaaacacgccatgggaggtctgaaagctgctggtttttaatactttgatatatgtgagttcaattcttgccctttactttgagatttttatgtttttgtgacttttacaattagttccaagtgtttaattcattagtttttattttatggacaaaattaaaagctatcattgataagtgttggcagtttatgatgaaataaaatgaattttaagctttgattttgttgtttgatgattttatcaagtaaattcaatagaaattgattttaggacctaattgtgaaaaagttgtgaattaaggttcagtgttaaaattataattctcaaaggt

SEQ ID NO: 252604 - DNA, 374 bp, Gossypium hirsutum
aagcgcgctgcagcctcaggtaccgaatcccaattcccacctacacctacgcttactttctccctaccaccgtgtcttgacaaatgtttaacttgctcttaactaaacctacctagatctaattaacgctcttcacaactcttaaatcacatttataacctacaaaatcgatgaaaacaaaaataactttcttcatattattattgaatcatgcctatctgaaacactctcaatcatatcattataataagagaatgatagcgaacccaacatcaatataaccctctgatacattaactcattttgccaacttctttataagatggttactcaaatcaaatatcaaggtctaagacatgcaacgattctacaaa

SEQ ID NO: 252605 - DNA, 383 bp, Gossypium hirsutum
atgcagaaaccactccccacttggccactactcagcagcgctgactcattaaggaaacacaaaaaccgagagcaaccagacacaacagaaaaggggaaccctgacctgaggaggctcaaacggaggggaatagggcagatctcactgacgtagcaattaaatggaagagactttatcagaaatagtagggaaagcccgggcactgacccagacgaaaaagcatgcttctccatggtgaccaaattagtaatgtggaacatcaagcagaagatagattgcagaacaaagaggtaaaaaagccaagaaatagaaataagggtgggaaagagatttgaaaacacattaaggagagccttaatggatgaatgatttccatgaataat

SEQ ID NO: 252606 - DNA, 366 bp, Gossypium hirsutum
attggcctaatcgaagtaaagtggtacccagtacctcatcgaatctatccgaagtacaatagtgacacccagtgtctcattgactcgagatcgaagaatccctgaactcttccaatcctatggcatgccaactatatctgactcagcccgactagttaatagggtattcgatccactttctcaattcaatatcactttcaattcatttacgaaacaattcaattatcttccacctttcaaccaacattcaattcacaattcaattcaaattcactttttcactttctaatcaatatacaattcaataccaatacatatttcagataagcacatataatcatactttgattcaattcaatccacttt

SEQ ID NO: 252607 - DNA, 382 bp, Gossypium hirsutum
atagaagcccgtggcctggagtcgaaggcccatttggggtttgctctgctgttgccaggtgccagtctgttttcagtgaggctttggacagcagtagggcagaaggcacctgccctttaactgtcagtgaccatgctagacactgttgataccgcctccccctacttccgtctccatcctcttgacgtcgacaccaaaccatttctcctctgtggtgctttaaaaactgtagcaaattttttgtatggtgcaagaatgcatggcctgggtctattggcaaccacagcagtttaaaactcactcagttgacaagcttctttctatcaaaatatctctctaaggcagacattgggactcattccttgaatgcagccctgccttc

SEQ ID NO: 252608 - DNA, 354 bp, Gossypium hirsutum
atcaggaagttataacatttagataaatgagtagaagtggacttccttcaacatattgttaccttgtctatccttaggaagaaaacaagagccacctgaaaatataggctcttttcgagaatctgctgaaatactattacagcaatttgaagttaatatggtaggaaaggaaggtggcttttcttgcaaaagtctttctaaacattcacactgtcctaagagatgagcttgcttgttttattccagtatattccacaaggtggcacttttagagaaaaacaaatccgatgaagactaaagaggtacttctaaaagagatttcattctaactctatttttctgtgcatatttaac

SEQ ID NO: 252609 - DNA, 372 bp, Gossypium hirsutum
tgagccttggaatccgcatggggagaatcatggtattcaaaagaactacaatttggatccctccctatgtgcatgggactcaagtgaccttgaatgaggaaaacctttcctacatgtttgatgaaacaacccctgttaaagattttgaaaaactgccttattatgttacacataacgataatataaccaaggaactggaacagaaaagggagacttcttcacacgttaaaaggcgaagaatgcttcagtttgacactcatgtatgtagattcttccctcatctgcaatgagatgccatctgcactcctaaaaccaagggttcttgctctcttttttttcttctttccatgcttaggagagggatgattcgat

SEQ ID NO: 252610 - DNA, 382 bp, Gossypium hirsutum
aaaaagaaaacaaaaacacaaactcacacccagacccaatcccaattatccggattcctattttacactcttactcccacgatacgcgcgggtttctacagtttcaaacccacccccacaacatcacctgctttatacacccatcaactcattctacataaatcacccccacaattccattaactatttaattctatcaatccataactacatcaaacatatttccaaattcacttattgcatttcaaacaccacatctacatttctgaaaactataaaaccctaataataaacatccctaattacatatcccactacaagcattacatagactactacaaatactaatagtccaacacctcatccaacaattgtatgctaa

SEQ ID NO: 252611 - DNA, 366 bp, Gossypium hirsutum
ctgtaatataaactcataaagtattatcgggattaccagtccaggctgaatcccctgcaacgacaattactctaatgagcttggatctaaattatcagtctaggctaaattcagaccctaattcggattacccgtctgggataaatccattttacacgtattcttcgggagggctatatcaggataggatcactcgttcgagctagattctttttaccgtcaattccttttcattcaaccgggatttcttcccttttttatcaaatatatcaatgtttcatcaattttcatacaatgaatatttaaatcatattcacatcaataacatacatttcaagtatttaaaaatataatttaagttatacg

SEQ ID NO: 252612 - DNA, 283 bp, Gossypium hirsutum
gtggaattgtaggggaatgcgatggtatgtacacatgtggtaaaaaagactttaatctctctgtttcctgaggaaacttctgtgatgacagtgaaaatttctccatcttgacaactcttaaaatagtatgttaaaagattggaatatatgggtaaaaaaaagttaaatctaaaaaaaaaaaaaaaaaaaaaaaaaaaaaaaaaaaaaacgacgaaaaaaaaaaaaaaaaaaaaaggggcctcacaaaaaacgcccagcgaagcagacggctacaaaggaaaaa

SEQ ID NO: 252613 - DNA, 325 bp, Gossypium hirsutum
gcgacggacggcggccgatgatcggtcggtgaccgaccccctggccgaattcccttcccctctcccttttctctcccatttttttttctttctccccttccaaatgaatttttttaaaaaatttttaactttttataggggaccaaaacgcaccgttttggtcccccctacatttaacctgaaactgcactgttttggcctcgggttgagtcgacaccgacccactccagttagatccgcgtgtttttaaaaacagaacggctatctgcgcatttagcccttccggtttttcatgcatttacaatcagatattatttgttttcaa

SEQ ID NO: 252614 - DNA, 368 bp, Gossypium hirsutum
cccacgcgtccggaaatgtgaaatgaaagttgtaatgaatgtgaaatgaaattaacattgaaatgaatatgaaataaaattaaaatataaattgaaatgaaaaaaatggaaacagaaaaaaatgaatatgaaaaaaaataaatttaaataaatttaaatgaaaaaaataaatttaaatgaaatgtaatgaaatgaaatatgaaatgaatataaaataaaatgaaattaaaatataaattgaaatgaaaaaaaacggaaaaaggtgacaatacattgcatgataggcttgtgttaggccattcaaaacgggcaatcaattggtcggcaccagcaggcagactttgaatggctagcactagtaggttatg

SEQ ID NO: 252615 - DNA, 399 bp, Gossypium hirsutum
gccccataatccccgatgcgacccacgcgtacacgtacgcatgatatttttagaggatgccgaatcaatatacttatccttcttccaacactggaacgcaattttaaacagtatatcgtcgtgaaatgctacataatttctatcttcttattgcttgttgatgtataaccagatatcatgcattaaaaaattactcaaattcatgaaagtattgacttgggcctaaaaacggaaaatcaactaacccctgaatgcaacaagttcatttataataattcataaacgaaattatcatatatacgcaagtcaattagatgctatatattaaaattgactatttttcctagttgcacaacaggttttgttacttgctggaaaccctgattattttttatctat

SEQ ID NO: 252616 - DNA, 303 bp, Gossypium hirsutum
ttgaaatagattttttttaaatgggggcattttagtcatttagtaataaaaagaattaaaaagggggaaatcaagtcaaaattggtgtccatcttattcaccttggccaaatttctcaaggagaccatagctagggtttcttcaactttcaaggttgatcgtaagtacatcgtagccccttttttttgctttttacatttttgaagaacgactaacccgatttacctatttataccattattgcgaattaagggacatgtttaaaaaaatacccatgtgtgacaaccttgcatgagacatgct

SEQ ID NO: 252617 - DNA, 327 bp, Gossypium hirsutum
acgctaaagcaccttcgtgccccgccccaatatccccgatccgatccacgcttccgatgcaatgtaacctgaatctataggtggatgaactgataagggatttaacaataatgtactgatgtggtcatgataagggcttataaataaaaaaaggttggtacgctcaaaagggtttcgcttagggtttaattatttctgaatgcttattataagatcaatatgctaaatcctaacgacctttttgatttttatatatcaaatgttacctgtgttctcgacatgtataatcgaatcaaggtgtagaatcacaattgaatgctgacacac

SEQ ID NO: 252618 - DNA, 385 bp, Gossypium hirsutum
atctcccacccccccaagtaggtggggctagaagcgtgcaccatcacacctggctatttctgtatgttttgtatagacagggtcactatgttacctgagctggtctcagactcctgggctcaagcaatccttccactttggcctgtatgcctacactcaagtgtaaagacatataaaccatgtctatactaaccagccaaatacctgaacactaaaaagaataattttcttgatgtggtaatggtatcatggttgtatagaatgttcctcttcttgggagatacgtgctgaaaatctggtttgacatctaaacctatttttgttttggcaaagaggacatgtgtctgtacaaaagaaatggagccagcgtggcaaaatgtttaca

SEQ ID NO: 252619 - DNA, 383 bp, Gossypium hirsutum
gaacgctggtgcgccttcaggccccgccccaaaattcccggtgcaacccacgcactagctaaaaagctattaggcgtacagagggttacaaaatgattacgtgaatgacacaaactaaacatttcaaacataagtgactaaaatccacctataaggagcactggtgaccatcagtgctgcttacccttacaataaggatatttgataggaccaaatatacaaaattcacacatcaattaaacgcacagagtggaatatatgaccaagatatttaaaaagtgtatgcattaagggtgcaaatttaaaataccaggaatacagtatttaatatacaagagaaaatgtataacctgaacatacagaatgatgtctgatttattaga

SEQ ID NO: 252620 - DNA, 285 bp, Gossypium hirsutum
gcgcgcacgcgttcggatacttttctgcattcgctaagcatcactggccttgtgttcaagcctgatgcacacgttacaagtcggtggaagatgtgaagcctctgtctcactgaggattttaaaggtcaattatacttttgttgttcattagcatctttgtaaactataagacatagttttaattaataaatattgcccccagattgtatttattttgaaaaaacaaaaggaaagcggccaagaaagaaaaaaaaaaaaaaaaaacgggggcggcccccctggaag

SEQ ID NO: 252621 - DNA, 357 bp, Gossypium hirsutum
cggacgcatgggattaaattgaaagggagatttcaactttaacaataattttaaaaaattaaattatttataatgtcgaaacctttttttgcttttttttttaaatcaacttatattttgaaaataaagatggaatcttcaccaattttttttatgaggtctgaccgaatcacctcataatttgattgttttactaaaaagcttgatttgctaaaacaatgatttttgttctacaaaaattcaaaaaatgggggcgggagtcgatttcacacgaggaagaattagcaccctcgttacgcccaaaattggtacctaattgattactcgacgtcttagtaccgaaaattaaaattttga

SEQ ID NO: 252622 - DNA, 322 bp, Gossypium hirsutum
gaaaagttcttctttcttcagcattttctgagttcttttcggataatgggccagttgatatgatggatgaagatgccatatcgaacctttctgtacgagtcaaattaagtttgacagtttgggactttattattccaacaactccctcactacctgctgtctttggtatatctgatactgtaattgaggatcgctttggtgtcggacatgggagcagtgagtggtatgatgcactggagcaccatttcaagtggctttttcagtacagaatcagcccatacttttgtagatggggtgatagcatgcgtgttttaacttacac

SEQ ID NO: 252623 - DNA, 307 bp, Gossypium hirsutum
atgtgagccaagccatttacctgctgaccagccgggacgagagttaccagttcaagacgggtgctgaggtcctcaaggtgagctccccccaggcctgactctcgggcctatagagtcccacgtcctggatccagaatcacacctgggttccaatcccagggcctccacttggagctgtgcaacctctaagcacttacctgcctactctgtgtctccattttctacctgtggggtcaggggcaagctgcagtaaccgttcgccatgataattcaggtcatggagcccccagtaagcactcggcacata

SEQ ID NO: 252624 - DNA, 346 bp, Gossypium hirsutum
atcccagcccatccctgtgtcagccctgagtgctggacgctgtgttccacaaatgaggaagaggagagagagaagagatggacagacctcagatccattaaagcgttctcacttccctgagacttggttctgggtccttaaaaccaggtttcctcggctggggccctgtacacagttggtgtttaatgagtgtgtatggagaggagagttctaaggtcacctctggctgcaggcatccaggggttattccagcaatatgcaggtagggcgtgcatcccagcctgggagcctgctgtcaggagcaggcagacctagactccagcctggctgtgatacgtgctcgctc

SEQ ID NO: 252625 - DNA, 281 bp, Gossypium hirsutum
cggacgcgtgggggaactttgtgtcttcctattgagaatggcctcacccagaatctgtgaaattgcatccatccaaatataaaattttcattctgcaaatacttaaatttgaactctttttttttaaccttttaattctgttcccattaaattattaaaatgaatattatcttaaaaagcatcttaattttaataattttagaatgttaaaaaatatcaaatgaacaattgttttttatttaaaaaggaattttatatacaatatgcaattttatgggttt

SEQ ID NO: 252626 - DNA, 376 bp, Gossypium hirsutum
atggggagttttgtgcggtgggtgagccaagaaaatactaattaataatagtaagtgttggttaagttgttgcttggaagtgaaaagttgcttagaaaggttagaactttaagtgcaaagaaaagaaaaaaacccaaaacaattgttttcctttgctgcaaggtggggaagactgaaaaagtgtaaccgaaaacagatgacacagagtcacccgttttcctagaacccacagggaggggtgtatgatgccatctcacaagcagggcaagtgtctttaccagcttcctcccggtgaccaaggcagcctgttttagagggttgttttgtttggggtgtgggtgttatcaagtgaattaatcactagaaagatgagtgt

SEQ ID NO: 252627 - DNA, 334 bp, Gossypium hirsutum
attaatttgaaacaaaatagaaaaatatggaaaattttgaaaaattttggaaacagaggtcacattgctatgtggccaagccgtgtgatagagcctagtccatgtggctcagaaacatggccatatggccaaaccgcgtacaattagaaataagggtcacatggtcgtgtcaaatctcgtgtgcccacctgtgtacaattcgaaataaggtacgtggtcatgtcccagaccgtataacaacctatgatcgtgtgtgataaacctgcagcaaaattaaatagtccacttggccttgtagtgtgaccatgtgtggcacatagccatgtgacagatc

SEQ ID NO: 252628 - DNA, 266 bp, Gossypium hirsutum
ttgaaagtaagatcagaatctaaattctgaaaatgccaaaatacatgttacggaggaagtacagactactaaactattcaagagaaagttcaaacagactgatagagaacctaagttcaaaaagaacaaaagggctcatgctataattatggtaagccaagatattttaaaaatgaatgtcgatttttaaagaagaaatcatcttctaaggctaataataatgaaaaagtttgtacaatgatatctgaaattaatatgcacaagat

SEQ ID NO: 252629 - DNA, 377 bp, Gossypium hirsutum
ctttagaattgcaacgaaaactcagttttatcaaatacaacatttttcttaaatgcaaacgattttctttaaatatcacaattttaaaagcttctgctacagaatatgtttctaaacgaatcaaattaatgagaaaatagttttgaaattgatgaaaaataaataaaagctaataaatggaaacgattttaaattgataaattcgatttcaaattctattccatatgacatcgccagatttggccataatgtctaggccaggtttggggtgttacatgaaccatgtaggaattaactgagtcgaatatgtgcttagaaactagaacacttctagccttcgacttgtacactaccaaatcaaaactaacccgggtttg

SEQ ID NO: 252630 - DNA, 349 bp, Gossypium hirsutum
cccacgcgtccgtttttgatgaaactgttattctacctaacttatctcttaaaggctcttccaataaagaaaatcaaaagtagatggaacatcagattaatccagaatctacaacagagtcgacttctcaagccagtacaaaaattcagaaaagagttatttcttcaccacaatactctatcgccaaaaacagaactagaagagaaattaaacctccaaagaagtataccgaggctgatctagttgcttatgctttaaatttggctgaagatatatgtaacaccccaaacctggtctaaacgttatgaccgaatctggcgatgtcacatttgaacacccctaacccgta

SEQ ID NO: 252631 - DNA, 312 bp, Gossypium hirsutum
gattaattgaaatggctttgtaataatactcctattatctcattaattcatgctatggattcccctattagatttgactctaatccagtagatttatgtagtcttatttgtaggattgcatgcaattccattcaattacactaaatctaatatgaaacagggtctactcaaccattgatttaagcatatcgaacatggattaataatctagaaatatcaaaccaagaattaagcacacataattgagaacaagaaactaagaatttattgcgtaaaataaaaatcaaatgacagaatccatgtatttagaaa

SEQ ID NO: 252632 - DNA, 319 bp, Gossypium hirsutum
gatgctatggatagagatgacaaccaagcaagcaaaaagctccgtctaaggtctacatctcggtcaaggtcactatcacgacctcctggtgaagttataccgggagagggcttgaaggattctgctcagaagataaaggctattaaattggccaagaaatctgtgttaaagaggaacaaaaatgctcgccgtggggaggctgatagagttattcccacattgaaaccaaagcatctgttctctgggaaacgttccattggaaaaactcaaaggcgataagaattggtgttggggagagaagattttgtttgggtttttg

SEQ ID NO: 252633 - DNA, 365 bp, Gossypium hirsutum
  unsure (1)..(365): unsure at all n locations
atgcagcaaatactgtaaacgtgcagttttttttttggggggttatgtatacaaaagtttaactactttttggtgttcatgaaaaccatttagttgaccaggtgcctatgccattgttcagttttctttaacaacagatttgcaaattaaaaaaaaaaaagaaaaaaaaatcttaccagcagtttgtaaaggtctggaatcacagttggcatcctttattcaggtctcttctctccagtgtgcacttaaaagtggtgccgagcagggataaaacctgcagttaagggaaaagaaaatccagcctccctctccaaaaaaaaaaatacatttaattnttaaaaattagtggtatggcaataagacac

SEQ ID NO: 252634 - DNA, 315 bp, Gossypium hirsutum
atgcgagaggagtggggggagcgcggggcaggaggagtacctcggccaagaaaattatgcatgcgttagggaagctctgagagaatggctgtggaagctcttcactgtggtttgaatccacggggcattgatcaccctgcccatgctgaaggtattaaactgcaaattgaaggtgaaggtgtggaatctcaatccattaaaaacaaaaatttccagaaggtgcctgaccagaaaggaacccccaggcgactgcaggcagaatctgagacggctaaggtgcgtaatattccagttaattacggagatttgaaagct

SEQ ID NO: 252635 - DNA, 324 bp, Gossypium hirsutum
atccgcgcgaggtgaccggagtcacagttcccgcgggcggcgacagcagagcgcccactgcctccagcagattaatattaagattggaagtttgtatcttttgctggatattggaaattgaagtaatggcaacagaatttataaagagttgctgtggaggatgtttctatggtgaaacagaaaaacacaacttttctgtggaaagagattttaaagcaacagtcccacatagtcaaaatgctactatctctgtaccttccactgacttctgtttctgtaaagcctcaggttggctgtactgaggattatttgctttccaaatta

SEQ ID NO: 252636 - DNA, 364 bp, Gossypium hirsutum
gtcagtttcgagcacgggctagacgcactggcatgtgactggccatgtaacccaagtcagtagcctccctaattttcacacagcctggcacacgggcgtgtcatgtggccgtgtggacaagttagtatgtatgccctgttttgccacggcctagacacatgggtgtgtttaaatccgtgtgaggcacacggcctattcacacaagcgtgtgacctctgtaatttagaaaaaattgtttagttttgaaaaattttgtaagtgttcggtttagtcccgacctcttcctaatgcatgtttaaggtctcattgacctaagaaagggacttattgttgatattttaatatgatatgatgatatataact

SEQ ID NO: 252637 - DNA, 407 bp, Gossypium hirsutum
attgtattcaaagatgatttcatagtgccaagcaacatggtgatccagtggttatgtaaaaataataaaacatgaggtgtcctgaaagttttggggcagtttttagctttaatatagtgtgcctgggccctccagaggactgcagcatataggtacatgctgtaaatctttacaaaatatcatttggaagtgtaattgtatttcttctttttatttttaatagatggtgcctcactatattgcccaagctacagtgcaatcagagacacaatcatagcgcaccacagcctgaaaaccctggcctcaagcaatcttcccatgtcagtctaccaagcagctgggaccataggtgtgtaccaccgcctctaggtttattttggagaatttgaatgttaacttttaacttt

SEQ ID NO: 252638 - DNA, 332 bp, Gossypium hirsutum
cccacgcgtccgaaattttcgtacttcattgaagttacagtatagctagatacggtattcggtcaattttatgcataaatttaccaaaattcgggttatatatatttccatcatacataaatgtattgttttaaggttttgctagggcgtttatatatgatgtaatgatttttgttgattttcttgttgctgaagtttataggcttagttgttgcttcagtctgaagttaatctctcatttggttttacagtggatttcaaagcaagtttgcttatgttttgaatttggattaggtcttttccattttgcatttgcagtttaattttggaat

SEQ ID NO: 252639 - DNA, 361 bp, Gossypium hirsutum
atgcctgcgacaggctccccacaaccatcccatgctgtgaaggacggaaacaggagaggaagggactggagatccctggcgggaggtggctgaggcagggatggaccctgctcaggttttctgagccctggattgtggtttgtccttcagttttctggtaaaagatgtagatgaaattgagccagcagagagatctcataaaaggaagcaggtttcaggatcacccagaccttggttcggatcctaaccccgggaactttccagctctgtggcctagacagacctccccctctttgaagctcagtgttgatagtgctcattttcaaagataatagttccagcactttgagaggctgaggca

SEQ ID NO: 252640 - DNA, 348 bp, Gossypium hirsutum
atcgaggagaccaggctgctctaacttctgaagagtgggctccggctcaagactccaatcggccagaagcccacagagatcaaagcactagcaagttcagctgtcctggccctcaggcagaacccactggagtgcctgggtgtggctccacccacatgccccactgtcagcccaggcaggagccttcctggccaggctcaagatctgcctgcagcccagccaggccatcacccagccccgatgcatcctggcactgcacgcttactcttcacaagcacttatatgcggatggcctccgagaccctgcctccctggtctgctgaggccaggccaggtctcccacggggc

SEQ ID NO: 252641 - DNA, 365 bp, Gossypium hirsutum
gatctcaccattactcagatccaaatcctcttttgcaaggggaaggatgttgatagtggatagtgcttgaagcgatgagtcggccccaagacccttaattcaagatgcagttcagtattccggtgtcttggatcggactggatttgttgacaaatgcatttttgaagcagataacaaatctaaaaatgcttttccagtcaacaaataccagtttgagctgagattgggctgagatttacaaacctcttcctcactcaattcaacagtctgattccgggaaagttcctttcttttgaatttacttttaaattttactaggtaatgtttagtttgcagtcgtttcttccctctcttcgacatatttt

SEQ ID NO: 252642 - DNA, 362 bp, Gossypium hirsutum
ccaaaccaagaaacaaaactattaaaaggatgaaatttaatccaataatcattgggaaaacatatttttaaataaaaaataaggttgtatcttccttaccggttccaatggacagaacatagtttcaccgatagagaggaacagaaaacgtgagaaggaggctgctttctgattggtgttcaaagtccagttgtaacgccaaagagaggtaaaacagaaaggtaaaagcgtgaatcggtggagatagaaaggtaagacagaaaggtgaggagagtggaaaagaaaggtggaaggaagaaccagattacggtggattttgggtaagacagaagcgtgaatcaggagggtaaaacagggaccaa

SEQ ID NO: 252643 - DNA, 335 bp, Gossypium hirsutum
cttcgaagacctatcatctctgttattctattaccgattggatccaaacaaaggatttaatggatcattggtattttctaggattcttgcttcttattttgcttcaactctgtttggtttcagctgagatcaatggatcggtgcttgaaatgaagagaggaacttcttcggttccatttgatcccactcgtgttactcaactctcatggcaccctagggctttcctttacaaaggatttttatcaagtgaggaatgcgatcaccttattactctggctaaggataaattagagaagtcaatggtggcgggatatgaatcaggtgatagcattgag

SEQ ID NO: 252644 - DNA, 406 bp, Gossypium hirsutum
  unsure (1)..(406): unsure at all n locations
atgggaagttgttggaaatactactggagatgtaaccagtagttggaccatgtaagactataaatatacagaaaaagatgaaaatgttttgacaagagaatggcttaatccaatatacattttgacagaattgctctgtcagaatttactgtgtcagccacagacgtcagggggcaaaggtagaggcaagaaaccagacaggaggctcccgtagtagtccaggcaagagatgataatagttatgctctttaatcatactcaacaaagttgttgagtattggaatacatttttaagttgccaccagcagaanttgcttatgaattaattatgggctatgagaaaaagataaatcaagatgttctatcatgtgttttctgaacaacatgggtaatggcaatgttattt

SEQ ID NO: 252645 - DNA, 301 bp, Gossypium hirsutum
gagaggttaagactgacctaagtctctactaatataaggtagccacaaaatatgtggatagaatcctccaaagaattgtagtatcatgggcacaaagtattcattgcaatccttctgtaatttagattgactaaagtagggatagaattccatgaaaatctccaaaccatagttttaatcatagttttaattttcggaggaatttgtaaattccatagctttttgtagaaatatctagaattagtatgtgatgtataatcagtaggaacaagggaaccattttgtaatagtatttgcgata

SEQ ID NO: 252646 - DNA, 324 bp, Gossypium hirsutum
atggagtggcttgctaaagctttgtttcttccctttctgctgcaactgttggttttactgccaattgcgatagcagaagctaatgtaaaactgaaatgggtgctacagaatgagactactgatagagcgtcgccgtggctcaagaatgcagcgaatccgaggccaagacctggtggatgcatgttcaggccgtggatatgtgaacggggagaacatccgccgacagctcggatgcgttgttgtaggaaccgttgtgttgaccttaactctgatgatgctcactgtggcttatgtgcgcttagatgttcatttacttggcaatgc

SEQ ID NO: 252647 - DNA, 309 bp, Gossypium hirsutum
gggatttgaaggtcccaaatagatgtatagagtttttttcattatcgtttttactcaaattactgtctgtatgctgggtcacttttgtaagtaacgctcgatacccactcttcaccgaatactctcttgaagtatcatggcaccaagcaagcaaatcaggaatactacacccaacaagaggaatgttgaaaatttttcgagtatgaacttcatcgcatatcttaaaaatcacctcatttttccaggaccaggaagctagggatcattccagatatttacctttacaccattgccaattcttcacaagag

SEQ ID NO: 252648 - DNA, 141 bp, Gossypium hirsutum
atctcctcactcacccttcctggtgctttgggctccccttcctccttagataagatgtcttatcagaaaaagcagcccaccccccagcccccagtgggctgcgtgaagacctctggcggcggtagcggaagcggaggctgc

SEQ ID NO: 252649 - DNA, 379 bp, Gossypium hirsutum
ttccacgcgtccgctttcttcttccccagttcccagtcgaaggactaaaacccaactctcattcgccgcctcatgcgcggccgtaaacagccatcgaaaggccgaagttcacccccttttgccagcgaatcgaaaggtatggtgaatgtggcttggacgtggtacatgggtgcatggtgaacgatgatggagaacgtgggtagtgcgtggaggtggtggcggcgccagccaaagggagagcctcaaagctagggtttgttatttctttaaaagaaaattagggccattgggcttgtgtaaacgggctaaaattatgttttgagccagcatttaagcttgggctttaaatttggaatggacctatttgtttttgtttagt

SEQ ID NO: 252650 - DNA, 324 bp, Gossypium hirsutum
ctagctccgaatccgattgctccaacaacccacgccttcaatccaacacttaagaagacactaatcattgacagaaaacgtcagttaaaaacccttagagccacatgcccaaatcgacagcctccctagattttagggacttcggcttttcctaactttgtaaaataggaccagatctgagatgatgaacacttaccccttactccttttcgacctccatgcaatctggtgccgatttatctttcaaatgacggtagaactcaacttccaaagttttgaaagttccgctattaaccccttaatctatgggtttttggcttttgg

SEQ ID NO: 252651 - DNA, 319 bp, Gossypium hirsutum
aaagctcatacattggacagacatggtttagatactaaatagatatggattaatgaactaataatgttatacgataatctttgctgcgtatgttcgatgaggaccaacgtttggatattactggattcggatgtaccaaaaagtttcgcctgactatacttaaatcacttactaatccaatctccgatcacgggtcaacttgtgatctctcctttcccattccacttttaatttggctattaccaatgctgagtctgcatacactcgtagtatcttaatcttccgttctatggttgctcgaatccccatgatgcaagct

SEQ ID NO: 252652 - DNA, 364 bp, Gossypium hirsutum
atcccagacgaaggctgagagtagacagcagaaccagcggcggtagctaagctgagacagtagtagcggcgacaacgacggcggcagcgatggctggggcggggccagccccgggactcccgggtgcaggaggacccgtggtcccgggtcctggcgctggcatcccgggcaagagcggcgaggaacgcttgaaggaaatggaggcggagatggccctgtttgagcaggaagttctgggggctccagtacccggaatcccaactgctgtgcctgcggtgcccacggtccccacggtccccacggtagaagcgatgcatgtcccagcggctcctgtgatccgtccaattatcgcgaccaacacata

SEQ ID NO: 252653 - DNA, 271 bp, Gossypium hirsutum
  unsure (1)..(271): unsure at all n locations
agttatgccataaatgccaaatggaggaagataaaacttatgtgcctcatccatttcttcacagattttctatatgtggagcatggatattatagggctgatcttgtcaaaagcttctaaccgatactgattcatctttcgggtcgttgattacttcgtgaaaagggtgcaagtcagttcatatggccaatattactaagtccacggtcaccaaaatcaaanntaaaaataataaaaaaaaaaaaatataatttaaaatattttaatatat

SEQ ID NO: 252654 - DNA, 380 bp, Gossypium hirsutum
atcaaaaatgccagatgaatggaagagggaacacactgagatgacttagactctggtccaccaaccagacccttggaatggaatattaaaatcattacaaggcatgaattttaaatggatgaaatttcaaattatcttatttggatagaagtctatattctagcctcatttgcctgaagtcagatagccagaagaaatttcattgctcgttttcacgaaattcacttgtcttttgttaattaacacagggcctttcccaaattattctctagccaagccccgccttcattactgttgaaatccctcatttatttccttctcaaagtgcccgttatccaaacgcagaacctttgcatctccaagccagttatgctgaattt

SEQ ID NO: 252655 - DNA, 356 bp, Gossypium hirsutum
cggacgcgtgggcatctcccatctttccttctatttttgatttagtttctcctcagctcttcaacaccttcaagcattcatggattccatccatcacctatctgcatccacctctttcacaatgaaagaaggaacttcattcatcagataagttgtttctctcctttttagttcctttgtagctagaatgtgaacagccttgtctgattctctataggtaaatcgaaaaacataagacctaaaacttgaacataattgttttgaatcattgataaaaacttcaatctcagatctgtctgctacctcagcttacagtttacgaatcactgtatgggcatctccttctatttcaagcg

SEQ ID NO: 252656 - DNA, 366 bp, Gossypium hirsutum
atttctaacttttatcatcactattaccagcatcatcactgttatcgttatcttcatcatcatcattaccaccattatacctgatactgccacaacatcagaacattatgtacaggcacagcatatcttcccaaagatcttggccactgtggactacgatctttacgtttcttggagtggcagcaatcttgggagtaactattggtcttcttgttcattttctggcagttgagaagacttactattatcaaggtgattttcatatttctggagtcacgtacaatgacaattgtgaaaatgtagcttcacaagccagcacaaatctaagcaaagatattgagactaagatgttaaatgcatttcaaa

SEQ ID NO: 252657 - DNA, 370 bp, Gossypium hirsutum
cggacgcgtgggtgcagttgcagtcgacttcaaacttcaaactccaaactccaaactcccacataacaaaatcgtaaaagatcgatctatctaaatttttgctaaaaaagtaagatccttcaaaaatggctacccttccacaaatcgcggttctggaggctggaatatttgtaaaaactcaatacatcccgagactcgccgagatctcacatctcttctgcctcaaatatatctggagctgttcagaggaatcttcgagaggagctgttgagatagccaaacagcattttcctggagtggaatgtaaatggggagaccaaggtctaaacgacatcgtgcaggattcttctcttattggtactgctgtcgt

SEQ ID NO: 252658 - DNA, 357 bp, Gossypium hirsutum
atctggattcgactgctcagttcacctgccacgttctctccaaggagtgggttctacgtgaccttcagtcctctacctcagagccccgagtcatttctgacaaccccgttctgtgtcctcactcttgtccctgaacgggtccctgtgtggatctgtgtgtgtgtgtgggttctccgctcccccccctcgtgtaccacacctgccataatgaaccgtttctgcactgatcttgtccatgggtatggagtggagggaaggtcttgtgaaaggggagagccttgacttccatctaggtttcttttatctggagaaaaagaacatttttaaactatgaatgcttagccctgaaaggcaagc

SEQ ID NO: 252659 - DNA, 366 bp, Gossypium hirsutum
ctcaacatataattaagaaattcaatttatgatgatgctaggaggaggtaaagaagacttgaattcgccggagattggacttcgcggcagcgtcgcggggaagttgaacgtcttgttgacggactccgacgacggaagcgagttctcctatgagggttctgtcgaagaagagaaactggaggagataatgcaagagctttacaaagagataacatcaacatcaccgccaccttctgtaacttttccgtcgctgtcatcgtcttcttcttcactggcgttctctcccgtcagcgacgttaagatcagtgagagctgtggggcatcaatgtctgactcatcgttcacggtgatgggccgcattgcatt

SEQ ID NO: 252660 - DNA, 336 bp, Gossypium hirsutum
cggacgcgtggggcttatggaattgaagagacattaagtataccccccattggttgcttactgaaagggatgccgcatgtcataacagagagttctcagtatagttgctcaaatgagaatggtagattttagtgttttatatatattaatattaatgattgcatagtacaatttatatagatagaggccgagggggagagatgacatagcacaatcatctgaatatgtattatataattggtttgttttgtggtgttggtttaggcttctttcatccctttaaaggggttatttatcccttagcgtgtgatgagatgagatgtgctggtttgtata

SEQ ID NO: 252661 - DNA, 217 bp, Gossypium hirsutum
aaccggtcggttttatttaacctaaggagggggaggtttaaacttaaactttttgttgagatagaactcctaaataacttacaatacttaataattataaaaaatttgggataaaaaataaaaaatatttaaagtttataaatacaatattgagcttatctattataaaaattaaacctccaacctccctctaatataatttaaacactcattaaaa

SEQ ID NO: 252662 - DNA, 366 bp, Gossypium hirsutum
gtaaatcttatcaatctgcatcgaaggaattccaagactcgttcaatcgttctaatgcatcgatgagatattcaagtagagatcatgaaaaacaacctgtgagttctacagctcaagctacgcctattgctagtgttggcagtgtgacagcccaaaattgaccctagtcagaaagtggtttcgggaccgctaaaccgagtcaccgaagtatttgagtataatatttattgtctaaaatatgtgaatatgagtgtgtgaaagttttaagcttcgatttagttaattgcatgtgaatttagttaataagacttatgtgtgacacttttgaaatgtgataggttaatctataaggatctattagtgcat

SEQ ID NO: 252663 - DNA, 104 bp, Gossypium hirsutum
caaaatactaagatcattaatacccaaaatgaaagtttgatagtgtgatttgaatctctgacgatctctgtttccgagctagcttggcgacactataaaacatg

SEQ ID NO: 252664 - DNA, 275 bp, Gossypium hirsutum
atcttaatgactgttttggaaaagttgaattctagatttatatatatatgtgtgtgtatttttttttcaaacatcatttacatagtcatgtagtggaaaagggatacctaacatagttttattgaaaaccaaatttcatgtataaataataaaaaatccatatttcaacatcctaaaatcaaaataaatgccatgcatgctatataaattcaaaacctaagtcccatgccacagtttaattataaatcaatacagtctcttaataatagaaattg

SEQ ID NO: 252665 - DNA, 387 bp, Gossypium hirsutum
  unsure (1)..(387): unsure at all n locations
ataatgattgcagttgtattttcagaggattcaaatatcatatgtgccatggatattgatattacaactttcaaaaatgattaacaattctcagtaaggtgcaaatgaaacaaagtatagtcttcagttagtttacattggatttgcatttatgggaaattgtgtattaaaaccatgaaaagaagtatttaattttttaatgtaagattgaatttggtcctaggcttaaatcattacatacagattttttttaatctacatgattaaaaaaatctacaggaaacacaatgtctcatatccatggctccattggtgcatggtactatataactngtagggtatgttaattccctgatatttattcatttattcattcaacacataaaa

SEQ ID NO: 252666 - DNA, 387 bp, Gossypium hirsutum
atcgcgccgctgcggtgctcaggaacagcccatggaagaatcatatgaagaggtggtgactgaggtcgtaagcaggagtggacatgtttggatttccaacagctaccctgctggactgtcatggaagatatgcccagaatgtagcgttcttcagtgagtgagtcagttgatgtctggatgtgctcagctcacagatattcagtgttcctgtcctcagcactggtcagcagtctgaggaagcagaggagaccttgctttggtagagctcgctgttcctagggttacaagaaaagcctgtgagctggagttagaagtaatagtagaaacagagcaagagaaccatcgtgatatagaggtagcgttgaagtaatctctgagaatcaatga

SEQ ID NO: 252667 - DNA, 275 bp, Gossypium hirsutum
ataaaatttggattgtagtctgagttttttttccccgtacaattccccattcccccctgcaagcctgtaccaggagaggtatcagctgccttggaggcggtgagacatgtgggtgttcactgtggccctcaggggtgaggctggcactggggcatctggggccagaagtcctcctttagtcccaagtcttttgccactgaagggcataaggaaaaggtcctaatagaaaatttactgggggcccaaagctgccaggctgttgggggtgggaagca

SEQ ID NO: 252668 - DNA, 314 bp, Gossypium hirsutum
gccttcatcaaaaccatcagaagggaagcgattcattctctcatctctcactttcatcttcttcctctgtgcattagcttccatcaatgaaatcagattcgagagcttgtttaagcttggaagatgtgctctttccaacgcccctctggctctcaactcatcttcagaaatgtccacacttgcacccaattcctcattccgatgacattcggattctgatcggaatcctcacacttcccgatcagtaccatcgccgccatttccttcgtctcatatatggtacgcagactccggtgggggcacaagtggacgtg

SEQ ID NO: 252669 - DNA, 361 bp, Gossypium hirsutum
atcgcgagcggcgccctgttttttttttttttttatttttattttgaagcttgaccagcaattattccttcaccactcactctctttctctaactttgcccaattattaaatgaaaaagttgaaagcatatatgctcgtttatttgatgtgcatataggtgtttaattattatttttaacatatttaatgcattaattttattgaatttaaaaagaaaaatcactatttttttcaaaaagaaaaaaaggaaaaatattattattaaataccatattattattagactttgggtcttcttaattgattagcattttccaattccaaataagattattttgttttcatttgactctaaactta

SEQ ID NO: 252670 - DNA, 384 bp, Gossypium hirsutum
atggaatggccaggacaagtggagctagccattttcattacatggccatcccaatggacactggatccctggtccaactgtctaaaaggccagttgtgcctgtctgtggatgtggatgtctggccttcacctgaggtagagcggggactataaacacacatcaactttctttctatttgctttcttttccttcttttcaaactcttaaacttaggcctttatgctgtgagtgactagtccaagaagcacacatttagtagtagtcctgcaccagccctgctcttgaataaaaaggaatattactggctgcacccaaatcttctagtacttaagtcgagtaataagcatcaggcattggaagaggttttaaatttgcttttttga

SEQ ID NO: 252671 - DNA, 391 bp, Gossypium hirsutum
atgtttgccggccggcccggcaaggaggcgggacacgtcggcgctaccaccgccgcccctcctcctgtttcagctgccgctgctgccgccgcttcctgggctaagccagcccgcggtcccggcggcgccaggtgcgttcactctccccggctccagccagcgtccgccgccgccgtagctgccctgggctccgcgccccactgccgagatggcgacgcgctcctgccgggaaaaggctcagaagctgaacgagcagcaccagctcatcctatccaagcttctgagggaggaggacaacaagtactgcgccgactgcgaggccaaagtgcatgcaagatatgggaaatactaaagcaagactactctatgaagccaatcttccagagaactt

SEQ ID NO: 252672 - DNA, 305 bp, Gossypium hirsutum
cggacgcgtgggctttcactgtacagccgatcccacacgcccttctctctctctctctctctctttgtttcttcgtcttttcatgctctcctttctcttctttttcttctttttttttaattttccccttttactttccgtttctctctctttcactgatacaaagtaagattttcctcagcgtctggcatgagctcaacaccgtatttctctccccaattcccctctctcgatgttttcgaaagaaaggaaagtgaagtattaccggtagaggggagtcaccggagctgggagactagaatcga

SEQ ID NO: 252673 - DNA, 363 bp, Gossypium hirsutum
atcatgtgtaaaagcttcgaagacggtttgaatgaagacattaaattactaataggcatacttgagataaaagagtttgtggtacttgttgagcgaatttgcaaagccgaagaacttggaaaagagaaaacaaaagctgattttaaagccagagattctcgtaaaagatcatcgggtaagacttttcactcaacatcgaagaagttcagagatgattctactcgatctaaggatactacaggcttttctagacgagatcgagaccgacccctatgagttcacgagctacttcgatagctagtgttggcaacgttcgacagaacagagtcaagtgcaagcattatggtaaatggcattcttgag

SEQ ID NO: 252674 - DNA, 342 bp, Gossypium hirsutum
catgaacacaatcctccacccctaaattagattcggcaatcacttaacccctttaacctcaactttcaagttaaaagcaattaaccactcaccatatcctacattactatccattttaatgacattaacacatctactaagagtttcaagcttcttggccgaatttcaacctcaaaatcctaagtctaatctatcggatgagtagaatttgaactaaccatctcaaacatgcatagattttcaagaatcattcaatacatacctcattctagccatcttccaagccaaaatccaataaccaaatctcccttccttctcctcactcacggcaatagccaaaaa

SEQ ID NO: 252675 - DNA, 375 bp, Gossypium hirsutum
atgttctctgcagtgctttctaacagcttctgggtgcagattttcttcggcatccttttgcactcagcttattacaggtaggtagtgcttaagaaaagtcatggaggactaaagcctaagtccttttcacttttcctccatctgaaggtaggtgagttcatcctcttcatagtaatgctgttttaccaagactttttatatagcagatgaacccagaaagaattttctgctattgtgttcactacaacagggtagagacatcagaacagccccagaacccctttcaaatctgatatgggactattaaattttatgctggtaatttggattcattcacaatgcagtttaaggcggaaggctccactgcattctttg

SEQ ID NO: 252676 - DNA, 367 bp, Gossypium hirsutum
gctggctgtacctgcaaacacgacaaactcacgagagcaaaagaaaaggacagaaggacaaggacgaatttttttttccttttatttattttctttttcctctgtaaaaatgaggctataagaaagccaagattagactgtaaacgggagaacccatgcagatattgtatcaaatacataaaaaagacatattgaaatgaaaaaaaaacagagattaaagatcgattgatccttttttctcaaaaggtggttcctttttttcgttttctctctcggtatttgctttttagcaagtgatactgtcgtttttttttgttgcatgcatatagatataacgaaaggggggtctttttgtcattactagcgt

SEQ ID NO: 252677 - DNA, 365 bp, Gossypium hirsutum
atcaccaactcacttctctcggcttccttgtctgtaaattggatgagaacagctctaatgcctttcaggctctaagaagccatagatttggacaagcccagcaagatgggtgtccttccaggcctcttcccctttcctccatctctggcaacagttcttagggtttggcaattgtttggattttttttctttctgcagttgtgtgtatgtgtttgtgtgaagaaaaacagactctgtccaggtagaaatggtgacgagggggaagataattacatttccagggtcaggaacttggcaacagttttcctaaagtgactcagacacaccacagtaacaactcttgctgcaattttattttcatttga

SEQ ID NO: 252678 - DNA, 318 bp, Gossypium hirsutum
atgcttcatgcacattaacttttagctcatttcatggagatgggacactcctggctgcttgtctagcaacctggctgcctgtctagcatgtctggctttggaacaaggattcccatttcagaatgatgagagtaaaagcccttttactgtgtatagcacattataaattattttcacatctgtgaacttatgttagcttcacaacaactttgttggttttatgattcccattttataaatgaggaatgtgggctggagaacatgaagtgcccaaatgaggaacgtgcaagtgttagatcaaggaaaatagactgcacc

SEQ ID NO: 252679 - DNA, 361 bp, Gossypium hirsutum
tcaaaaagttgggtggtggattattttaataaatgtgaacattaaatgagttaaattttccattatagatcaagatagacgagaagactacctcaaacggggaaaagagaagatagtggagtaaattgcaaaattgcaatattttgcatcgaggtaagtaaacatgtgaaataatgcattattttgatattatttgatatgtgttgagatttatttgaacatagaataaatatgtggcaaagattcaaaaaaaatgtggctaagtggggaaaggtggtaaagtgttgaaaaacacggtttctggttgaacactcggaataggccggattacattgaatagaaagggggttgctaagtgctg

SEQ ID NO: 252680 - DNA, 370 bp, Gossypium hirsutum
taataagaagacacggatcaaaacgatgtaatgaaacatgttgggtgaatggaagaataaaataagaagcatgggcaataaactaataagaaattgaaggaagaaaacaaagagaaaaaatgtaacaccccgaacccgagaccgacaccggagccggacacgagatgttaacaaactttgaaaaatttttccagacactgcccagtctgagtactagtcgcttcaaaaatcatatcttgagtttcacaactcgaaaatcagttttgtgatttttccctgaaactagactcatgtccccacctatgtatttttttctagaatttttggtcgggccaattagtacagtttattagtcaaagtctcccatgtt

SEQ ID NO: 252681 - DNA, 407 bp, Gossypium hirsutum
atgtcgggggcctgggctggtgcttcatggtcttcgtggacatgtgagggccgtgggcgtgagcttgatgtatcgtcccagcctgtggctgtgttctttacatcggtgggactgcccatgccgcaggcagtcgctgctgcctggcgcccacggagagaaaagaaagggctgagacttccgtgatgggggtgcggatgccgcccctaggctggcttcctgcgtccaccctccccatgtgcactctcaggggcggcgcccacctgcgggtggctcctgttcacacgacttcaggtcatactgcggagtgggccgtctgttctgcctctctgtgggcttctctccaggaccccagctgccaaggactttagacgtcacccttggaggcctctggacacagagggctgtgt

SEQ ID NO: 252682 - DNA, 162 bp, Gossypium hirsutum
cgtaagactttcaaacactgctgatccatagagaacctcatgtgccaagtcctaggctcaatagaaaggagtgaacccatgatcatcatcacgtctcttgctaaagggaaacccgcatatcagtctggtgcagccgcatgttctacggactgtacggagggt

SEQ ID NO: 252683 - DNA, 320 bp, Gossypium hirsutum
tacaactcatagtaacgtgcaaaaacgcagagctggtgccggtcccgaatccccgttatcgctgttgtgacagccagtccgggcactgacctcatctggaagaaccagagctgatcttgcactgtcgatgagcccaggcaatactgactaaaactcagctagaggagggggcacgcagaacccttggtgggaagaagcttattctcacatagtgtctagttgtgggaccaacaaaggcagcagctggttcttggggcatcttcattcttttggggcctcagttttatttatcaaaatactggacattatactggtcacat

SEQ ID NO: 252684 - DNA, 298 bp, Gossypium hirsutum
gaaaaagataacattttctctttattttatttattagtcaaatacaccacctaatggcaacaacctttgattttttttttgactttctttgtctcaatggccgactatgcctaaaaaaattggcctatttgcacattaaatacccctaatttataatccatggccatttaacactattttctagcaaatcataactttttcccctatgatatttagtcctttttcgaaattaagctctcaaacgttaaaattacttcaccaaatttttcatgcactattataattaggctataacacc

SEQ ID NO: 252685 - DNA, 402 bp, Gossypium hirsutum
atgaatcattcacctgtgacctctgtgggcctgcggggggacagcaggggcacatgacatctgcctgggccctgaccaataaatcctcagaccctgctgtggatggggagcaggggtacctttgggaggtgaggactttatttaaacagcggttctagtgtgggaccaagagaggcagcagctgggtcttggggcagcttcattcctgttgggcctcagtttctcttccccacattgagggacttgtgccgggtgacatgcagggtctccctctgccctaacaggatatgcatgatgacaggcagtgtgatgtgttctgaaagggtccagggcaaagcacagggagagggtggatttgtgtagggtgcagctctggagaagctggatcattcccggtcccac

SEQ ID NO: 252686 - DNA, 409 bp, Gossypium hirsutum
atgtggccacgagcgagggcaggcccctggggacacatctgcccacagctgcacaggccagggtgcaggcccatctgttggttctcaggcctcagatgaaaccatctccgcatcatatggccagtgaccactttctcccttcaggaaaattctgtggctgtgcagcattttgaagttttaattattaacctgctttcattaaagcagtttcctttcttgctaaatggaattaccaaatctgatcacacatagcaaggtcctgtagttacccatcctgctgccataatgggggagattgtaaggaagcagtgacaggtggtgaagcaagtgtcaaatttcagagctcttggccgacggatacaaagataaagaaaacattgcctttttctacaactgtcagaaatagtca

SEQ ID NO: 252687 - DNA, 342 bp, Gossypium hirsutum
taacacgtttgtgcacaaaagcacgctggttcccggccggaatttccgggatcccaccacctcttttcttaagctttggggtgccttcttcttctcctggtattcactaacaacatttcatgcccccaccttctcgattaccttctcattttgctgtaccttcccctgggggcattccaacttgcctttaacttaattcaaccttttttcccccaccaaacgcttcaatggggccttcaccagatacttacattaaagcctctgtcccctattaccaccattggagccgagaatttggcccttcaccctctacagttagtgaagcccaatttgaagatatta

SEQ ID NO: 252688 - DNA, 376 bp, Gossypium hirsutum
tccacgcgtccgaacgatgtgagtaagtgtttgactgaatacttatagcaacctctaaacataaagcaatgttcatacgaaaagaaaaaaagcagtgtaaggtaccgtgctataagcctgtaaacatatatcgcttaaggcaaggtaacttgagatcttgttcttgaaggaagcaaaccattttagaactcttctgagcaacagattgagtatggttttgccgaggcattactgtcagtaagggtggattctttgtaatcccgaccttctaaatcaacatcgtagaccctatatcctttgtcgtaggtttttcgacataacatatttagttgtttacttgtttgttacatattattcacgtattattctcaaattt

SEQ ID NO: 252689 - DNA, 374 bp, Gossypium hirsutum
  unsure (1)..(374): unsure at all n locations
cccacgcgtccgcaaatctctgatcttctaagcatcacatcccataaaatattagggatgataacagttgtttgcaaaataaaaaaaaaaaattttattattatataaattaaataaataaataataaataaaaaataataaaaaaatntattaattatataataaaaaaaaaaaaaaaaaggggggggcctttgggaaaaaaaaccattggccaacctaagggggaattttttttgttcaaaaaaactttttgaaaactaaatggcttgaggaaaaaaaattaaagaaaggttttgggaatttaaaaagggttttgggaccccaaatttttttgtttttattcaaatttttaaactttttttccacaagcttt

SEQ ID NO: 252690 - DNA, 397 bp, Gossypium hirsutum
atccacacctctgtctccatcactgcctcacggtcctgcagggccagcaagatgcagtttgagatgcacgacaacgtgaaaggcaaagctatgtcctaccccgtgaccagtcagccccagtgcgccaccaccagctgctaccagacccagctcagtgactggcacacaggtctcacggactgctgcaacgacatgcctgtctgtctgtgcggcacttttgctcctctgtgcctcgcctgccgcatctccgacgacttcggcgagtgctgctgcgcgccctacctgcccggaggcctgcactccatccgcaccggcatgcgggagcgctaccacattcagggctccgtcgggcacgactgggcggccctcaccttttgtctgccctgcgcgctctgtc

SEQ ID NO: 252691 - DNA, 382 bp, Gossypium hirsutum
aagggctcaactgaatacgttcctgatccaatcgagctaatagttggtccatttactagctctagccaagcagttcaaagaggcaattttggtcttagttgaacgagtttgggaggaagcttcaactggacttgtcaatcatgtttgggatggctcatcaagtgctccttgtaatttacttcaagccgaattcaacttaactagctaactcagctgttgaataagacttagacatttttagttatttcaattatattatttatgttttgatttcatacaacattattacatgtttgattattttagttaagactactaaatgtgtcctagtttgtacaactttattacatatctgattgtttagttgttctatgtttattac

SEQ ID NO: 252692 - DNA, 404 bp, Gossypium hirsutum
  unsure (1)..(404): unsure at all n locations
atggaaatgtcaagcagattatgaattacatgaccaaatattttgtattggagaagctttgcgcaccagttaaatctcattccttcccttttttttttcaaatggcaccagctttttcagctctcttatttcttccttgagttgcatttattcctaaggtaggcagggtatttcctagtaagcatactttcttaagacagaggccacttggttcctgggagaataggcagccccacgctttgaagaccacagaccccaatatctagtcgtggatatacttaaaacactgaagagcataaccttttgggtcaaccgttggtcaaactatagggaccatcacacgggtagggattttccatccagagccaataaaagggctggtgggggccggnggtggctattgt

SEQ ID NO: 252693 - DNA, 318 bp, Gossypium hirsutum
gaacgctgacgcaggagcaggctgggccccggtctccatgatgcgacacacgcttatgaacaccctgactatccgacggggtgacgtgctaactgaggtttaggcattctaaccccccctcagcgaaaaggctgcgtggatgacacaatgatgactggccgaacaagactacagttgacagcccgaatttctaagggggaaagttcaacatgtgagagcatccgtgtacacccaggctcatgcgctgcagtcattccgccacgactgttacctactgttggaacagacttaggaggggcaggaattcaaggctgggct

SEQ ID NO: 252694 - DNA, 409 bp, Gossypium hirsutum
atcccagccctgcagaccctggaattctgtctctgctcagtgcccccttgggctccggtggctttactctcctgcatgcagcagctgcagctggcagaggctcagtggttcgtctgctgctggaagcaggtgccgaccccactgtgcagtgagtaaaggtccccatcctgagtcattttgggtatagagaggataatttggaggttaaagttggcactgactacttgacaatattctcttggtctggttgggtgatgttaggaaaggcaggaggcaagttaaacccatttttggagtttttgcgcctagggactctcgggcccagccaccttacactgttgcggctgacaaatcaacacgtaatgagttccgaaggttcatggagaagaatccagatgcctatgattac

SEQ ID NO: 252695 - DNA, 364 bp, Gossypium hirsutum
atgatgctcacactttggattggcaggaaaggggctgtggcggaaacaaaaggagatgagggcaggggcacttttaggaaggactgaggctactggcgatgtcacatgactgttgagaagaagggaatttgttagcaagtggttacatttagtaggaaaagtgttgagagcatggatttggattaaaagggggtaagcaattgaggaggaaatgaaaattgggcaaaacattccttttggaagtttggatggtaaagggaagttgttgttgaagggaataacaggatctttatgtttggcttatttactggtctatggggaggaggtgggagaggaaaaagttagatacaggacctgggcaaac

SEQ ID NO: 252696 - DNA, 367 bp, Gossypium hirsutum
actttcgctccttacaactacggctcaggctcacacacacattgactgaatgggtcgcgctatccgggctgaacgtaggggcgctggatctgacatgactgccgacacgaagggactcatgtgtcctgcgctttcatttagtctgaaaagcgttgagagcatgggttttgattaaaagggggtcagcaattgaggaggaaatgaaaattgggcaaaacattccttttggaagtttggatggtaaagggaagcttttgttgaagggaataacaagatctttatgtttggcttatttactggtctatggggatgaggtgggaaatgaaaaattttattcagttattgccctaataaccctgcccttttt

SEQ ID NO: 252697 - DNA, 306 bp, Gossypium hirsutum
atttgatcttttcccatggaagtctcaaagatctttcattggttgtttctctgagccttgctactaaaatgagcctcgtggggagcatcaaagaaagccaggtgtgtttccctagactctataactatctctctctctctctctttctctctctctctctctctctctggctctctctgactatctctgtgtctctctctatatttctctatctctctgtgtatatatgtgtccctgactctggctctctacatgctctctgcttcggtatggaactttacttagacattttgtagcctttatttt

SEQ ID NO: 252698 - DNA, 415 bp, Gossypium hirsutum
attgaaaattttaatttttgttgatttagctatcccacattataaatcatccttaaccattttatatcagttaaatacaggggtggggtgggggaggaatgactggcatgtagacatgtattgatttgggaatatctgagcatttctttcattgttggtaagatatcatgatgaaattaaaacagcagtatggagcattatatatcagtaatgtgatactttatatacttaagccagtttaaccattttgggaaatgttagcataaggaaataaaatccaaaagaaggaagataagctatatgcaatgcaaaatttgcttattgcaatatttttatatacaaataaagacactaaaaacagttttcacagtccatcattacataactaaagtaagtaaaatgatatgtatcaact

SEQ ID NO: 252699 - DNA, 389 bp, Gossypium hirsutum
cggacgcgtggggtattggctatctgtgaaccccttaccccaatccgatatgcactgtgaggtcgagagataagtagttctagcagactcattagtttattggaagatctagatatcctgtttatgtaatgactagtagattgagtagaaacctagaataggaattaattataaccactaaagtgagctaatcacccattcttagatttggttgagttatatataagtttttcattttcactcttttatgcatgttttactctttccttattaaataaatatttttcactttaggccttatcatactataatttatttatgatactaattagatctatttacgtttaagttaatattagtacttgccttccttgggttcgacctttgga

SEQ ID NO: 252700 - DNA, 176 bp, Gossypium hirsutum
cagaaatagagaaattaagaggagtcattcttagtacatacagcactttttgctaaacaactaaccgacggcccctgttatagcgctagatgttttattattaaaactggctccgcctctttttattggtttacccaaatttatataagaccttttaattcatacattgttccata

SEQ ID NO: 252701 - DNA, 397 bp, Gossypium hirsutum
gtaaggggtgttgtaacaccccaaacccggcccagacattatggtcgaatctgacgtgccacattggagttgaaaatccacgttctgttttagtgttttaaaaaccatatattttgttgagttaacaaagtgtatggaagcttggcaccaggtaggtatccgagatagaggaggtgagccatgaaggctgcttaagtaccaagctctttgattggatcgaatcctagacatgcccacaaccatacccacactttgttatatcgagtttaaatttttttaagtgaatgactttgataaatcaattaatcgtggtgttgaactcttttgaaaacaagtatcgttttgaaaacacgtcctaagtctagcccatttgaataattatcaaccaggtttgaag

SEQ ID NO: 252702 - DNA, 289 bp, Gossypium hirsutum
atttttattatatatgtacatataaatatttatatagtgttatttttaattactttattttaatattattatattatatttcctttttgtatttcattattattattgctagtattattatcattatcatcattattatcatatacaaattcctattacaaatgatattttttctatgtttttaatttcaacaaataaggtaacgtaccgatttcaacactaagttgctgatttcatcgctatgttgggtggatatcattgactcatgttaaaaactagacgtccttct

SEQ ID NO: 252703 - DNA, 367 bp, Gossypium hirsutum
aacaaatgcaaatgtaaacaatgtcaaactgtgtttagctctggcttctgctcctgagatggattccaagttattttcgcagctaaaagtggttcgaaaaattggtaatcttttggagcttgtatatgcaaaggttatggaagactttcttgagccaactcttggcttgtttaaggcttttcttctccgctctagtggaaatggtttcgtttacacaaaagaacccacactgttacttgatggttcattcgagtcaagtggctcattcaagcagcagcaatgcattagagatataatggactttggcagcaatgttggagtgctattggaggtaagtgcatctcatgaaccgaacattgctgatgta

SEQ ID NO: 252704 - DNA, 377 bp, Gossypium hirsutum
cttttctcccccatttgtctctttttggctagggcttcatatccatcatggccgccgccgttaaggccaccatggacggtggttgaaggcatgtgaaaaggagggtttttcacctccgtttaaagagtttgaaaaccaagcctcctcaaaacccccctcaaaaaaatgatatatgaaagaaaggcccctttttctctcttgaaatcgacatcagcaacggagaggagaattccgatggccgaccacagggcgttcgaggaaggttctcctcttttttctttttattgatttttctatttaaaatagatttgtaatgaaaataaaaagataaaaaaatttaaattgaacataaagaaaccgaacaagtagagactaaa

SEQ ID NO: 252705 - DNA, 404 bp, Gossypium hirsutum
atgctgggtgtcgtgcatccgtagtcccagcttgctgggaggctgaggcgggttgttcgcgtccaactggtcaacaaagcaagaccccgtctcaaaaaaaatacttttttaaaaaatgaggccaggcgcctcattttaattgttcggtaaaattaaaagtggtttgggcacttgaggaaggggtacagatgcgtgcgtgcctggggacgcttgcacacaacttgagaaaagcagatgcagaattgagttctcatgtcctgctctgacacagggtagcccctgatacaggtcacccatcgtccacttgatgacttggtgagtgacccatacaggtgcatctgaggctctttagatgtgagcttgtttgacatacacaagctcctgaatgaccatcacctagactg

SEQ ID NO: 252706 - DNA, 383 bp, Gossypium hirsutum
cggacgcgtgggcgaaattatttttcttttttgtcatcattgtgagtttgttgaaagcattaaaaatggatgagaacaaatttgttgttagtttgatgatcatttttctgggtttttcttatctcctcaattcttctgctgctgttcctgtaacaagatgctccatgccaaataataagaaactcctcccttcttctccttctgctcaagatgttgttgttcaggtattttgaatgccctaattgatattcttacagggtttttatccttttgcattcttttacatccttcacatgaactcacaagtaatggttaggattttggttaatttgttgtgttttttgggggcaggatgtaatgaaattgagtggaagtgaggaagt

SEQ ID NO: 252707 - DNA, 381 bp, Gossypium hirsutum
ggttcatctatctcatacactatatcattaaccacaattattcaatacataccttcactgtctcgtatttaactattacattaccacatccatgctcgatgcactaattcgttagatcgtttttcacgtgcaagaacatcgcacacttagtgccaacaatctagtcgaagctataagatatcgcacacttagtgctatcacattatacctaaccatctcaatattgcacacttagtgtcgcatatagctgaagctattccaattcgcacacttagtgctatttctagttgaagctgttgaaatcgcacacttagtgctgaacagaatcgatttatcatcgcgttcaaaccaagcttgaatatacaatttatataattcatc

SEQ ID NO: 252708 - DNA, 397 bp, Gossypium hirsutum
gctatatttgttgtatacagatttcttgtgtatcaagcaaccctttttttgcttttatcaaacaaaatatttttgcatgaaatcttcctataatggcttaaatttccttaacatattatttaaaatattcaatattaatattttaataataaatatttattacaattataaatatattaataaaaaatgttttgtagtataaaggctaaagtatgtcataagtctatgtacacttcacaaatttacaatttactctttgtacttttatttttaagaatttagtccctttacttttcaaatttaaaaatcaagatcaattgttgacatcgttaaatttttttgtcaaatttgttgatgtcacattttaaaataaaaaatactcactttgtagtcatgt

SEQ ID NO: 252709 - DNA, 389 bp, Gossypium hirsutum
atgcccagaagcccaggaagccggtcagtgcccgccccagtttgaggcctggctatccccgtgggaacatcaccatgtcagagacaccccgggctgagacctttgtcttcctggacctggaagctactgggctccccagcatggatcctgagattgctgaactgtccctctttgctgtccaccgctcctccctggagaacctggagcgcgacgaatctggtgccccagtactgccccgggtcctggacaagctcacgctgtgcatgtgcccagagcgccccttcaccgccaaggccagcgagatcactggcctgagcagcgagggcctggcgcggtgccggaaggctggctttgatggtgccgtggtgcggatgctacaggcgttcctg

SEQ ID NO: 252710 - DNA, 242 bp, Gossypium hirsutum
atagaaatttaggtatttacctaaggccattaaggcgtggaataacccgtccccacgtgtagaatgtgtcctggcagagctcaagggcgttacatgcgagaacagggaggctgtgctggatgcttttctggatgatggcttccttgtccccacatttgaacagttggcagctttgcagatagagtatgaaggtgtcccttacaaaccagaaaacgtggacttgaatgacgtcctggtgccaa

SEQ ID NO: 252711 - DNA, 389 bp, Gossypium hirsutum
  unsure (1)..(389): unsure at all n locations
gtatgttccgcttctgaactactttctggctttctgtatctaattcagtacttagatggtttgctctcacactgagctcgattagctccccctcatctgtttcctctttcaggtatagttctggattctattgatggacttggtacacggaggtcttagacagtctcagtggaaatggattatcagtttgtgatttccaattcttatatttggtttttgtactgtaagactttataaaactatggtacaaattctgatttaagttttactcattctaattntgaatttatatactaaacttaactaaaattgtactgttcaagttttatgtgattaaacgttttgatacgaagtaataatttatttgtggaaaaatttacctactatca

SEQ ID NO: 252712 - DNA, 405 bp, Gossypium hirsutum
atcggcgagtcacgatgatggcggccaccatcctgtggtgagctagcggattccctgcttgtctcgccgagccccttgcgcctcctgcagactcagtggctggcgctcggcgcgtgaggaagcacggcggcccgagctcgcggggaaggccgcagtcgcggaggcagcggcgcggtccggggcacgggctgggggagaggccgctccgctgggcgaatgtgacaagcccccacccccaccgcctttctccccagagcgcgaggagcgcgggcgaccccggggccccgccaggccacagaccccgcccagcggccagcacccggcgcatgcccggcagcagagctgcgcggcggcaccatgcaggtcaccctgaagacccttcagcagcagaccttcaaatagaca

SEQ ID NO: 252713 - DNA, 393 bp, Gossypium hirsutum
  unsure (1)..(393): unsure at all n locations
atagggagttgggtgaggacgttacagatatccataggaggtcattttcaggggtaattcaaaagcattctgcaataaagacttcatcttcatcatcaacatcttcatctggttcttcttcttcttcaacatctttttctttaagttcaagtggattctgcgatttacagttgctgaaaaggagcaacagtgccaattcagagattgagaattcaattgaaggggcaattgctcattgtaagcagtctcagaaacttggggtctgttcactttctgcttcaaagatttctgtttgtggggaccaagaaagaccagaactttgcagcatttgaatgtcaaaaaatactttacaaagactggaaatccaccataacangaagaaaaaaataaacc

SEQ ID NO: 252714 - DNA, 378 bp, Gossypium hirsutum
  unsure (1)..(378): unsure at all n locations
atgcgtctcttgggtttgctgagaactcacgggctccagctacctgacgatgaccaccacatttctgcaaacttcttcctccacttttgggggtggctctacccgagggggttcccttctggctgggggaggtggctttggtgggggtagtctctatgggggaggtggaagccgaaatatctcagcttcttctgctaggtttgtgtcttcagggtcaggagggggctacgggggtggcatgagggtctgtggctttggtggaggggctggcagtgcttttggtggaggctttggagggggcattggtgggggttttggtggtggctttggtggtggcgatggtggtctnctctctggcaatgngaaaattaccatgca

SEQ ID NO: 252715 - DNA, 377 bp, Gossypium hirsutum
cggacgcgtgggcttttatctcttgtttcgtggccattgtttctttctctctttggttcaccattttcatttgttctcgcagagctcactcagcggcacacatgacttttaccagaatttcccttttctctctctttttctcctctttctttttcctatcatcaaccctttcttctcatctttatcctgcttctgcaactacttctgaaaaagatggcaaaacgagatctttgtattcagaaattttaagggacgaggcagttgcaaggcttaataatcttggaaaggtgagtgatgctgatggctaccttgagagaacatttatgagcccagcttctgtgagggcaggctttcttattcgtgagtggatggaggat

SEQ ID NO: 252716 - DNA, 377 bp, Gossypium hirsutum
agccattggaatggttaatcatgatcattttggtgctatgtatgacaacctctagttgattcatggaaaaccatgaaataggtaaagtttaccttaaaaatagatgctgacagcagcagtggtgtggatttgaaaaatcactaaaaatagtaggaatggaattaaatagtgaataaattatgtaatcgaaccttgatgaatctattttcatatggaagaaacaaaacgatcatatgagtcgtatgttaagagatatttaagtttttgtgaaacagggccagaacagtttctggattccctgttccgacttcggaaattcattatagattaaccagagataattagaagtcattccatatatttatagatttattttc

SEQ ID NO: 252717 - DNA, 397 bp, Gossypium hirsutum
cggacgcgtgggttggaaataatttggaggcacaggaaactttgtcatccaaaaatgttatggatgcccgtgatacaagatgcaatgcggagattggtagtcaagttatttgtaggccggatttagataaaagtagtggtgagtccattgataaaaattcttgtttagattttagcttcaactctgaaggtctgcgtcaagttcctcttgacttgggttctgctggaaagccttctatcttattatttccaaatgaaaacttttctgctaaaaattctgcatcacattctgatgcctctcaatgtgataaaatttgcaaccaagataggttgtcagcgacacttgcttatcatgggaatgaagacaaacaggctaacaatgcttgtagtggacatga

SEQ ID NO: 252718 - DNA, 389 bp, Gossypium hirsutum
atcagctctggccacggcgcttgacgtgggcttgtccaactggagcttcctctatgtcaccgtctctctgtacacaatgaccaaatcctcagctgtcctcttcatcttgatcttctctctgatcttcaagctggaggagctgcgcgcggcactggtcctggtggtcctcctcatcgccgggggtctcttcatgttcacctacaagtccacacagttcaacgtggagggctttgccttggtgctgggggcctcattcatcggtggcattcgctggaccctcacccagatgctcctgcagaaggctgaacttggcctccagaatcccattgaacaccatgtttcacctgcagccactcatgttcctggggctcttccctctctttgctgta

SEQ ID NO: 252719 - DNA, 377 bp, Gossypium hirsutum
cggacgcgtgggcttgaagcgaaatgagttcctggaactcaaacaagggaacaagactgtagcagaatacgaacgagagttcgtgaggctaaatcagtacacaactgaatgggtccataccgagccagaaatgtgtaaacattttgaggaaggtctaaatgaggaaattaagttgttgattgggatcctcgaaatacaggaatttgtcgcattggctgatcgggccaagaaggccgaggagcttaacaatgaaagaaagaaagcaagagagaggcccgagtcttgagcaagaggtctagttgtaaaacactctcgtttcccacaaaaaatcaaggagccagcatgaacgctccatttcatcagtaggatatttgggt

SEQ ID NO: 252720 - DNA, 266 bp, Gossypium hirsutum
ttctagatcgcgagcagagcccctttgttttttttattttttttttcttttattttatttttttttttttttctttatttttttttttttttttttttttttttttttttagccggatttagagaaactaaaagtaaagccatttataataagcaagcttaaaatttaactttaactgtttaaggcagaaaaaaatccttttgactcggattacccttgaaaggcttctatttttttatttacaaatgaaaacttttctttttaaa

SEQ ID NO: 252721 - DNA, 227 bp, Gossypium hirsutum
cttcgtaccacattgatgatgggcctaatgacctcggttctgaacctaatggggccccctgccaccatgatgatgctggccctttcatgggccgccctgggccttatcaatgcatgggaatggggttaccacaccctatattccattgagggtatggatgggcaaagtggcattattaccggggcctcttctgggattggagagcgaattggatattaatattccaa

SEQ ID NO: 252722 - DNA, 316 bp, Gossypium hirsutum
cggacgcgtgggctggctctctcactctatccctttcctcttgttcttatgcataggcagggacgcctccaaccagctatactactaagtcattactcatcgttactgttgctaaagtatgcgcaagactgggtcctgctattgggatatattcaaatctgcactccttatactttaatagtcgctcatgaatatcatgaatgtaggcacataccttcgatttatctgggatacttttattacaccatcttatgattgatcaagagtctacttcaataacgacttttttgcaacgcatgtctatgccgatttgggg

SEQ ID NO: 252723 - DNA, 303 bp, Gossypium hirsutum
cccacgcgtccgcccacgcgtccgtccattacagccttatgcagagaatagagagcatttctattccctctcctccccaccgaatggtcattcgttgtttggaaaatcattcatctccccaattttaccctccccaagttctcaccttccttctttcctttcttccttaaactccaaccagtaaaactcctctcacttatctccttctgattttgcttccttcaccctcatcggagtcttcttcaggtactgtagtagcacggacgaataaagttgcagcagctttggcttaaaatagctatg

SEQ ID NO: 252724 - DNA, 326 bp, Gossypium hirsutum
atgcctgggccctacttagctggggtggcagagggcgagaggctctgtgctgcgtcccttctgagggtccctttgcagccccagtatactgtgtgtgcaccagccccagctggagccgccagaaatgctgccggtttaggcatatgtcctgggtgcaggaggcctggggcgccttcgggccgctcccctgagattctggggcagtcagacgatgtgggccctgggcgggagcagcccacctcagcagcactgccactgcctttggccacctgaggtgacccccaggccctcccgccctgtgcagtgtacctctgtgtatttgtaca

SEQ ID NO: 252725 - DNA, 394 bp, Gossypium hirsutum
atgacaggtttaagattgaaggacaggatgtatgatataggagacatgaaatagagtgaagagtcaaagataattttaatagttctatcttaaaagttgacattattgcataattattaattcaattaggggctggtttggagaaagtgatgatgactttgacattggatatgtggagttttgtagcgctatagagcacctagtcagatacatcaagaaggctgttgaatatgaggttgtagctgagaaagaagtagggtctataaatgcactgtcatgtatagtaaccactagtcacatgtggatttaaatgaaaaataattagattaaataagagtcaaagttcaatttctcagtagcattagccataattcacatgcttagtgatcatgta

SEQ ID NO: 252726 - DNA, 234 bp, Gossypium hirsutum
gactcacatggtcaagagacacacccgtgtctcaggctgtgtagatattcgaattagggacacacggccgtgtctcagcccatgtttgtacctgtgtaactttctgacttggtcacatgaacaagtcacacgcccgtgtgctgggccgagtactcttcgaagtaacatcacacacccgtgtgccaagccgtgtgctaagccgtgttacaactcgacttttaaccctttaaaaac

SEQ ID NO: 252727 - DNA, 377 bp, Gossypium hirsutum
atgtttgtctgaacaaaatgctagactttctggagtgataagctggtgacaaatattctctctgcagctgtaagcaagtcacttaatctttctacctcttttttctatctgccaaattgagataatgatttaaccagttagaagaggtagtgtgaatattagtttatattactctcattctttgaacatgaactatgcctatgtaatgtttttatttgctcagttggctgtttagaagtcactgaacaaaacctacacacacaccttcatgtggttcagtaccttcctctctctatcagtctatttccattctttcagctgtgtctgacatgttgtttgtgctctgtgccactttaacaactgctcttacttttcca

SEQ ID NO: 252728 - DNA, 390 bp, Gossypium hirsutum
atgagacagccgagggcgccgtgcgggctccggacactagctgctccgcccgatccccgccaactgtgcaggctgctgacccgcagcggcagctgcagcatcgaggactcgagcgccggcggcagcaacagccgcggcgaaagcgacaccatggatctctcctttatggccgcgcaggtcaggacactaaacgagattaaataatttgcccaaggacatgccgtttgtaaggaggagaactggatttcaaatctgagtctgagtgtctgcaaagccactggggtttccaccttattgctgcagcctgagaaagatttgatctgcccatgatgggaggagctttcatggactcgcccaacgaggacttcagcaccgagtactccctgttta

SEQ ID NO: 252729 - DNA, 380 bp, Gossypium hirsutum
agaatcctgaatgagtattttttaatagaaacaaacaagaacatcatttgaatcctgtatgaagagataattaatttttagtgaagaagggtcagaactgtcagacagcagaactggggtgaatttaaagaataaactgtacttattggctaaaccaaaaattctgaaaattttatagtaagaagatatatgagtctagtttcagggaaaattaactgatcttaatttggagttccttagcttgagttataaataatttagtgactatgactcaaatagacagctttgaataaactataaataataatagttgaattatagagaatgttgcatatgaacatgaaatgtattaaattgataattaaatttatttatttaga

SEQ ID NO: 252730 - DNA, 377 bp, Gossypium hirsutum
cccacgcgtccgctcacaaaattcattatatctcaaaatttacaaatccattgcttacaatatttcttctataagaaactaggctcaataagctttaattccatatttttttatcttctaattcgatttctacaatttatggtgatttttcaaagttagtctactgctgctgtccaaactgtttttgtgcaagctgtttattaccatttttcccctaagcttttaataaatgataatttcgtacctactcaattagcctctcaattgagctgatttttctcaattaacattttattctatcaccttaaactagtttaaaacctttaggaataagaatttcagcaatagactttaattctaagcattttcacaattag

SEQ ID NO: 252731 - DNA, 395 bp, Gossypium hirsutum
  unsure (1)..(395): unsure at all n locations
atagcctttccatttagatatttttaaatctccccaggtgatactataataatatgcagccaagattcactaactttgcctgagggcacccacagtttctttgtagggcttgtggactcattctttctcttttctatatgcttattataccagttatatttagtcattgaataaaatctagaaaatactgattaatttttggagggtagtcataattattccacagagaaataaattttgttaacaattggctgtatatctttctgggatttgtctacatacatacacacaaataaataatcctatgcttcttctttaatcaaaaatgatatacatgctgtgtatcttttatctttgactttnttttccatgccaacaaattcaaataagcctat

SEQ ID NO: 252732 - DNA, 296 bp, Gossypium hirsutum
ggttccatgtgaacggtacttgcacatgtgtatggccatcctaatatactgaacctgaccgtacgccagcctgtacacctcgagcctgctatgggtagatcacttatatacctggaccgggacccggtggctgacgcaaacgatagggaaatcggagacctttgctgcgcctactgaagagtgatccatgctgtctaacatgctgcgctccctggataccgcttaacccaaagttgattacatctggcatcagatgaacaaaagcaacctattttccctttcaagacctacgacat

SEQ ID NO: 252733 - DNA, 383 bp, Gossypium hirsutum
atttcttgggtagtttagatcccatgtcacctcagctgatattatggcaagtgacatcatcctctcttcagcccctagtgctattctgtgttgaacacaattgatacttcaggtgcttttgatgtgaaaatcatgaaaagaggaacagatggatgtacagcattttcattcatgccatctgttttcaaccaactatttttgaggagttatcatgggaaagatcagggcttttcccaggaatatcccaaacttcagaaacaagttattctcttcactcccaataactaatgctaagaaatgctgaaaatcaaagtaaaaaattaaagcccataaggccagaaaactgctatcttcctctaaatatgattactttaaaataaaaa

SEQ ID NO: 252734 - DNA, 398 bp, Gossypium hirsutum
ataccatccgtgtgaatctagcagatttgagtgtgaggagctaggcttggattgcggacctcaagttacaattgatgtgtccttgttttgtagtaagatgcacatcctgaaaggtttcacccagcagagaacaatttgtgggggtagtcatggggagatatccgaggccttttcttttctgtgggggtctggctaatgtctaaggttgtgagattacagctgtcattaggaagaaggatgacaatattgcttgactcagtctccaggcttaactttccctttggcataaagagtttgggggtcccaagatttctgttacagtacccaaggacttgctaatatctctggggatttcaaaacagatgggccacactttgaaacaagctaccttaccgaat

SEQ ID NO: 252735 - DNA, 193 bp, Gossypium hirsutum
ctactctaactcactttactgtaagcaaagctggctcgcctgcacgttccggaaattaattctcgacccaaccctcgcgtccagtcttttaaaggaaggggtaaatgtggtggagaaaaattttccacacaatgaatgagaagattttcatcatctacattagcaccaaagagcatttcaacatcagtttttc

SEQ ID NO: 252736 - DNA, 397 bp, Gossypium hirsutum
atctctggaaagctccgagttcacaggtcttacccacgcacatgctcagtgcttccaatcagcgattaaggccattgcttttcatccggagcaggcagcagggattcccaggtatccaaagcaaccaaaacaggcggtgtaatttaggactgaataattcatggctcggccactttaagtgtggaagcaaaactgaccccacagatacagaaaactaacactgcttattgggagacactagtgtcaccctgtctagttctgctccccaaattaaataaaagggaaataaacagttgagcacgtcccatcagcctggagggaaacttccgcccccaactttgtaggactgacatctgaagacgtcagagactgcggtcacaaccgtcggtacctcctc

SEQ ID NO: 252737 - DNA, 158 bp, Gossypium hirsutum
gaaaagcagattttgaaaataccttagcgtgtcctgaggctcaactcatctctcgcaatatgagttgatttttgaaaacatgaattaaaacagaaattggaaatacctcagcatgaccaaggctcaactcacctctcgcaatatgagttgattttttg

SEQ ID NO: 252738 - DNA, 388 bp, Gossypium hirsutum
atgggctggatatggcctactttcataggcttttcttctttcaggtttgatgtaagcatgggcttgcatcgcccaggtacatacttttacttattgtgggataacctggcactagtaggcaggtaaagtcacaaatttggtgtcttttcaccttttgactgttgacttaatagctcctctcactctggctggagatacttcctgcctcagatgaggagccagaagaaacaaagcccgacttgaatgaactcagctcaagagttctaaggaccagcattctgggggccattttctctacaagcaaatggaattgcttttccataacatccaaattgtaatgtggctgctgctgaaggaggaggcagcaacgaggtcctgcggtacccat

SEQ ID NO: 252739 - DNA, 378 bp, Gossypium hirsutum
cccacgcgtccgcccacgcgttcgcggacgcgtggggcaaaagtgtgatctgaggagggcattgagccagaggtgataaatagtgaaatagtacatgtccatggccgcgatgaatattgattgcgaagtgaaatgtaaataaggtttaattttatttgtggaccagtgaagacgaaaggttgtgcataagcaggaaactaagtttgaagagttgcaaagagtgtatacttttattctaattggaaatttatatacagatgtatttaggactagtttgtaaggaaagaccatttgtgttttgctatatattctgcaaacgatcaagtctaatgacgtggttgaaatctttctcatgaagagcctggttgtgcatctgat

SEQ ID NO: 252740 - DNA, 324 bp, Gossypium hirsutum
aacaaattgatgtgcataacaaactaacagttgaattgactcctaacaatactagcagttgttactttgtactttaacattcacccatcttcctgacgggtaaaacctgaagaagacttctaaaccgagcaaaagatgaaacagataaaggtttaataagattgtcaacaacctgatctcacgcaggtacctcacccacaactatggacctattagcaactctctcacgtacaaagaacaaatcaagctctacatgtttaaacttagaatgtaaaacagatttgcagcaactgcgactgcacttgagttgtcacactagacaat

SEQ ID NO: 252741 - DNA, 401 bp, Gossypium hirsutum
atgccagatttaagagtttaggaataagagcaggagaaattaagcggttcttgcaaaacagaagcgagggtgctacgtttcatttgcgttctgccttccatgcggacgtagttacagaaatgacatcggggtgcctgtgtgtatcctcatttcagagattccagtgtaaagggtatgttatacacatactggaatgtgcttttcagaccaagtaatccactttttcacttgtaattactgtgagtgactttggggcaacacatttcttcctgggttttgcctaccttgaactcctcttttggtatttcttggagacattaaagtagttcaagtagaaagttgtcactgtttccagggcaattgataggtaaaattccttgtgttagtaaaaacactaaaaa

SEQ ID NO: 252742 - DNA, 311 bp, Gossypium hirsutum
tccacgcgtgcgtaagaagatacgaaataagagaaggagagatgggcgctcaaaaggacccagaagaagaactgaaagaaatagcagcttggctaaccacaagaaactagaaacgatagcaagcaagctaataaaattaataagctttgtagatggccgccgcctcatcgtccacacctttttttggaaccagggaagaaaatcaaaaaccagatgatgcaagtacaatcattcaccgctacacccacttcgtcaactgctccaaccactgcacctcagaagagaaagagaaatcaccctggaacatcata

SEQ ID NO: 252743 - DNA, 380 bp, Gossypium hirsutum
atcactgggatacacgtaggattttattttgtaagtgtcactgtgaaaacagacaagtaagtattaaaaacagtttatctgtaccagcttctactctgaatgaggaaatagccccagaaaggtgaagtgacttatgctgagtcccacaggtaggtcctagcaaagtggggactaagtcaggacccctgcatgcctgtgccccccactcccatgtcattttaacaaaggatgttggagcaaacagacatctccattttgaggaaataatattcctccataatgaggaaacaggtaaaatggctccaggagtgccaagatggagccaggctggaaatctctgaaagccagtcctgtggacctgcctcatcccagccccaccc

SEQ ID NO: 252744 - DNA, 373 bp, Gossypium hirsutum
atctctttcctccttgtcttacaccatcattaagacctgggctagatcacctacaacatctcacttagggaaggcaatgtgttgccataaaaagaccacaagcttttgagtgaggcccgaatttgaatttcagcttaatcctgtgggatttatggtgggggccctttcagtctcaacttccacattagtgagccggggaaatgatacatacttctaagggtttttagggggattaaatgaagtatacagttcttagcctcaggcctaggattaagtaagtactcaagaaacgtgcaggttttctacttccatgtttcttttctaatcttcaaatggaattatagaaaccgtgggtcagaacacattgctttac

SEQ ID NO: 252745 - DNA, 377 bp, Gossypium hirsutum
atgagttaatgcaaatgaagagattccgtgggttgcgctgggataagtgaggttagtgtcttagaccacactattgtttgaaggtttatctcttctagtcatgctcttccacattgtagacagcctaaagagagttgtttttgagctgatctcacggaagtacaaataacttgggagatgagggacaaaagatgattctgtgctgtcaaggcagtaagtctgaagaaaggaccatgcttcttatattatcttccaccttgcttaaaacagcccatagctttgagttgacatttttattcttggcaggtagcctactttatggaggtaaggaatgaagacttacccttgggtcattctctgtactgatgcattggtct

SEQ ID NO: 252746 - DNA, 371 bp, Gossypium hirsutum
cccacgcgtccgatttctctaacaaatccctattcaatacttgttatatcaaatagttcatgatccaatctaaattttatagttggaatactatttccaataaaattggtaaaaacataagattgaagaaaatattcagaaaaagtttttctaaattgattctgctgattgcagatcatatcatttattttgttgaatatttccaatggacaaatctgtctagatttgttatgtaaacagattctaaataccttattcataaaagggctgctttttcctttatgaataaaatattgaatagtatcaagaagattatttatctccttaatatccattataaagagttggaattcatcccaatctcgatataa

SEQ ID NO: 252747 - DNA, 375 bp, Gossypium hirsutum
  unsure (1)..(375): unsure at all n locations
attgctaactttctgacacagtgctctagaaccctggctgtggtcctgagcactgatcagcttagctagaccatggttgactcttcttggagattttcacttggtcctagaatgtggcaacgtagttgtgctcgctagaatgtgggaccaaattggcctcatgtgtttagtccagacttctgcttttgagagagggctgcactttttaatggtatttctaggggaggtggtaggctgcatgtgccacttggtcttgtgagtatgctgacaccagaaactcanagccagcttgtggcaagcagttggggtggggggtctctgacttgctcangacaaactaggccagtgggtttcaaactgcttggcagagccctg

SEQ ID NO: 252748 - DNA, 372 bp, Gossypium hirsutum
  unsure (1)..(372): unsure at all n locations
atttctccaactgttatcctaatctagcaaatgaggactgatccctaggcagaagtggtgtgaggaattaactctggaagaggaaaatctggctggctttccaatgctaagataggtttgtatttcaccccgtggccaagctacagaaattctgagattgtggcagaatttatgcaaccagcaggggaagaggcctcttattgcctaaacacaaagttacactgagttttctaccgtcctttgcctgttgctccctctatcgtgtaaagatctgggaaggatgaaaggcagagactgcttgtcatgagctgcactcttctctttttaactagtcattgacaattggaagaaaattgactntaaagaagtttc

SEQ ID NO: 252749 - DNA, 284 bp, Gossypium hirsutum
agagtattcaccaaccttcgaccctttaagaggtttctaggcaccaactgaaaaaaggtaagcacttaagttaaccaataaaggaaaacaccactctaactcttttcttgaaagttgctttggaaagaaaagagtttgagggtgttttccttgtaaatttgctaagtaatgattttaggctttgcttaaaattcactatttataatactctctttccctaattgaaataggttttaacaattcatgtagaattgatacttctttaaaataaggactaaattgaa

SEQ ID NO: 252750 - DNA, 238 bp, Gossypium hirsutum
gatcttaatttggctttaggttagcaaaagatctattgtaagctcatattagaccccaaaaatgattatataacacaatacaaatatgaattatacttaattgtatgtgtaaatgattgtatgatgtataattgattggagttgctccaacaacgaatgtaacatcctgtggctccgacccgatgattgggtcaagtaaggggtgttacataatccatatgtgatctcaagtgaaaaa

SEQ ID NO: 252751 - DNA, 248 bp, Gossypium hirsutum
tcccggaattccccgggatcctgtgtccacttcgtggtggcaaatcacacttggagaactcggtcccaagagcctactgatagctgcagcccagaatgcaagacttgggtcacaggctccctggctttacccaagatctgtctctgcccccataccttgttggcctggggcacccccataacccatgtccccaggccctggctggaacgtgccatgcagggaagacaggccccaccttgcagcctcct

SEQ ID NO: 252752 - DNA, 356 bp, Gossypium hirsutum
gagagtgttaagcatgataagtcattttttagaaattattattttaggttgcctcattgaactaaaggattatcttgaaattttaaatctgcaagtctgacatcaaaaccataattttttgtgagcttttgagcctatagagcatatatgttatttcatgctcattttatttttagttgtgagtatgtcaacttgatttgttattatagaacttgcttcgattatgcatgtcaagaccacattattgatttgatatactaagatgatagagacacttaggatttaacccacctaacctttaatcatcttacttgttgtattaatccctaataaaccccgctgatcctaacacattt

SEQ ID NO: 252753 - DNA, 343 bp, Gossypium hirsutum
aactctactacgtctaactatagggaacgctggtgcgccttcatgcacctccccaatattcccgattggacccacgaccgccccaactcggggctatgggaacccatcgtctgcccatacttacgataggacgaggactaggacatagggagtgtcctagcggtgtaacactcacagtcggccgtggaagatcacattctggtgcgcgtgcccgagccaataaatgaggtcctgcatgaggcgctcattgaatctacagacctgatgaccacactttacaatatgcttacagaactttgttcacttcaacgatggtagactacactcttggggtggaaagctc

SEQ ID NO: 252754 - DNA, 317 bp, Gossypium hirsutum
taaaaattagaaatatgggaattcatgtctgggagtactcattagagcatttaaacagaaagctttctctcaagcactataacgggaaactcattaagccatgtaacgagaagcttatccaggcttaataacgggaagctcacaaagagcctatatcgggtagcttcaaagagcacttaacgggaagctccgaggagcctttaacgggaagctcacaaagagcctataagcagaacgcttataagagcgtgggggtggctacaacatatgcatatgacaactagtcgggatgctcagcatagcattttacgggaagc

SEQ ID NO: 252755 - DNA, 392 bp, Gossypium hirsutum
gccggacttcccgggatcatttgtacagtggtctccttaagagggtctggtgcaaagatgtcaccagtatttgtgttatcaaccagacaaactgagtgaaacacatgctttacacaacaaaaaaatccatgcccacattcatggcttacagtgcagctctggctgagtgattcaggttcctgagatcccatcttacaatgcagcttgacttaccaaaagtatccaatggcccaatgccttcaaaccaagttttttcaattactatatttaaagttatacattcaagttaaaatatacctaggacattctgattatagctgaggctttagttctatccagagaacaagaaaaactttttgaaaaaggggaggaatcaatttcatacctgatca

SEQ ID NO: 252756 - DNA, 267 bp, Gossypium hirsutum
atgggttctctacttggcaaaaactatcttcctgctgactccttccttgaagatcttttttttaaatttctcgaaaccccttgtttgcccactatgtgtcaatacatcaaggtatttcgccacgctaccgcccaggatgtattgctggattcaccaaattgattcctgtcccacttgaaatagctggtgatctcttacatgtcactatgcactgatgatactttgcgatcaatattgcaaatgcgctggctaggcctcttatataca

SEQ ID NO: 252757 - DNA, 273 bp, Gossypium hirsutum
  unsure (1)..(273): unsure at all n locations
atcgcccccnngaaaccagataaaaatgggtctctgcgtcgaaaaatggggataaaaaacttctttttttttttccatggggagaaaagaaagccggaccttttcatatcttaacgagccgggtgttattatcacttacaaccacgtgcattcgtgagagcagcacatgaaatggccttctcagagaattcatgacccccaacaaacccgagaggggccgtgcctggagacaaacctgggtccagacctctgatcccgaaaatgtttgcgtgc

SEQ ID NO: 252758 - DNA, 349 bp, Gossypium hirsutum
cccacgcgtgcgggggcagggtggagtaggaatgcatgcactcaacatccatggaagcggtagtgtttttcaaaattattcattcatagtggagtagaatatatgatggagcaaactatggcaactatgaagcaatgatggatttaataatattcgcttctgtcccgctcgactactattcctagagatattagtcatcaatatataaggttggagaaggatgtatgattgaaagctttatcaagaaagaaatttaccttttggatgtcaactagatgaagaaacacttgttactaaccgttcctttttttttttttggtaagtagtaacaatttgatacataaatttt

SEQ ID NO: 252759 - DNA, 334 bp, Gossypium hirsutum
taaagttttgatttcaatcgacaagtaagatttaattcttttccgctatgacatttcctttgaaacttgaaattttctaaagataatcgatttttgcaattttttttgaaaagaaaatttatagacactatttggattttcttaagcaaatcaaaatgacgattttaaataatgacgtttgtcaagagaaaatagtaaataatttatgtgccatcatcctggccaatgtgatcttcgagatccgatcataatgtttaaatcgagtttagggggttacaagtttattgccgaattatttaaagtttagttttataaattaaaaatctcctccaaa

SEQ ID NO: 252760 - DNA, 365 bp, Gossypium hirsutum
cggacgcgtgggtgggagattcatacaccgactctgaattctgaaaccatcctctttctttatatagatatatagtatggctctcttgtagttatcttcatcaccccacctccggcccctttctcgcgctcttttcttttttctttctttttcaagccatcttcttctacctcttcttattctcttggttttcagcatatataattcaactcctccttcagtaatggtggatcttcaaactgtctgctgcatgtgcggcgacgttggttttcctgacaaactcttccgctgtaacaagtgccaccaccgctttcaacactcgtattgcagcaactattacagcgagttggcagagccaattggac

SEQ ID NO: 252761 - DNA, 350 bp, Gossypium hirsutum
tcgcccacgcgtccgtgacattccgaaaggtggtcccggttaattcaggcaacaccaaggtaatcttctcagtggttttggaaggaacttctttgtgttatgtaccaaaggtcaacaacagagaactgctttgttttatggaggttgtttgatggtatatcacagattatgcatttaatttgtagttgctgtattcaatctccatcactttctgcatttagtttgtagttactgttttgtggaggctatatgtttttactagcgcttgccatcatggtcagtacgaatggtaccgtttggttcgattttgaaaactaagtttgtggctaacgtgctttttagttatttag

SEQ ID NO: 252762 - DNA, 370 bp, Gossypium hirsutum
  unsure (1)..(370): unsure at all n locations
atccagcgtgtgggcccctcccgaccccacgggggctgcacaggctcccacctgcctctgggcgtgacccangcacaggaagctgtccagggaaaggaatgcccatggcagtcacagcacagtatcatccttggagcctccatcctgcccatctagaacagactagaacattccctggaggaatccccagcctagctgggaagggcgggagctcgggttccagacgtacttcaccttcccaccccgatggcgggagaagccagggcaaggcggcaatcgagagacataccaggccttgcgtgggatctcactttaatggagaggacgtgctggcctctggggcacggctctcagccttgggcaagcccct

SEQ ID NO: 252763 - DNA, 306 bp, Gossypium hirsutum
  unsure (1)..(306): unsure at all n locations
atggagagctggagcaaggactcangcggaggcagaggtcagaacccaagccctgtccccgaaggaagtgtgtcccatcctaactactccgtagctgaggcctggagggaagtcagggaccctgggactggctctcctggccttgactcatgactgttccggagacccaaatgcaccctgagccaccagacgcaccctgagccaccagacatgggtgttaacacctgaggtcaaacccctgatgcttccgggtgctctggaggaagctgatcctccctcccatctcctgttttttgtgccagcctg

SEQ ID NO: 252764 - DNA, 360 bp, Gossypium hirsutum
  unsure (1)..(360): unsure at all n locations
attgcctcgcttcctccgccactaaaccagcgggggactgacagcccgaggctggtgcagaagcgggtgcataagccggagagggaacgcgcgtggcgccccagccgccacctcaacccagccacttccgcagctgcccgggcgccgctgcatccggactactctgcggtccacccgctgcggccaaaagaagagagactccggggagtgcggccctgcagcaccctggccttcacagagcagggggcggaggagcccangtgccctcggtgcctgcgcaacctgagccccggccgcttcgcgccttatccttggggctccccctggcggttattccggtccctgcaaggaaatgtgccc

SEQ ID NO: 252765 - DNA, 354 bp, Gossypium hirsutum
gtactattgtgggtggaaaaatggtgaagatagatgaccctcttgattatattttaatattcaattcgctaatgtcatcaattaccaaccctagtcatattttgactttttgactcctcatgtctctatggtcggctagctcgtcttttaagggtttaatttccctttaaaaacccttaatttaggtgctctaagtattcgacaccctcagctatcaaaataagacttttgcactttatgcgatttaggcttttttcacaattcagcataaaatcactaaaaatcattcaccaaaattgtcatactttcatataatcatgccgccacacataaaataatcttaaaaataatttc

SEQ ID NO: 252766 - DNA, 265 bp, Gossypium hirsutum
tcaaaaccctagcctgtgttgattttccctcaaccgatcctaacatccctctcttaagcaccgatttgcctctatcaatgttgacgaacagattcgggcttcgagagacgataatcttagccgtgaaattccttctcaactctaatttcaaccaaacagatgggatccccagtatttccgtaagtttgttaatcggttgcaggaggagccagctggaggtggtggcgcacatggggcgtacagaggggacgaagaaaccgtgcgt

SEQ ID NO: 252767 - DNA, 288 bp, Gossypium hirsutum
gtcacctaacaccttcggtttattcatctaagcctctaagctatcttggtcttctcaaattttgcgcccaaaacaagttttttttttctttccaatatttgaatcaactcccttttcactaaccctaatcattcgtatcattttcgcaggcaaaacggtgttgaagcagagagaagaagcgggattttccccctcaattgtgcccaaaataatttaaaatggctggaagaaaccgcattcctcgcgaagccttcaatgaccggcatggatttcctcctgaaagatctt

SEQ ID NO: 252768 - DNA, 332 bp, Gossypium hirsutum
  unsure (1)..(332): unsure at all n locations
attggacaactcaactcctgacaagatgtcctgccggcagaaccagcagcagtgccaacctccacccaagtgcccctcacccaagtgccccccaaagagcccagcacagtgtctgcctccagcttcctctggctgtgccccaagctcccggggctgcggttccagctctgaaggcggctgctgcctgagccaccacaggcgccaccaccgatgccggcgccagaggtccaactcctgtgataagggcagtggtcagcaaggcgggggctccagctgcagccacggttctngaggctgctgctgacctggatcctgatgctgagacaagcaat

SEQ ID NO: 252769 - DNA, 368 bp, Gossypium hirsutum
ctttgtgactcacccagagcctcgccttcttctcttcgctcttgcgctgcttcgcgccgtctcattagtgcctccggccaccgtctgaagctgccgtcgtgggatatctgaggtaaatttgtgaacaaagataagcttgcggtaatatttgctgcaagttgttgaaagtttactgtcagccactcaacagatggagcaggattgcacccattggacttgcaacttgtgtgggaatgtgggaatggctgatggatcagatggctacttctactgcttgagatgtgggtctcaggctgatgacatcattgatacgggtgttgctgatgaggattttattgaaaagggtactcagggtggtggtgcccttt

SEQ ID NO: 252770 - DNA, 370 bp, Gossypium hirsutum
cccacgcgtccgaaagcgtggctccgaaacaatctccacttgcgaaagtctcactttggaataggatctttcgattataagaacataaaataccctaagtgaaaactaagaatgaaataaaaaacctaagaataatttttgtctccttaaaattgtgtgtttaaactgattacaatggcctttatataggctaaacttgaaatgttaaactgcctaaattgtccttgaattccttgagttcgactaggaacatacacctaatttccttccaaaacatcattatcaattgcaagacttttttgggctgcgtaggtgctttgttgcaacacatggggtatgtcacgagactgtaaggagcgtatcacgacat

SEQ ID NO: 252771 - DNA, 374 bp, Gossypium hirsutum
atggaaatctagaagtagtcctgaaggacagaaactaaactcttaccatatgtttggtaaggctccagactccagataacagtccctatggaaagatggcatcaaaacagatagatctatatatatatataaatatatattctattacattttcagtgagtaattttggattttgcaaggtgcatttttactattgttacattatgtggaaaacttatgctgatttatttaagggggaaaaagtgtcaactctttgttatttgaaaacatgtttatttttcttgtctttattttaacctttgatagaaccattgcaatatgggggccttttgggaacagactggtatgtaaaagaaaatccattatcgagcagc

SEQ ID NO: 252772 - DNA, 328 bp, Gossypium hirsutum
gagattcttgggtgctatttgagttctccttatgtatgtatgtgcatgagtattcggtcatgttatagatccatgttgaaaaatgtgaatgctatatgtgtcatataaatgtacttgtgaatgaacttgagaatatctaaattataggttggaggtgccgaatgtagtgttggatgagttttaaagaataaaaatttatgtgactaaaggttaatgacattcggccaaaggcttgtgtgctaacgaaatcggcataaatgctgttcgatgtgttgaattgagtaagctagatgttggaacacttaacgattaggcatctctatgacat

SEQ ID NO: 252773 - DNA, 374 bp, Gossypium hirsutum
atgcataagccactgcgcctggcctaaaattaaatggttacaggcacataagtaacacttcctggatccaaaaatgtgcattctgcatttcgtattaaaatgaaaaagcaagtgcttgggatacaaatatctgcatgaaaatttaaagactttattcctgactggtatcatttttagtaagcagttgaacataacttgtagtgtgaatatggttaaaacaaaggacacctgatgtctgtgaaatcttgtagtgtgaatatggttaaaacaaaggacacctgatgtctgtgaaatcttgtagtgtgaatatggttaaaacgaaggacacctgatgtctgtgaaatctgctaaggacaggtacaaaatttatgaat

SEQ ID NO: 252774 - DNA, 233 bp, Gossypium hirsutum
gtttgtacaaaaaagcacgctggtgcccctcccgaattcccccggtctggccctctcgggcgtatacgcctgctattcgagtgagcggggtcttgagagcttctcattgataacgatagtaccgtttgctgtgcgagaaaccacgttcacccctttcttcttcctgtgggggctaagcttgaaactttagctcccttttttttcacaaacaggctcaatgcaaagaattggat

SEQ ID NO: 252775 - DNA, 187 bp, Gossypium hirsutum
acgcccactcgtccggttttggtgacaaatacatcatgtgatgcacattctatcattccccaagtatagaaatttcacttttgtgcataatgaatatcacaatcacgtgcacaatctcttactgagaacttgagctgtaaacactcaacaatgtttacaataatttgcattctatcacaaaaacaac

SEQ ID NO: 252776 - DNA, 319 bp, Gossypium hirsutum
atccaaaaacaagatgaccaaatttgatctcagcctgatgacgctacaagttgtgctgtgatacagagtccttatgggtaaagcagaaagagagtgggaaagagaaccaccccactctgtcttcatatttgcatttcatgtttaacctccggctggaaatagaaagcattcccttagcgatgaggataaaagaaagtttgtaattcaacagggggaagaaaatggagatttaatcctaaaactatgacttggggaggtcagtcatttacagttagacttgtgtctttcgacttttgggatagttaaccccactcactac

SEQ ID NO: 252777 - DNA, 274 bp, Gossypium hirsutum
agccttccggaaatgataaatgttaagtggagcttgagaaatgctttgggattatatattaaagggcctaaattaagtgttattagggagtgaggtaaatttaaaggggttcttaagggacctatcgcggattatggaatatatatatggaataattatgaagtttcatattccctgtgacaacccgctttcagtggaatcagaatagtgatttttggactacacatccgcgttatatagaaaatttattttaatattattgcgtgggctatat

SEQ ID NO: 252778 - DNA, 182 bp, Gossypium hirsutum
tatgccgtggcttcaccagcagcatcagctttggtagtggcttcaggggaggatatggtcgcaactctgttccctgcctcccttactgctcagctggtagctatcctggcggtgatgggcttcctgtggacacccacacaggtgccccgcaaaaccttaacgaccagctagactcctaccta

SEQ ID NO: 252779 - DNA, 176 bp, Gossypium hirsutum
gcgacgtgggcggttcgctgcccgcgacgtcgcgagaagtccactgaaccttatcatttaagggaaaagaaagtcaatattttttactaaatccctgtaaattcgccaaaaagacttaaaaatccataattcgttgtcttcccgtaatggattttagtcagcctcctgttgaaaat

SEQ ID NO: 252780 - DNA, 273 bp, Gossypium hirsutum
tcgcccacgcgttcgtttttaattacaaatacaacaagggatttacattctatcattccccaagtgtagaaatttcacttttgtgcataaagactataacactcacgttcaaaatctcttactgagaacttgagctattaacactcaacaatatttacaataggttgcattctatcacaaaaacaccaaatgaaagtggtatcctccataatagaaaaacttcctccatcttgggaagactttaaaagaggtgtaaaacatataaaagagaaa

SEQ ID NO: 252781 - DNA, 382 bp, Gossypium hirsutum
cccacgcgtccgaccgactcgaaaacgaaataggcccaaagcaaaacaaaagcttggaaaaacaggcctaaatttatctgggtctaattactatttaagaaaagattgtatcttcaatccataaagattgaatataacttttccaaagtacgatatttttaaaaaaaatgaaataaaattcaaaccatttttaaaataaataataaaaactctttcttccttcatctctctcattctccctttcttctctcccccttttcccctttcttctactacttttctttttctctcttcctcctttattgtcctttctaacaaaccgctgccgctgcttccacacactttccagcgtcttacctccgatcaggccaactttctttcc

SEQ ID NO: 252782 - DNA, 118 bp, Gossypium hirsutum
aggcgacactgtataactagtttgtacgaaaaagcaggctggtacccggccgcaatttccgggttacaatttaccaaaccgtttactttacaaatggcttggcattagaaattttaac

SEQ ID NO: 252783 - DNA, 359 bp, Gossypium hirsutum
attgtgagactatgaaacaaaatgattatcttttagattcttattgcagatgagaagatgaagtgttttataaaataatgtattaaatgtacctattccttggcatatatgtttagatttttaattataatttttatgatgtgttggagccagcattttcctatagaaatataactcaagatttaatattgggcaacagtgggaaaatgggatttagtatgaaaatatttgctttatgtaaacctttttatgaatgtacctaatgtataaagtgaagtcaagctgtaaaaacaattagctgggaaaatgccacgttaattttctatgttccagcgagtatctattaactacacattact

SEQ ID NO: 252784 - DNA, 357 bp, Gossypium hirsutum
ggagagagtcgtccctttgctttgagttggaacaaatccatggctccatctctcacctccaattcctttctcttaaccaccacgccccgctcaagggtaaacctcaagtaccaaaggctcgcagtgtttgccaaagggtccggtcccttctctccatttcagttcgggaaagctaaagacaaccctgaagatggtcaagctgaagatacaggcaattctagtcctttccgcttcgattttggtaaattacctgatgttaagactttggtccccctcgtcagtaacccttcctcgggtttatcgtttgggaacgttagaagaaaagacccaagcactgtatttgtggctggcgcaacc

SEQ ID NO: 252785 - DNA, 197 bp, Gossypium hirsutum
gctttgctgctccacaagggcatcctggctgtcagcctgtccctgcggctgctgcagagccaccttaaggcacaagtggtggctggctgtgggatcctttttttatgcattacaccctttaggattgggcctggtgccacttttggttagtccgggggacccttgtaccaaatgggccaatctgtgctttaaggcat

SEQ ID NO: 252786 - DNA, 321 bp, Gossypium hirsutum
gctctaatagctcttttggggtgcgatcgaaggacaaaaaggtgttctagttggatgggtgggtttcaatacttgactacattcctgtgcatctatttgggtgtaagactatatttctgtactctttatgtctatgcaacacctctgttaactatcatgtgtgtatttggtgtgctttgattgtttcgtgtgttaaggtattggttttgtgttgtgtttttttctgcatatatctgcaaataaattctgctactgatttgccatctagagctcccttctgtaaatatatagttactcgtttgaactcacactaagctcgag

SEQ ID NO: 252787 - DNA, 437 bp, Gossypium hirsutum
ggcttttacccgtccggaatatccgggatgttttgctgttttgtggatggcaaggccagctttgtgtgttgttctgagatgatccaaaccgtaaaaaagctttcgcagcaaggctgctgtggccagactgtctctctagattcctcctctctaggcagggcgtctctgaaaaaaaggcagcagccccagtcatgggcttatagacaaaatccccatcaccctgggacagaacacctgggggaaggggcagtttcagcagacttaaacgtccctgcctatccgctcttaagagagcagtggatctcccagcgcagtgtttgagctctgctaagggtcagactccctcctaaagtggtttcctgacccctgtgtatcctgactaggagacatctcccagtagggacacctactgacaggagagacacctcatacaggac

SEQ ID NO: 252788 - DNA, 372 bp, Gossypium hirsutum
atggtagccagaacagtcaagagaagaatgaggattgaggtactgtagtcccccacttatccttgtttttgctctctgtgatttcacttaccctcagtcaaccaacatgtgaaaatattaaatggaaaattccagagataaataaatcacttaagttttaaacactattcaccccatttcatctcatcatgtaggcattttatcatctcacatcatcacaaagagggtgagtacagaacagtgttttgatagagagaaagaaaaagacaccatattgacataactttcattacaacacattgttataatttgttttttagttttagttttgtttgtttgtttggttggttgtttgtttggtttttaacagac

SEQ ID NO: 252789 - DNA, 380 bp, Gossypium hirsutum
cttattttctttgaactgatctaggaatcaattgatcaagtcaattcaaaataagttcaactacaggttcaaacaattttgtagctcgattcacctagtccgtacctgttcgcgggtcaacagtttttttcctcactaaatcattacaataccctaaccgattcctgatccaatcagtctaactggtcgatttagtgtagtctagtttggatatcattgaatctttgaaaattttttatatttttttaatttttttaattttttaattttaaagagtttttattttttttaaatataatcttgtttaaaattattttttaaaaattataaattataaatttgttaggttttttatttaaaatatgaaaagatagtttgta

SEQ ID NO: 252790 - DNA, 339 bp, Gossypium hirsutum
tcgaaaccccttgctactgcaaccaaaacgggctcttttacgatgcttgccctattaatttccaggaggacttctatgagggggtatcaacgttgttaacttcataaaaacacataagtgttcattcgtcccaggctgcaattaaacgcatgaatgcgttgctcttgtgactgagtgaagacaacacgtacataatggcttgacgtgaccttgtgtaatcttagctcacactgttcctcacagtaggaagaagaactagacgaacatgaagatgaaaggagcagtcgacaattcacgatagtgagagcccagctatcaacaggtgacctatttgtagtc

SEQ ID NO: 252791 - DNA, 401 bp, Gossypium hirsutum
atgtattattggagtggtttatcatttctgaaactaatcatgtcagaattgactttgaaagcattgctttttacagaaatatattaactttaggagtaatttctagttggattgtaatacgaaataatttaaaagagcttcgctcatatataggaaaattgcaaatggtcctactattaaattcttactgcttactgatttttttgaattaagagttgttatatgctagaatatgaggatgtgaatataaataagagaagaaaaaagaataaagtagattgagtctccaattttatgtaagcttcagaagaactggtttgtttacatacaagcttatagttgaaatatttttcaggaattacatgaatgacagtctttgaaccaatgtttttgttcgattt

SEQ ID NO: 252792 - DNA, 385 bp, Gossypium hirsutum
cccacgcgtccgaggaggaactgattaaggatgacacaatttccttccattaataaccaagttaagactgatactagcaaaaacgaggaagaggtggaggatccagaagaaggtgatgaggagttggaaccgaattctgactaaatcagaacaattattgtttttatttttgaacttttcattatttttaaagacttggatatttttaatttttaagcttagatacttttaattttttaggtatattttagtttgtactttttatgtaggaaccctgcaatttttgaaggcacttcaaatttcaagctaaatcagcaaggaggagatcgcccaacaaattccaagaaactttcaagcttatcgagtaatctatttcctttatttt

SEQ ID NO: 252793 - DNA, 359 bp, Gossypium hirsutum
tgatattgtaggttatgagttttcgattttgaaatgatagtaaggcctattggccgttgtgatgaatgtgaaagtgtttttttgtgatagggcctattagccgacgtgatgaatgtgaaagtgtttatgggggttaaggcctattggccgttgggttgattgggaaagggttatgtgtgataaggccaaatggtcgatgtgatgaatgtgaaagtgtatatgtgtgataaggccaaatggccgatgtgatgaatgtgaaagtgtatatgtgtgataaggcctaatagccgatgtgatgaatgtgaaagtgtatatatgtgataaggcctaatagccgatgtgatgaatgtgaaagtgta

SEQ ID NO: 252794 - DNA, 394 bp, Gossypium hirsutum
atcaagggcggtagaagaaagtctccatgctgaacagattacattatggagcccaggagcctgggaaagatgggccaggagagtgaagggggctttgaggagaggtcctgccagaaatatttgtccctgtccggggtgaagagtaagagggtaagggggccagggcctcagaagcggccatgccggtgatcaggggaacgccgacggttcccctctcggggacagtggctagtatggaacctcgggggtgacccgggaataggagtgttgagaagttaggttagaatgctgaggagtggtgcagagatcctgcaggcctgcctctctgctctgggatgaggcaagagggtgctgaaataactagagttctaagacatggcctcagtggccagca

SEQ ID NO: 252795 - DNA, 386 bp, Gossypium hirsutum
atatttttggtactatatttaatttgaatcgttcaagcctacactcaaaatagttcgtggtataagaatagcggagaaggtcattcgattgaaagtcaggaaagacaaggatctatctagtaaaaaacacatgtgcaatttcgataaagggtctattgctataaatatcacaaattaactgagtttttaaaatttttatttttcgctatataagaaaccgttttcgaactatattttttctaacattaactgcctttagtttagttgttgcatgaattgtttgaacatcactagggacaaatttggacagttgaaatgcagtgtgttttgttcgcatttgtgacttggttaatttttggtggtttcctatggacaaataatttttt

SEQ ID NO: 252796 - DNA, 362 bp, Gossypium hirsutum
cccacgcgtccgtttttatgttcatttatgtatttatttatatgcccatttttatgctttagtttatttatttatttatttgctatggtatatgcatgattgatttattttattattcgtttttgctcatttttttattcgcattatcatgtctattatcccattatgcatataaatatcatattttaaaaaaaaagaaaatatttctaattgagacaatatttagcgtttggaaattcgagaaaacatgccctaaggtgttgggtgtcgatttttctcgttcaaccaaatagcttaatatccttttcaaaaatttcaaaataaggcaatattttgcgtttggaaattcgaggaacgggccc

SEQ ID NO: 252797 - DNA, 386 bp, Gossypium hirsutum
ccaaaaccgagcctagaccggggcaaggccaagcaatccgattaagcctactagtaaatactttttgtaaaccgaggtaagttatatgtaaataatacaactatattattaatgcatgtattcgattgttattgatttgatatagcatatatttctagaattggaactaagtatatgtatttatgattgagaaagtcgaaagatccagtaagaacccaaggaaacaaaccgcatattcatgccatgacatagggttatgtgagagccagtataataccatgtttgggacatggcatcggcattgagacgaaggctagtgtaagacgtgtctgggacatgcatcagttgcatcatgatagcctgggtaagacgtcgtctgggacatg

SEQ ID NO: 252798 - DNA, 242 bp, Gossypium hirsutum
ctgcaagctggagacctaaagaaaggaaagagaaaagttgagggagaaaggaaggaatcccggtggatgaaatggaaatacgggtgggttttggtttctacagaggatttcttttgaatttaaggctggcctaaggttttggagttagttatccagtgccatttagttctttctttgtggattcatatatttggtttgctgaacccttttggtgcaatggaattttcttccgacttaatttt

SEQ ID NO: 252799 - DNA, 140 bp, Gossypium hirsutum
gaggtccgggaaagtttctttggaggtccggcccggagcagccatgtcccactgccccaagcagcccggcacggtcgccgcgccgtcgggcgtcaaggctccgtgccagcatgggggcttctttgtggctgtcaaacaag

SEQ ID NO: 252800 - DNA, 184 bp, Gossypium hirsutum
gcagttggagaggccaatcttccgacagggggcaatcttccactccagggtcaagaactgggcgaaacgattacagaaatagcagtagtcgagatgggcatccaagtggtgtaccacggccctatggtggacggggacgtggtaagggttcattataatagcagcaggggacataatgaggggc

SEQ ID NO: 252801 - DNA, 375 bp, Gossypium hirsutum
ggaagggtcgcgaaaaggcaagtagccggacccgtatgtcttggttcgggtcaggattctggttgcatcggggataaaaattggggttttgttgaggagagcaacagtgaggcgagaacgggaaggaaaggaagaagaagaagaagaagtgagggcgcggcttataagagttgatagagatcgtcgggcattgaggcaagccatgttccggcaacgctggttctctctgataataagctttggttcttctacactactagatagttcaccgatttattatttagaaatatcaaatcatatcaaatcatatcttttctttttaaaaatttgtattaatgtttatatcaagatttaaattcctgaaatttaaatctt

SEQ ID NO: 252802 - DNA, 108 bp, Gossypium hirsutum
ggctgctaaattcaatggcgaaaccgatcccatctccgagtactatgttgctgttgtttgcgataaagaagttgttttactcgttggggatctaaagaaagaagctta

SEQ ID NO: 252803 - DNA, 370 bp, Gossypium hirsutum
atctttttttctgaataaaggtcttatcactgtcacttggaaagagagttgctaaatgttgaattttaaattttcaagatggcaagctctattccatgtaagttgtttaatgatttaatagttcaaatcatattgtcagattgcaagtagtattaaagttatgacactttgtcagaaatattgtaatgcactatggtgactgagaaatggcagtgtacaaagaataccacttaattatttaagttctagaatttaaaaacaagggctagctttcattttagggtttgatctttccagagatcagggtaatatgggatatttcatttttaatggtaacacaacaatgaaaggtaaataccttggggaaatt

SEQ ID NO: 252804 - DNA, 389 bp, Gossypium hirsutum
ataaaacttgggaaccaaaatggtggtttatccttgtatctctgcagtgtggattgaacagaaaattggaaatcatagtcaaagggcttctcttggttcgccactcacttatttgtaacttgacttctttttttctgcttaaaagtttcaattctcgtggtaataccagagtagaaggagagggtgactttacagaactgacagccattggggaggcagatgccggtgtggaagtgtgggcctgaaggtagggcctgtttgattttaaaaagtgtgcctgtcaagtgtatatgttgcttttctcaaacaatgattcagggatacaagtgggctcctctcgttcattaaaagaaaacgtgacatcttctaagaatctctgtgggaaaaag

SEQ ID NO: 252805 - DNA, 384 bp, Gossypium hirsutum
atcagttatgccagcacagccaccagctctgactccagcacaccctccagtggggccagcacagccaccagctctgactccagcacaacctccagtggggccagcacagccaccagctctgactccagcacaacctccagtggggccagcacagccaccagctctgactccagcacaacctccggtgggaccagcacagccaccagctctgactccagcacaacctccggtgggaccagcacagccaccagctctgagtccagcacaacctccggtgggaccagcacagccaccagctctgagtccagcacaaccttcggtgggaccagcacagccaccagctctgagtccagcacaaactccagtggggccagcacagccacc

SEQ ID NO: 252806 - DNA, 385 bp, Gossypium hirsutum
tactgaaaatgactttagtaagaatgtatgtttgacttaccattacctgatacagtttacttgcatgtttagaagagatgaaaatattttaccaaaaatcatgaattgaaaaataaattccgaaacattgcaaaattctacaaaaaagggcctgaagaaacaaaaccctttcatcctctacctaatttctttatttaaccttctggaaaaataacacctctgggtaccgaactcagttttagaggttgttagaagtggcagttaagatgagaaatagattacttcccaccttagatttacaccattaaagatgcttttaagaatctggttcaaccacctgaacattcttttcttgacatttacttattgtttacttctttacttt

SEQ ID NO: 252807 - DNA, 336 bp, Gossypium hirsutum
atcccccctcatcttcatactcacccccccattcctcctctcaccttcagacccaccccaccctttattcccccctcacctacacccaacaccccccactctcggtctcacctccacacccaccccgcactcccccctcacttccacacccactcctccccttctcacctccacacccaccccccactttccccttacctgcacgcccaccccttacttcccccaacttacgtttcacctgcacaccccttaccccacttgttttgtgcacgtggctgtggagggactggctggctgttccaaaagcaaaccctcgtggttgtaactggcattgtc

SEQ ID NO: 252808 - DNA, 212 bp, Gossypium hirsutum
  unsure (1)..(212): unsure at all n locations
naaccaggggagaatggacactttaacatgtaatagaaaaaacatcaaaaaaaagaaccaaaatagccctgccgatccaaaccctcaaggcttacctactctggcattccaagttatagttctcttatatcggaccctataattaatcaattgtccgccaaatacaacttcctgaccgtaattttacttactaacccaattaaaactcctct

SEQ ID NO: 252809 - DNA, 366 bp, Gossypium hirsutum
cccacgcgtccgcggacgcgtgggatgagtttgagtggtcaaagcaggcaatacatgtgagtgttcggaggcagactaaatggtggtatgccaagaggtttttgcaccctgacatcgtggctccatatgactacatattcatctgggatgaggacttgggggttgagcatttcaatgcggaagaatacattaaactggtgaggaagcacggactagagattttacagcctggtttggaaccgaataaagggttaacctggcaaatgacaaagaggagaggagatcgtgaaagtcacaagggaacagaggagaaaccgggttggtgcaatcattcacatgtttctccttgtgcagcgtttgtggaga

SEQ ID NO: 252810 - DNA, 324 bp, Gossypium hirsutum
ttggtcaccaaattcattatacatcatttcccgtgaaaaccaaactgaatatctggatgggtatcgttggtgaagaaccggttctgtctagactagatcgagtagacaacatggtaaggcagttggaggaaatgagagggagccatggtaatggtaattataacaggtctccaagcccaaggagctctagcgcatccaccccatcaagtgggacgttgggcagcacatgtacggagggtcatccttcatctatcgatttctccccaaccgccaagtccctggagaagtactgtcgtcccattgatcatgtcatggtggagactc

SEQ ID NO: 252811 - DNA, 346 bp, Gossypium hirsutum
  unsure (1)..(346): unsure at all n locations
ggcacgcgggggcaaanccggaggaggcgcaagcacaaagacaacccggacaggggaagggacaaaacgaggccgcgggcgaaaagcacgagaggaccagcaaagcaaccggcagcgagagcacgaggcagagccaccgagaagaaaaagacaccaaacacgcggcgacggccaggacccggagaaccngagagaaaaggacacgaagaaccgagggagcccgagaaggggagccaggaacaacagccacaggcaccgagacaaccacagaagggacacaagaacacacgagaacgggggccaacgaagcccgaaagggaaaaacccaagggcagagggcggaggc

SEQ ID NO: 252812 - DNA, 387 bp, Gossypium hirsutum
atgtgaaatgttatctaccaaggaagctcattggagactcagtacccaaagtttttattgagggatggcacgtaggcatctgcctagaatgtatcaaaattccagactcccagaaagaaaataggtatacaacataaaccatattgtttgtataaacagtgtaggcagagtaagctacccttatcatttgaggaaagtttcttatcaatatagggaactgtttaccagctaaattcccaaatgccagccaaggaccacccttgtaaggaggtctttctaccctctggtaactctgctctgcacagatgatttttgcaggattaaattgaactatatgaatgccatttttataggtcagagttgatctgatatcagtaattctgtatt

SEQ ID NO: 252813 - DNA, 362 bp, Gossypium hirsutum
gtttgtcttatgtatagtgagttacctgaaagactacacaatagttcaagtttcaatgaggaggtggactctcgagctagtctaatgctccattctagggaagtctagtaacctcctatcttttgttttaaacacattggggataatgtgtagtctgagtgtggcggtgcacataagttatatatgtgttatttatcttacttttatgtttggttgagcatttattttaagttttatgccttttggaaaaaattttaaaatttcaaaagtattattcattttttgttcttattttttcaagaatctgatgttccttaggagcacatttctgtgacagcatagtgcttgaacatgaagttatt

SEQ ID NO: 252814 - DNA, 357 bp, Gossypium hirsutum
atggctcccccgtccgcttcaccacaactcccccgggagcctgctctccagcaggccctgagtaagataaatgaggtaccccggagaggctcccttcttcagggagatcagatggcatcagcagccatcatagaagcccaaatcttaggaagggaaggacctgggggtggcaggtgccaaagtgtgaacacggctttgagagactgataggttttccgcagatagttctgggatgggggagggctgggtgggaggcccctgtgctctagggtgggttctataggtttcctagaccctgctaactttcaagcggcatggattcgaggccatctctctgcgaaaggcaagatggctccc

SEQ ID NO: 252815 - DNA, 268 bp, Gossypium hirsutum
atcgctgccatgcgtagttttgcacatctccaactgaaaagagtgtctaagggagcgcagggtgacaccaataaagtgcccctgagaggcccccctgttcacatacatgacccagtttagctagccctcatatacaccctgatcacacgctgggaacgaccttcttgccggctcaggcaaagactgaacacatggttaccgagactcataactgtctcgccaatagttatttgatggccaccggctagatagggtactctttggcctt

SEQ ID NO: 252816 - DNA, 333 bp, Gossypium hirsutum
cccacgggtccgaaaaaagggaggtgggtacttgaacatatgtagtagtgtatcatgcataagattggttttgacttggttttaatgtcttggattggttggtgcatgtgtgttggaacatttatgtaggtggaaaacaagttttggtgagaaataaggcttagaaatagctttattttgtgcacacaggtagagacacgggtgtgtgtcttagccgtgtgtgacacacggccatgcgctcgggcgtgtggtttagtaatgtgttcactgcatcttaaaaattaagaattagagtggtcaaaattaatcacacgggcatgttggtagctttgt

SEQ ID NO: 252817 - DNA, 372 bp, Gossypium hirsutum
atgccctctcctctggggcctcggcttcccggaggtccccttctccagtgcttccctggagaggccagctgtgtcgagtcctctgtgcctgccctggcgttctcacagcctcccccttcccttcagcaggcagctctgtttgccttacccgtccggaaggcttgccctcggcgctctgcctgcccctgctgctggctcatcacaatctgcagggcattgaccctttgctttccctttctgctccctctctttccatctgtttggctttttccctcagggaactgggtctggaaggcactgggaagctcatcagagaaaatgggtgttgggcctgcgtactccggtcggaggggacggacaggcacccctccc

SEQ ID NO: 252818 - DNA, 364 bp, Gossypium hirsutum
cccaagggtccatgctatcagaggtggccctctggctgctacaatacttcacgagatgagggaccaatttatggaacgagagcaggaacaagcttcagacaggctcccttgaaacatagccctgtgatatgtcattcacagggctgatcaggacacgttcgagagaaagcgaatgcgttggcagctctgtgcggggccgagacatgacttgctactcatagtctatcgactccagactttgagtgggcacttcgtcttgcatcttatgtttcatagcttgaggccttggctgcgccctgcttacttagcgcggcgtcttgccctcgtatttaagaccaaccggttttagccggatgctggcaat

SEQ ID NO: 252819 - DNA, 369 bp, Gossypium hirsutum
ggaaaatcaataagtaaacagtctcaaatatgagaatgggtgattagcttgcttcagtaatcataaccaactattgctttagggcttcttgttcaatcaactagttgttaccctagcaggatcttctgatcttccactagaatactagtcatcaagaactacttatctatcgacctcacaatttagaccagtttggggctaaggtgatcatggataggccataccaattttgggttaattcccacattaatgacttcctagggtcatcaagcctaaggtttgtgttcttcctctcccaaacaactgatccattaatagaaccttacaaaatagttaatttatcatacctcgactcactaatcacccacc

SEQ ID NO: 252820 - DNA, 316 bp, Gossypium hirsutum
atgtcaaagctcatcccagatgtcctaatgtttctagtaaatgtttctgcacaattctaaaagataaggatgtttttaaacccagccccgacactatcatacctcacaagattcatgctaattcctcagtttcttctagtcccaagtccatgctcaagtgtcccccgctgtccaggcaccctattcaggggtcctccatgtttcacagtgagaagggaccctcagagttgggcaccccaggcaggctgattggagggggatttggaaagaaaggctttgccagggtgtgagggtacaggtctcaccacactctgtt

SEQ ID NO: 252821 - DNA, 263 bp, Gossypium hirsutum
atctgacagtgaagtgacagggccctcacttagggacttttagtctgtcggaggagttagaatacacctgagggtccaaagagagacacagggagagaagagcagatgacataggtggaagaagtcttcagaccaaggaaatggaggaagcagagctggaaaagcttcctggaagagaatcaatagagaactacacccacagcaggtgtttatagagcgtctacttccagcatgacttggatacaggcacaggccttaggaaa

SEQ ID NO: 252822 - DNA, 345 bp, Gossypium hirsutum
cttaaattttcacacaaataagttactttggctggacgcttatatatcttatttagcataacttcattcatctttcgaatccaaatgacattataacaagtatgtttacattcatatacacaaactcataaatcaaaactcaacatcacattcatatgcacatatatattgccgaacatacttttcatatttactcacattcttcatttacatcttacatgacttgtaataaatattaggaaacttacttaacatatctgaattaagtcataagctaaattcatacctggtcgatttaagatattttacacatcttgcacacgtttcaccttcccctggttgaac

SEQ ID NO: 252823 - DNA, 315 bp, Gossypium hirsutum
cacttttggtcggttggggggctaaaccagggttatggggcctccacaaccgggggttaaaccaacccacagggttttgaaacttgacgggggggccaccttgcccaattggccccaaacagaatggaactttccttttttaaaatggccgggattccaaaccggttaaaaaggattggccggggaaaaaggcgattaccttggaaacaattttttaagagttttttttttttaaatcccccaattttaccaaaaaaaagggatccttattttccgacaatttacccaacaaaaaaaattccaggcccctctttt

SEQ ID NO: 252824 - DNA, 178 bp, Gossypium hirsutum
agccttccgatgtttggtgggggtggcaatggaaaggaatataaacccggcctttacatttgtttcgaaggttggttgaccaacaacctgtttggccccttgggctaggggggccaccgttaatttgggcttggtgaaggtcctatgaacaccggccctttttttaattgttcacaaa

SEQ ID NO: 252825 - DNA, 221 bp, Gossypium hirsutum
cgttgaatatgtgggctttcttcttgttcagagaaggaaggaaaagggaccatagcgtcggcgtttttggatcttcttcttcttcttcttcttccctctctctctctctcttactctgaagctcctctttggtctttcatttactcagtattggaaaaaatggcccgccgtgaggaaattcaacccctcgtctggggtaatgggaactggaatgggggaag

SEQ ID NO: 252826 - DNA, 278 bp, Gossypium hirsutum
  unsure (1)..(278): unsure at all n locations
taaaaaaaggccaagcaggnacgccagcaaacacacgaccaaaacccccggaacgacccacgcacccaggcagaccaaaaaagaggaaaagggaggccgaaaaagggcaagcganccaaagaagaaggncaaaagccaaaggagcaaaggccgaaagagcgcgaccagaaacccgacgcaccaagcaaaaggcaacccacagaaccgaggcaacaaaacaaccggaagagggcacggggcaaagaaccaaaacaggggaccaacaacaagccaagaac

SEQ ID NO: 252827 - DNA, 364 bp, Gossypium hirsutum
gtagaaattagggcgcaactggccgaactagaggcttcaaaaatgcaaaccacagaagcgcgattggtatgtaatgctgttgatgaacgtaccaatatataggcttctgaagtcatcgtcttggaggagaaggcactcatattaatggtcgaatgagctaaaacttggagaggcatactggagaacacagaggctgaaatattttatttcaagtattcctaagaaaattgctaacctagagaaagagcgttaggatattctatcaacccctgtagcacttcaagaagagaagaaggtgctttagtctcagccaccaaaagcttttcgctggagacagcctattgatgctattaataatcctgct

SEQ ID NO: 252828 - DNA, 371 bp, Gossypium hirsutum
tttcctttttcctaagggccagttcagtgtcaataggggtaaggcctgagagaaaagaaaactattctgatgaagggtctctctacaccctccgtctctgctatctgactcttcatttcagtcgggctctcttggtctttccagttccgactggtgtgtggcatacccaggcaccgcatcaaacagaagcccatctccttccccatgagaaccgcttcataacatgctatcgcttctgcttcaaaagtcgtagtcaccatggaatggaggggccttccatttatcagttttctgggcgtcactaatttgtctctcatttatgccatcaagttcacccagagtacccagataccacaaatcagtgatcgacg

SEQ ID NO: 252829 - DNA, 366 bp, Gossypium hirsutum
ttggaagagaccttgacaacatcaaatggttgttcatcttctatgaatttgagctctaggaacttagtttatcatgatgaagttgattttgatagtcatagagcaactgcagatgctagaaacgataattcacctaaattttcacaaccagagcttaggaaactagatattcctgatgcatcaactcttgggaatgattatatctgctgtgcatctatacctggttcaagttttaagaacatccaacaatcttcctctatgtcttttgtgattgatccaaatgctaggaaccttcctattttgccaaataaagtggaatcatactccaacactttgcctagcgatttattggcagcggctattcaa

SEQ ID NO: 252830 - DNA, 352 bp, Gossypium hirsutum
atgttaatcagaaggttagacacagttgaggagaaattaatgaactagaatagaagatagatgtgaaggaaacattcagaatccaacatagccagacatgtaaacgtaaatgccaaatgtgtcagaagaaaggtgggaatctggagggtaaagtgatttcttacatacctaaccagaactcttgaaggaatgggaaaaagtagggcagagacagactcttttttctgtgtttaaaaaaaaaaaattcaggtggataaaagacctaaggagaaaggcacactacaataaggttttagaaaaagtaaaggagaattgtctttatgatcttggttaagggaaggagttttgaaga

SEQ ID NO: 252831 - DNA, 229 bp, Gossypium hirsutum
aatcccaaatttgtagtttgcgttaagccaacggaatgggaaagggcatagaggtttgtatgagacaatttatggaccaggtctggaagtagagatagcacttttgctcacattctgttggctagaacaatcacaagtccttgcctaactgctgggaaatagtttagctgtgagaccaggaacaagaggaaaagatttggtgatcagctagctgtctgttccatggcca

SEQ ID NO: 252832 - DNA, 363 bp, Gossypium hirsutum
cggacgcgtgggcactagctcatcttcgtataatcaatttttagttttatctctcagcaactttcaaataatggcttcttttgatgttgcttcttggtttatcgttttgattgtagcattttgttagtatatacaataattctctactttgatattcaatcattacatcatatgtaacaccccaaacctagcctagacgctacggtcagatttggagaagctaccataatacactttgaaaactcaaaaatcatttgggcttgtaaaaataacgcaagcttttgatgaaaaaaatttcaatttatttttagtgaaaatatctttcttatttaatttggtaattttggtgactgaatttatatt

SEQ ID NO: 252833 - DNA, 296 bp, Gossypium hirsutum
atgttctgccaggtatatactgctctttctctctgggttttttccccttttcttggttgattgctataaaattaacacagcttctgttatcagaaatggccccttttatccttgcataaagatataaaaaatgttaaaaattatccctcagggataagaaaactgccttggaaattcacacacagtgagatcccacactcacatttatgatcaagggaaatttcacccttaaaacctgaagggatctcatatttttagggggtcattgagcccatggataaattaacccattcccc

SEQ ID NO: 252834 - DNA, 362 bp, Gossypium hirsutum
cagcttttctcatctgtcacaatcgctccaccttgagagtccttttgcatccaactcgattaccggttttggataagagagaggttgacaatactgtctttgatggagatggagaaaaagaataagttaatcatactgaaaagccccttagttttccctatgattatgatcttaaacttatgtgccaggattataaagcagccttttcaagtatcacgaaactcaaaccgtgaccgtatagccacccttaattggatcctgagttatacttcaacccgtgaccgcatgaccactatcaactaggagccttaattatacttcaactcgtgaccgtataaccaccatgaatttggagcctgagt

SEQ ID NO: 252835 - DNA, 376 bp, Gossypium hirsutum
atggactttgacgctaggcaaatttgtgaaggagcaaaagttcgtttgggggttgtttcatttaccccttactctttgccctccctagtcatgtttgtcttcttttctttgtttataagaaatggactgatactcatagtcaggaataaataaatagttatggattaaaataatattcttgagagtattttcatctttgtcagggaacaaacatggttatttgtacttgagttcttgtcctaccatcatcactggaaaaacatctctgggtagtcactgtctccccaaactggactcaggatggaacttttgaagcagtgttacctaccccaaacaacttaaaccccgaagtgtatgaatatttgattattacttt

SEQ ID NO: 252836 - DNA, 127 bp, Gossypium hirsutum
gataaatgtataatgagcaagacgttgaggactccatagctgacagctttattgaaccatctgttcaacacgaggagatagatgctggccgctctgtttttaatgcaataaacgtactttgtcatgg

SEQ ID NO: 252837 - DNA, 296 bp, Gossypium hirsutum
atactgcctctcaaatctgccaccacttatcagcagatggcctttgcccctgaagatgtttcagactggctctaagatgggggatcttgtacaagaagagaatggtgctgacactgaactccgagttagcagacctggattttatgcacagtgctattgttagctatataaccttgggccctctccaccacggggattcattttatgatggacaacttgagaaaatgcagttaaatcacttgcagtggtgggtctcaccctaagagtctcatgttgcataaagtatcagccttaaa

SEQ ID NO: 252838 - DNA, 378 bp, Gossypium hirsutum
ctagagggaacgctggagcgcgcgcaggccccgccccggtatccccggtgcggcccaatcgtccgtacactcgttcgcttcatccagcgatgtaaaattctcatcctaagctgtggaaagggagaaaagaaagatgggctttatttttcatctgcttactgagtaatcctaacaagggggggagcagcccccatgagcatgggtgtgacatgacaaagacatattgtcactgtgcatgagtgactaatcacaactgtgcagatggaagaggagaactaagggtgcctattctaaagacatgagcgatttcaaaaacaatgctttctctctataataggataactgaaggtcgcacttagctgatagatgaaggagact

SEQ ID NO: 252839 - DNA, 293 bp, Gossypium hirsutum
atgggatcaccccaccctggcccacaagatatggcacattagctgtgggtgcggcgttcactcccgcgttcggatccttttgtacaactatgtaaacccggttggtgaaaaaaggcggatgggcctgttcaatgcccgattagtggccggcgaagactcccgggacccccttcccttagatcccggaccccttgaggttcttcgtagatacggggggccaaccaccaaacccttacaaaccgggtctggggggccagaacccgccccgcaatgggtaccaggggcagatcctt

SEQ ID NO: 252840 - DNA, 288 bp, Gossypium hirsutum
cggacgcgtgggaaatcagtatccatagtaggatacgcgatgcacaatggtggttggtctaccgtagcttcggccagttgcttaatcggttgggccattgggtgatttgctaaattcgagtttttggtaaccttagcggtaagcacttcttttggtgaatcgacttttactttttcactttcaaggggttgagtaggggtttcggttacccttagactcaactgtggggtcaacttcgatttttgggggggggttactctgagtcccaagcactttggatggcttttt

SEQ ID NO: 252841 - DNA, 370 bp, Gossypium hirsutum
atcgcggggcgcaccgcgcggagccggccggagcgcgaggccggcagcggcgggagagcggcccgggtggcctcgtagcggagccccgcatcgccgagtggcggccggagccgcggaaaagattctcagtgctgattttgagatgatgggcttgggaaacgggcgtcgcagcatgaagtcgccgccgctcgtgctggccgccctggtggcctgcatcatcgtcttgggcttcaattactggattgcgagctcccggagcgtggatctccaggtgttttgttttgtttattatgtttattttatgtttatgttttggttattttgttatggggtcccgggcgtttgttgttcattgccagccagggcattt

SEQ ID NO: 252842 - DNA, 334 bp, Gossypium hirsutum
attgcaggccgaggccgacagcacaagcgaggggctggaggacgcagtccacagccgtggtgccagaccccctgcggcaggcccgggtgaggatggggacgaggacgaggaggatacagccccagagtccgcgctggacacatccctggacaagtccttctccgaggatgcagtgaccgactcctcggggtcgggcacactccccagggcccggggccgggcctcaaaggggactggcaagcgacggaagaagcgtccctccaggagccaggaagaggttccccctgattctgatgataataaaacaaagaaactgtgtgtgatccagtaaggc

SEQ ID NO: 252843 - DNA, 363 bp, Gossypium hirsutum
cccacgcgtccggaagagagtaaggaccgtagaggaggataaatcaaatatcagtaatctagtcaaggaagtaaaagaaaggatttgtaggtttgaaaaaaatagaatttcgaaacgtaccttagaaagctaatgaagtttggcagaggaaggtaggcgttatgaaaaccccaaatattggatagaagacgctctgaagagagtgaaagaactattaaatcaagattgacatggactacaatgagagggatgaagaatgaggttactgagaccgaaagaactatgactatttggacttcgatgaactcagattgtcatagagggatcgagccgtaaacggaagcatacccaagatcaacagga

SEQ ID NO: 252844 - DNA, 378 bp, Gossypium hirsutum
atagaatatatcctggaagaagacaatagttacccgtttcctaaaactggttccagaccttttggccattgtgcagcgtaagaaaaaggaaggggaagaagaacaagcaatcaacagacagacagcattgtataccttaaagcttttatgcaagaattttggtgcagaaaatccagatccttttgtcccagtgctgagcactgctgtgaaactgattgctccagagagaaaggaggagaagaatgtcttgggaagcgcgctgctgtgtgtagcagaggtgacctccaccctgcaggcgctggccgtcccccagcttcccagcctgatgccatcgttgctgacaacaatgaagaacaccagcgagctggtctccagcga

SEQ ID NO: 252845 - DNA, 370 bp, Gossypium hirsutum
atcgcaccttcagcagccgcctgatcctggagaaacatgtccaggtccggcatggcttgcagcttggggcccagtcccctggccgggggaccactttggctcggggttccagtgccagagcccaggggccaggtcggaaacgccgccagtcttctgactcttgcagtgaggagcctgacagcacgacaccgccagccaagtcccccaggggcggacctggatctggaggccatggccccctgcgctaccggagcagcggctccacagaacagagcctcatggtggggttgagggtggaggatggtgcccagcagtgcctcgactgtggcttgtgctttgcctcccctggctccctgagccggcaccgttt

SEQ ID NO: 252846 - DNA, 321 bp, Gossypium hirsutum
attaaatcggatcagatgggataccaattcaaagaaaaggattgaattagttgactcaagaccaagtaaaaagttggttgaattatatttttaatatatatattttattttttatgattttttattaattatttaatctcaccaatcagattcgttggactggcgaactgacaacctaactagaggtgatcatgggccgggccgggtcaggttcgggccgggcccatataaatttttaggcccatctactaggctcgggcccggcccggccagaaatataggcctaaaattttgtccaagccctgcccgtaatatatattc

SEQ ID NO: 252847 - DNA, 382 bp, Gossypium hirsutum
atggcaatgtgaatccacttatgttgtcaaccatctcgggagcacctgcccaaagccttctggggcaaggatggtggatggttgggagaaatccagacattggcagctggcagcaatgagtcagacattgcccataaaggtgttttgtttgatttgcttaagctttatacaattattttttaagttgcagccaacacataaaattagaaaattccacaaaacattccagatttctggttgttctttaaaaatggaaggatcaggccacactgtcttcatagtcccactgggccacagtggcccggagccaacagctgctttctttgtagacctggcacagatgctctggtccctgcagtttctgccatccactgttattccc

SEQ ID NO: 252848 - DNA, 386 bp, Gossypium hirsutum
atatttctttctcatgcctcagtggcatcagttagaataaggaatagagaatttcatttttgagaaataattttacagtatgttactgttcagggatatggcagacctgggatagagaactgaacccttgtgggaagggatgagcagcatatagtataaggttagttcattcttggggaggcaggtcctgatgacagagaggggagggtacctgatgaaaacttcgctcaattaaaaattgtgtctgtggtttatctttggatctagaagaggaagagaagttattttttcttttattttatgctcaattacagaacttacaagactcagcactcagtgtgtgtggtgaatactgtggccttaacatttgggttaaggggacatta

SEQ ID NO: 252849 - DNA, 385 bp, Gossypium hirsutum
attcagtgaggactagctagggttctccaaggtgcaatgccgatgcagggccctcatgtacccctacccctgcctgtgatggggtgttctgaggagctttggcatttgctggaagcacagcgagttccaaatgagaggaagcttgtgtggcttgagagcctttggggccttggctgccagagcacgaggcaggccaggacatggagagcccaggccctgtctccagggggccagatggggccttgcctgaaaggctgatccccttgattgctggaggtgtgtgggtggcaaccagggctgggcagggcttaaggtgtgtggaccaaacccctctagggttggcaaagctgcctgtcaagcctccaggtgggggcccttggacgca

SEQ ID NO: 252850 - DNA, 281 bp, Gossypium hirsutum
ccagatttgtgagcacttccacatctcatcgccacccccacctcgtgaaccatctaggatgaagatgtttaaaaaattttatttatctattttatgtttttacttttcttttattttaagactactttttatttttctttcaccttatttttattaagttttataattgttattttacaatttttaattccgactaattcattatgagtacttaatcttccttatatatatttcttaaaagagttcctgattctatcatagttataaagagctctaaagct

SEQ ID NO: 252851 - DNA, 367 bp, Gossypium hirsutum
aaagaactagatcaaagcaattcttcaattcctggtacttcatggtgagtgtttctaatttttatcctattcctattctgccccacctccccttttttttaccgcctgttgcttcttttttgatggattttcatgcaagaaactttaggagagatggaaccaaggatgatattggaaccttgagtagttctcagcaacatttggtggaacttgcagcacttgtattgtatcgggtattctgttctcatgcctaatatctaatagctattttttttactagaactgatgctgtgctacactcttaaaagtatctatgttttgatataataatttcaatttgctgcatatcttgtgttgaattgtgcat

SEQ ID NO: 252852 - DNA, 365 bp, Gossypium hirsutum
tattactaccctgagctcctctataatgtccaagccaaaagaaatttatgctttgttgtgccttatctttctctcctcctttacttgtttgaagcttgtatgcctcaccttaacctttgcttggggacattcaggccttgggcttctaggacaacgacttttctttcttccagcaagctgagttacttaagatgtgtaattatcaaccatgggaagatgattcaccttcaagtgaagatcgtgaaccaaggaccagaaatgtcacaaacactgtggcaactggatggcatccatgggaaaccagaatagcaatgttagaggcacggatagcaaggattgaggttcgacttgacggtcttgaaaca

SEQ ID NO: 252853 - DNA, 143 bp, Gossypium hirsutum
ataaatttgtctattttaaagtatagtctttgatggtaaaaatgtgaggttgacaaaaatcatgtcctcttatatgtatgaatttagtcttctttatacaattcttcctatgacggaatctaagacacaaatgtcctcaaaac

SEQ ID NO: 252854 - DNA, 298 bp, Gossypium hirsutum
cggacgcgtgggattttaaagttcttttcgagtttttaattttcgacatcaagacattaagtaatcaactaggtaccaattttgggcgtatcgagggtgctaattcttcctcgtgcataaccgactcccgaatccattttttggattcttgtagaccgaaagcaatgttttaataaatcaaacaatttattaaaacgatcaaattgcgaggtgatccgatcacacctaataaaaaggatcgctggcgactccatgttcgttttcattttcaaaaatcaaaagtcgacccccttcttac

SEQ ID NO: 252855 - DNA, 333 bp, Gossypium hirsutum
atcgtcgggtcccgggaaccgaacccgaaggagaggagggggcccccatggatttaggggggaggggaaagccatgggggggcacccccccggaacccctttcccaggcgcgcgttctccgctgaaagaggctcagagagacactttctctgggatcttaagtgtgggggctgccagctggggggccagtccggcccaacgccggaggcttggaaaagagagttggcagagggagcggactacgtgccgggccatggcccttctgccggggccctggacacaatgacctctttgccctgcccccttcccggccgggacgcctccaaagctgtc

SEQ ID NO: 252856 - DNA, 358 bp, Gossypium hirsutum
ataaaaaatatataaatatagaaaaaattataaaattttataaagtcgtaagaaaattataaaaaatgaaagaaatataaaattcataaaaaaatataaaaattatcacaccaaaaagaaacattttataatttttctattaattttattgatttttattttttatcatttttgtgccacatgtcatgttgtgttacaacacgcaatggtattaactgaaaaaaaaactaggggttattagctttaacaattaatagtcaaagttaatggttaaagagaatttttgatgcattttataatttttaataattttaaaatatattttatatttttattaaaatttagtaatttttataac

SEQ ID NO: 252857 - DNA, 362 bp, Gossypium hirsutum
ggcatatcggatgaaaagggtacaccacgatgatccaatgaaggatttcttaaattgaaaagcatgttgataaatgtaagaacaaataaaatggatacttttagctattatgatatcgtcattgagttgtgatgaaaatcatatgttcttttgttttgtttgtgcgatacaccatgtattttcattctacatcaatgacataggtttcccctaaaaaaaaaaaaaaaaaaaaaaataaaaaaaaaaaataaaaaaaaaaaaaaaaaaaaaaaaggggccgccccttttgaagatcccagttttctttcccggtccttccgatctatatcttttttattggggcccccaaattcaattcactg

SEQ ID NO: 252858 - DNA, 364 bp, Gossypium hirsutum
gttttgcagtcggttagctgttttaaaggatgattttgctgttgcattaagtcacgcagatcacgttgtggttacagcggtttattcggtccgagaagcaggtccacggaatgtttgtggaaaggatttagctacttcaatcatcagttctacatccgaatacatcccctctctggatgacgtggttgataaactagcacttgagatatgcaaggaccctcttcgtgaaatcgttatattgacccttggtgcaggtgatgtcaatacagtgggtcctaaattgctgcacgaattgcaaaagagattatgcattgcataatggtaagcacaagcagcctttactggcataaagcaaagagagatt

SEQ ID NO: 252859 - DNA, 372 bp, Gossypium hirsutum
cccacgcgtccgataataagttgtttttttagagtgccaaataattaaaattttaagtttgtcaaaattgatttaaataaatgaaattataataccttatcaatactaattaaaagtaataataatttattaaaataataattacacaactaggcaaattttagtgatccacaaattttattgtatgtatcaattaaattttataacatttcaacaatactaatatttagaaaataataataaattaatataaacatttaatttttaaaagttgtttgatatgtagcccatttaccttcttatcaatttctacatggtttctgtgaaaaatcctattattgacttttctttatggactatgaaacatatatt

SEQ ID NO: 252860 - DNA, 362 bp, Gossypium hirsutum
atctttctgctctccacagtaggccagagttgggggctctggagctgtttcccaaagtgcacccacaggctggatctgagttttgtcactcaaaagcaagaagaaaagtgggaaaggggcatcccccattagatttcaatactttgcacttctactaagcttgataggacaggagtgcaatctacaattattttaaagtgaatttccttccatccaccattctttatctttttcttgaataagaagatatctagcaaggatattacttgtgccttgagggtagcaattacaggatagattcatataaaatacggtattctgtatttttttaagagaataataccaaacagtcttcaaagaaa

SEQ ID NO: 252861 - DNA, 416 bp, Gossypium hirsutum
atcgaacccagaagaaacgagggagcctgggtctcctcctagtgtgcagcaagctggcctggggtccccggaaagaccgccggagacaagcccaggatcaccccgtctgcaacagggtgcaggcttggagtccccccaagtgcagccagagccaggcccaggatccccccagcgtcagcaagacctacacctggagtcgcctcaaagacagccggagtcccgtcctgaatccccacgatgtcagccgaagtcaagtgaggaggcatcaaagtgttctcaggaccagggagtactggcctcggagttggcccagagtaaggaggagctgaccccgggggtcccccagcatcagctaccgccgggcccaggatcaccagagccttaccccggtcagcaagctcccggtccggagccct

SEQ ID NO: 252862 - DNA, 383 bp, Gossypium hirsutum
cccacgcgtccgcccacgcgtccgctcagtcaaaagacgttttacattattttcttctctcacgcctcctctgccattctcttattctcttcgataacttttctccccccatctttgatatcttcttctttttcttttttcccccttcttttacctaattgcttcccaaatgtctcttcagattgcttgggacttaatactgaattttaagtaaaagtgcacgtgtagagatgaggttttccatttcccttcatcttctccactgctaaccagcgaaaattctactcgataatggaactcaaatattgcattaagggattgttgtatttggtgggagtggtagaacatcgaattcgggttttcagaacggatggatacggata

SEQ ID NO: 252863 - DNA, 391 bp, Gossypium hirsutum
gcttagctctcattgccttatcccttcaaacatgtcccaaggcctcaatgcccaaaaccactatacatataagtgagtactcacactcctatagcatgccaactatatccaattgttctaaggtctctataatagcccgtttcagtgaaatttgaacagtggtttcggaaccataaatccaatgtaaaaatatttattttattattattttaatgtctacagcatgttagtattaccttataaaaattttgttaataaattttatcgtttgcatactgaatttgataaaaaaaagagactaaattacataaagtgcaaaactagagttttatagacctaaaggcattaaatagctatagaaccttaaagtatgagtccttacgtggtaaat

SEQ ID NO: 252864 - DNA, 397 bp, Gossypium hirsutum
aaataaataaacagccaagagattttgcagtagagtttaacagaagctatgtaaaagctcgttaatttgtgtttttttaaaccagtgtgagaaacatagatcttagtaaaaattagttgaggacttaatgaagaattgctcattaaataactgacagtttgttcctttctttgaagattgcttgttcttgttcaattagaaaggagaaagttacctccatgtggcctaaaacacgagatttcttaagaggaaaaggccgtactcctttagaattaagctcatgagagaagcttttcacgtcaggagctttcttcctacggccactggtaacgcgcagtacggcctggaaacgtggtgactgcatttccttggcaaaaccaacatgattactccacca

SEQ ID NO: 252865 - DNA, 102 bp, Gossypium hirsutum
attagcatcaaatataatagcccatttcttcccactttgaatttatgcatccatttaatcatagtttgtttaagcactcatacaacaagattcatccaattt

SEQ ID NO: 252866 - DNA, 369 bp, Gossypium hirsutum
cccacgcgtccggtttgtgggaaaagctccgctaaaagtcatgacctttggcggcactgtcattagcagcgtcataagcgccgcaaatgcttttagcggcacttttttaaaggcctattttggtgtagtgacgaaatcatgcaaacatccccaaatgaacatattaaattttggtggtaaggacagattccaaagagttaaccaaggaccactcaacatactgttgcgaaagcgaagtgttgacttgaatagctaaatggtaccccgacttcacactatataaattgtctttagtaaagtgctagataaaataatcggtcagtttaagcatagcaaccgtgatactaaaaattgttaattagaatcgac

SEQ ID NO: 252867 - DNA, 374 bp, Gossypium hirsutum
atgggagattgattggaattccatttaaaattttggtatatggcattttctaacttaggaagccacgatgttcttggcccatcatgacactgggtagcattaactataagttttgtgcttccaaatcactttttggtttttaagaatttcttgatactcttaaagcctgccttcgattttgatcctttattctatttgtcaggtgcacaagattaccttccttttttagccttctgtcttgtcaccaaccattcctacttggtggccatgtacttgggaaaaggccgcatgatctttctggctccactcagtgtctaaggcaccctggtttcttttgttgcaccccacaaactattttcctcattctatttact

SEQ ID NO: 252868 - DNA, 381 bp, Gossypium hirsutum
catagattctacctttgtaaagtcgtcatgaatttaacataattatatttgagttgagaaaataatttaattaggaaaaataattaaatttattttaattaattaattaatattttttatacatgcatagatggggtgaaatttattaaatttcattcaccgaagctgtcaattttaaagtttagaaaatcagttgacttgcgatgacttttgggatgggatctaagcatttctgagttgagatgtcttcatagagtttgaagatctatcttagctttgaaatgcattttgaatcactcgattttgagtttgaaagctcaagttatgaccgttttagtgaagattgtgcgagcaaaatacaagaattactagtcctagact

SEQ ID NO: 252869 - DNA, 366 bp, Gossypium hirsutum
cggacgcgtgggcggacgcgtgggaaaaaattccacatgtaagcggagttaaaatcttcataatttgggtcaactcctctagacagtatgcttaacccagggtagtcaatggaactttatggtattcaggaggttaatagacatccttaccttttttgtcgcattacttctatttctgtcatctttttcagattccaacttttttggaatgttttttagggaggggacttgagatattgccaaaagtgttctcattacaagccctcatccacacatcattgccgtgtttgacagcagtgctacaagagaatggtacgtgcactttatcaccaacgaaatgcatgcttcatgtggatgcgttctaaa

SEQ ID NO: 252870 - DNA, 446 bp, Gossypium hirsutum
gtttgtacgatgatgcgggctggtgccgggccggaatttccgggattgagtacctactgtgtgccaggagctggtggtgcagtgttgacatagtctgctgccctgatagagttgattgtctagtgaggacgacacgcatttttaaaaaatatattgaaacttacaaaccttgtttgtgacaagtggtgtgtattgcaataactgcttggtttgcaacctaatttgctcaacagagacatatgttgcaagacccttccatggcggcacttgcgttttggcaaagctgagagagctctgggttgggcacattgctttggattacaactgttaatctgcgcctttctacaactgattgcaacagactcttgagacatgataactacagagggaattgctggagacaccagaggcacttgcatctcggctgggaagactatggtgctggc

SEQ ID NO: 252871 - DNA, 157 bp, Gossypium hirsutum
tcggtctgtacccaccaaaaatgcgaggaatgatttcctggggggggtgaagatcatgtcatggctcatggacccaaacatcattcggctgctagatcgagtgtgatcaagacgaccccttctgcatgaattctgactttcatggagaacggtgacc

SEQ ID NO: 252872 - DNA, 392 bp, Gossypium hirsutum
ggaagctggcccccatgtcctctggctgaaagcagcaacccctccccaaaaggccaggcaatgtgccgccccaccccaccttctaggcataggactaagatttacagaagccaaatgtcatagcctcgctttgttctttgttaggcatttcctcctgtctctgagggaggggaaggcttctattagaagaacatactttccaagagctataaatttttcacctctacaaagaccaggcaattatctaacctaatcctaaacaatttaaaggataaaatgaaggtaatcaagatggctcttccagaaaactgtacttgcactgggagacaaacgtcccaagccttggggtctgggacaagccttcaacactgccagcctcaagtgaagctttt

SEQ ID NO: 252873 - DNA, 350 bp, Gossypium hirsutum
atcctttgggcagtgggggttggtcccgtggctccggcccccggtgcagaatggcggcggcggttcggatgaacatccagatgctgctggaggcggccgactatctggagcggcgagagagaggtgcacggggacgggaaggggtccactcgaaccgaggccgggggtcctgtagggccggcctcaggtccgggcgcccagccgctccgggggtggttggaggcggggagaccgcgagcgcttccaacccctccggctctccccacgcgcggtccgaagggaggccgtcgctgccctagagcaatgaatcaggtggagaaagggctttcgcctcgcggggtcccgaacgc

SEQ ID NO: 252874 - DNA, 359 bp, Gossypium hirsutum
atggcagagagaacaggaaatcttgaaacaactaaattctggatacaaataaatagatggagtaacttattcagcagatttgaaagggttcatttccaggttttcagtggggaaagctaagaatcaacccaaattgaattgtagaaccaccaaaatgtctcaggaattagtagtgctagctaccttgaaagtagagcaattaaatcactacccctgtccccttagccaaagatccatcttctccctggaaaggataaaaccataactccactggggagtactataattagtgaaactaagtgtactgtactcaaaacagggaagagtaaaagcatacttgaatggtaagtgtttttttt

SEQ ID NO: 252875 - DNA, 371 bp, Gossypium hirsutum
caaggacacagagactggttcattcaggggaagtggagaacaaaagagacagatccgctttatcatcccgagatggaaatgcgaaagcaacacaagtggagtggaggaggtgattttgtgttgcgttaaggggttgaagattcatatgctttgcggatatttgtatttattctttgatgtaggataaaagaagtatgctatgaaactgaaacagggtattatacccgaaggtgtgtgctgctggccgattgcctctaaagttttctttttctgggagtttgtgtatagaaatagaatacggtttgaacttttagcttttaaaatttgggtaaagttcctaagttgtctgtatctgttttaggaggttgttt

SEQ ID NO: 252876 - DNA, 402 bp, Gossypium hirsutum
atcccagcaatatgcatcttgcacatctggtcagctcctgctccctccttctgctactgggggccctgcctggatgggcggccagcgatgaccccattgagaaggtcattgaagggatcaaccgagggctgagcaatgcagagagagaggtgggcaaggccctggatggcatcaacagtggaatcacgcacgctggaagggaagtggagaaggttttcaacggacttagcaacatggggagccacaccggcaaggagttggacaaaggcgtccaggggctcaaccacggaatggacaaggccggaaaagaagcagacaaagcggtccaagggttccacactggggtccaccaggctgggaaggaagcagagaaacttggtcaaggggtcaaccatgctgctg

SEQ ID NO: 252877 - DNA, 331 bp, Gossypium hirsutum
  unsure (1)..(331): unsure at all n locations
gttttagtacatacctgtgccatcgtgcacacatatggcttacttaaattttactttcagaattcatattacgttacccgttaaacacttggaatatgattcagacacacggaacaaatgcacagaagtgcctaaacatagccttggctacttgacaaaaagtgtactgaagtgcctcatatcacagaatcacatgctgctctcaacggngctactcaaagagctaagagagtatctgaacacaactcangatacccagcaccaggaccctagcatgtatcacatattaaatgagctcaatacacacatgactatcctagtgacatgtcac

SEQ ID NO: 252878 - DNA, 390 bp, Gossypium hirsutum
gccttgacatatatatactacatgaattttgatctttttggttctatttgaattaagttgaatggtaaattagggttaagcttgattgatgaaaggtacgtgtgatattcacgcatgattttaagctgaaatgaaataatggtgttcataagaagctcatgtccgaatgtagccaatggctactaataatgtgaaatgttctataaaattcgttagaatacgataaaaaaaaacatgttatttgatgtggaattgtatccgggcttaaagacccgcagacttcgtgctggaatcgtatccgggcttaaagacccgcaggcttcgtgctggaattgtatccgggcttaaagacccgcaggcttcgtgctggaatgacatccgggttaaaaa

SEQ ID NO: 252879 - DNA, 385 bp, Gossypium hirsutum
taaaaaggcaatatggagcatggaataataatacatgaattaaatgctatgttaatgaatgtcaacaatatgaagatattaaataaaaatttctagagcatattatggcaatattcatgtaatacaccgtttaaataccaatattaacaaacgaagaaaatgaaacaaaataagttataaaaaaattcgaagtaaataatataaaacaatttaaaataaataatatgtaaaacaaattacaataaataatatacaaagcaatttcaaataaataatatataagatacttttaaacaacatatgaaatatgaaagagtttaagatatataataggtaaaaagaaatttaaaataaataatatacaaaggcattttaaaattaaaga

SEQ ID NO: 252880 - DNA, 391 bp, Gossypium hirsutum
atcgcggccccttccagttgccggcgaccctgcgccggcattcagagcgcctcgcctggcgctaaatttaaaaacgtaacagcagcagcaggctggtcccggaaacgaaacgaaactcggcccccgggcctcctcccgggcgctgccggtccctcagcgcgccgcgccacccggaacagacccttctcccgccattttcggcggggctgggagactgaggcccgcagcgctgggcctgcggcgccccggaagaggcgggcggcatggccgccggcgtggactgcggggacggggttggcgcccggcagcacgtgttcctggttccagaatatttaaaagatgctttaaagaagatgaaaagggggctaatggttgtaaaaccggttaaccc

SEQ ID NO: 252881 - DNA, 308 bp, Gossypium hirsutum
atgaagaggtgagccctggaaaactttactacgggctgcttgaattgaccaacctttcatgtagctttacagtgaacgctcagaccctttttttcattatatttccaaagatgaggaaagcggggtgggggcatggaggtcaaaactcaggccttacttagccagctaacaggacactattaacacaaagggagatagaaactgattcactttctggaataagtatttcaaacacattaaagtaaagatacaacaaactccgcgtaaccatttagtaaaccaatattttaaacaagaatcatttttac

SEQ ID NO: 252882 - DNA, 390 bp, Gossypium hirsutum
gtttcgggatcacaggaccgagtcgaaaaaataataaatggttatattctatgcttattatgtgtgtacatgcatatgtcgacgtttcattccctaattttgccaattgcatgagaaattattaaatagggatcaatatgagacatggtgaaatatgatagactaattttaaatggtttattagtgcatgtcaacacaagggtggacttgcatgtcaaattgcccaattttctttatagtggccggccaagatgggtgttgatgggaaaatatatatgtttaattagttattaaaataagaaatggcattatgtgagaaaaaaataatattagtgaaataaagtaaagaaaacaaagaggaaggaaggctcatctttcatctccttcatt

SEQ ID NO: 252883 - DNA, 329 bp, Gossypium hirsutum
atggacgtcggaggtggaggttgtggagttcgctgttcgagagtgggcacgaaaagctccttttagtcctgcgttccgaaaggagggcgtctgttgggcctttctctcagtcgtgagggaggcgtcgacggcctacggaagtcgtgagttgaggcttgcgggatcgtttccggagaaagcgcaggctaaggccgcagcggaagatgtccaactacgtgaacgacatgtggccgggctcgccgcaggagaaggattcgcccaccgcctcgcggtcgggcgggtccagccggctctcgtcgcggtctaggagccgttctttttccagaagc

SEQ ID NO: 252884 - DNA, 192 bp, Gossypium hirsutum
aaattatggtgattggatagcgatactgactcatatgtctaataatagtctgacatatagcttttcaagtgatgatgggcacaaaaagaggaagagatcttctaaacgaggaaattatagacattgaaaaaggagaaaaagacgccacgataaaaagagaaaaaggcgttgataagagatctaagcgtaaat

SEQ ID NO: 252885 - DNA, 340 bp, Gossypium hirsutum
attgcccagcagtggaaccagtactatcagaaccagggccagtggccgccatactacgggaactacgactatgggagctactccgggaacacacagggtggcacaagcacacagtagccagtgtgacccagaggctcccagaggcccctgccggcttccttcaccagcgccttgctcttgcccttctcttgccccgccagatcctgtggtgctggggatggggtcatcccagggctgcctccctccagcccactgcctcccctccgaggggcttccttcgcctccatagggccaggcatttttctctggattcaaacaagcaacaatgaccctttaattt

SEQ ID NO: 252886 - DNA, 222 bp, Gossypium hirsutum
gcggaacaattcatcaatgacacctgctatcgctaatcccccataagtggattagttactcacgggatccctaaacataataaacttgattatagacatagtgcatgaaaaataaatcaagaattaagtttagagaatctcgattgtattcgattgacgaatcgcacaaatccttcaatgttggactgcgtctacatatcaagtgtttctagaacacgtatg

SEQ ID NO: 252887 - DNA, 256 bp, Gossypium hirsutum
  unsure (1)..(256): unsure at all n locations
cccacgcgtncggtgaaaatttcaagcttcgatttagtcgattgcatgtgaatttagtcaataggacttatatgagaaaattttaaaatgtgataggcaaatgtccaagtgattaaaatgttaaactattaaagttgtgggtttgcatgtcaaagtacacaaaatttgattagtggccaaccatgctatgggttaaatgtttaataacatttatgtagtgtttatgtagaattataaataagacatggtaagaata

SEQ ID NO: 252888 - DNA, 403 bp, Gossypium hirsutum
  unsure (1)..(403): unsure at all n locations
ctatttaggcngacaactatagtaacaaggtttgtacacaaaaagcacggctggtacccggtccgcgaattctccgggatacccacggtgaggggcacggacctcgaaggtgtgttgcctgttcaacaatcacgtcatcatgggtgtgttttgtcaactcgcttgttaattgatttggggatatttgccccaaatgagaggttgaggaaaagactgtgggtggggaggccctgcctgacccatccctttttctttctggccccagcctaggtggaggcaagtggaatatcttatattgtgcgatgtgcgggcttggggaggcagagaatctctttggagtcttgggtggcgctggtgcattctgtttcctcttgatctcaaagcacaatgtggatttggggac

SEQ ID NO: 252889 - DNA, 240 bp, Gossypium hirsutum
  unsure (1)..(240): unsure at all n locations
atttttaaccttaagcctccgcctgcagagctcctccgccagttatggaggtggttttgggggtagctcttgccacttgggaggaggcccgggggccttaacctgttcaactcggtttgtttttggggaacaagttgaggcttccgaaggggggtgaaccgttggttttgtggaagggcctgttncggcttttgaagtggcttccggggagggccttgaagggggttttgtggggggttt

SEQ ID NO: 252890 - DNA, 252 bp, Gossypium hirsutum
actattttgcaagtttgtaccaaaaagcaggcttgttccggttccgaatttccgggattgccagagagagagccacagaccagggaacaggacagagcccaccaaaccagtgagactgtgactgggtctggaactcagacccaggcaggtgccacccagactgtggagcaggacagcagccaccagacaggaagaaccagcagccagacacaggaggccaccaatgaccagaacagagggattgagatccat

SEQ ID NO: 252891 - DNA, 360 bp, Gossypium hirsutum
atccgggaccgtagaggctgcagagagctagaacccgagtcgcagctccgagtcgcagctccgggccgcagagcgctgggcgaacgcgagggccagggcaacggcagggcgggcagctgcgctctcggctggagtcatgctatactgaaaagacactccatcaagagaactctgggagaagcaggaaaccctgtgccagggacaggaaagataggagaaagaaagtgtatcagaaatttttaaacctgtctcagaaataacaacatattttaatcagagatttatgttgctatgaggacagattcatcaaaaatgactgatgtggagtctggggtcggcaattttgcatcttcagcaagg

SEQ ID NO: 252892 - DNA, 401 bp, Gossypium hirsutum
  unsure (1)..(401): unsure at all n locations
attgattttcaagctctggttgctgatgagtatttcccctatgctctaagcagatatttcactttttcttttcgtgtagtttctgttaatatctctgttgtaatttcaggagtcagaacagtgtggaaactttaatgtaggaaatccacaaacgtattgtttttacatagaaagaaaatgttccttgttgctctagatgttggtgctgtatccctaatacttatggaccaagcaagaagaaattgtataatctttgttgttcagaaagnttctaatagaataaatagtagaccttgtagaatgaactggcactaataaatggtacttttaaagacatgaatatgggagtattaaattattcaaccagatatatttataactctaggcttttaattttttta

SEQ ID NO: 252893 - DNA, 269 bp, Gossypium hirsutum
attgctatcctagtttaagggggataaaataggaatcaagaagcctggcccacttgagcgcccagcccaagtgcattctgcaatccagtttatattagtcctccatgtgggtggctatactttatcaagattcccccccaaggggaggaggattattagtcacgttatcaaactcccctccaacccctttctctgcttagaggtatgtgtaacgtgtagtagaaagatcgaatccccacgcaaaagtccgtgctgctactcaatttttt

SEQ ID NO: 252894 - DNA, 384 bp, Gossypium hirsutum
gcttagttaatggttccatcataaagctagcaattagatcatattttaaaagtcgcagatcgatatgatcaaaaaaaaaaggaataacggtcgaaattacataatctgttaagggatgggcaggggcagagccagaaaaattatttggggggggcggatgaaattttaattctctatagtttatatctttataaattcgcaaggattaaatcaaatttttataattttaggggggccaaagtacaattttacctttactaatttaaaatttataaaaaatttaaagggccaaaaatataattttacattttagggggacggggctcatgccaaccaccctagctacgcccctaaatatgggctaaatttatatttatgtctaac

SEQ ID NO: 252895 - DNA, 136 bp, Gossypium hirsutum
attcgggctcatcccacgcagaaagggcaagaggggctggacggggcgcaaggtggccaacgtaaggtccaacacgtggggtggtaccccaagcccgggtcagacagggacaaagcaagggacacaaaacaaaagg

SEQ ID NO: 252896 - DNA, 183 bp, Gossypium hirsutum
atgaaaggtccctttctgggtttataatgatgccagattctagttcagctgatggggacaaaaaccatcatgactcaaaccggtggaaatggaagatcttcaacagtgagtttgcttttaccattggagagatgacaacacttaatttgccaagaggcttagcccatgggaatatgcaaactt

SEQ ID NO: 252897 - DNA, 266 bp, Gossypium hirsutum
  unsure (1)..(266): unsure at all n locations
cctaaaacgactcactagaagagaaagctcgcactcctgcacgcgccgctccattatccccgggtccttccactcctgcgctagcatttctcgatgatagagatagagcctagctctcacattaacaagaaatagtgctacaaagggggggaaatcccagtggccagtatggaatgcatagagaagagaggggcatggtcgtcgacgcctgagctttctggccacggtatactgtctatctgcggccngaattgttaccggaaaca

SEQ ID NO: 252898 - DNA, 215 bp, Gossypium hirsutum
atcataaataaaacagccagcatgttacttggcgaaattgtagtgattgaacgaatatttgtttactcttcaagcatgtgttgagcaactgtgtatcaagcaagaagaaagccattgtctttacccttctggaatatagaggctcataggaaataatcaatactttgatttttttttaaagcataattagatgaaaattaataagactcatagac

SEQ ID NO: 252899 - DNA, 362 bp, Gossypium hirsutum
atcatgactgtggcttccccccagcagggatgggattccacagctggttgacggtgttggggagagggagaaatagaggccgtcactcaggtgtctgagttcaaaacgtgtgctctcatttcaagggccagcaaccctccctgatgggtcgtcagcaacaaaggcgccttaagacgtgacgcaggccctgggcccagcttgaaagagacagggattgtccttaagagcacgccctgggctgagggccgcgctgggacttcccagctgtgccgcccctacaagcaggagcccagcagccccccgctggcgcctggcctgcccgccttcctggcggccccgggcaccacgttctgccccgagtg

SEQ ID NO: 252900 - DNA, 159 bp, Gossypium hirsutum
cggacgcgtggggttttgaagctggaaaaattcagcaacatatttccttgcttgaagtgatttaatgtctttgcttgatgatttttgaatttttggacccctaaagcataagctttcataagaggggatcatttgcaaatgatgagaggttaggtttta

SEQ ID NO: 252901 - DNA, 171 bp, Gossypium hirsutum
atgggccttcgcgggtggctgctccagcttccccagccctgcccgcgtcctggtgggaaactcagcccagaaggagtcttcgggggctcctcgcgggttggggaaccgtcggacgctggcgcagggggcggttcaaggaccccgtggggtgttcactgacccttcgtgctc

SEQ ID NO: 252902 - DNA, 410 bp, Gossypium hirsutum
atcaccaaagaaggaagctcgtcagcgccaggattccaaaatcccgcctctcaaggcttcctgagatattttgtctcccggcatgcactgcgtccggcccgggtgtcctctgcccggaagacggaagtgcagagacttccggtcggcgtgatcctgaggcgtgtgtgttggtttttcaggtaaaacatggctaaaagcttacggagtaagtggaaaagaaagatgcctgctgaaaagagaaaaaagaatgccccaaaggagctcagcaggcttaaaagtattctcaaactagaaggtgatgttttaatgaaagatgttcaagagatagcaactgtggtggtacccaaacgcaaacattgccaagagaaaatgcaatgtgaggtaaaagatgaaaaagatgacatgaaaat

SEQ ID NO: 252903 - DNA, 255 bp, Gossypium hirsutum
acgctactcgatggtgtgacccagtttcagacctaggcgaagacatcgactatcttgctgcattgctacgcatgtgacccaataccgacaacccagtccgagcaccttcacaggcttcaccgcggtcacttgtaccccttccacgagtacctctagtgctcattatcgtattacgcttttatgcatcaggctaatagctctagtgtttggtaacagatattttatgaaaaacagtatctattattcagtggtttc

SEQ ID NO: 252904 - DNA, 122 bp, Gossypium hirsutum
aagaaactcactcttgttcctataaaaccacttatccataaataaacacagcaactaacttcattacccaatccaagattttcagacatgccattatttaacaaaagctcaaaatttgactc

SEQ ID NO: 252905 - DNA, 406 bp, Gossypium hirsutum
atggcagcaatgctgagtaggtaggataattatttcattcagtttttggagctcagttaagccaatgcatttaaagttttgcatgaggaacattgactttattaagcattttcagatgtggtggttgtatttttgcaccaagaagtgtttggataaccacacaaaagcatgatgaaaaggcttcttgtagtcccatactttcttgtgaactaatgttgtgaatttttgtttgcagtcacctgcatagttcctacaggctaatgtggtaaaactgttgatttcccaatttaaccttaagtttctgttgcttataagtgattcatttgctacagctggaatatgggaaaattaatttgggcttagtggttacaaatatgtgtaagtggatgtatatgtacttaaactg

SEQ ID NO: 252906 - DNA, 262 bp, Gossypium hirsutum
tcgcccacgcgtccgctaaacattaccaaaatatggggatgggtgtattaaaactcgctaataaaggtgacttgcttgagcatttttgactagggtaactgaccagccatgctgagtgcgttgcactgtgtacgtgggcttatacgaccaatgaacgctcggtattatcttgaaatgatcctagtctcccaagcaatctttaccatttgcaggaagctcttgatctatttaacgatggttcaagcactaatggaaggagaac

SEQ ID NO: 252907 - DNA, 132 bp, Gossypium hirsutum
gtgactcaaggggaggaggggtgcatatagaatatcaatccttcaaccttagcaccgtgggggaacaagttcaatatatgggttataatcattttaaacgctaaaataacctatacagtaacacttataatg

SEQ ID NO: 252908 - DNA, 271 bp, Gossypium hirsutum
gtttggctggatccatgtgtcctccaaagtctgagttatgttaataggcgaaatatatgtggggaaaaatcaaatgaaattgaggttagtagtgatatttgaattgaatgagaattggatttgattgatgaatgtatacatgtgtgaaattgaattgtataatgatttgcggggaatttgaaaatgtgaatgaattggtattgcgattgatttgggttcgattcaagcacgtttgcatgtatatgtgaaaaaaaggaaaggtatgtatttg

SEQ ID NO: 252909 - DNA, 395 bp, Gossypium hirsutum
atcattgatgtcctacccagctaaaacagaggccaggagccagggaggaaaagcagtcaggccacacaccactgctcccgaaatggacttctctgcaagcctgactcctaaaactgtgcgttgtaccctgaaaccagctttatccatagcttctgcgataaatggctgtaagtcttggactccttgctccaaaagcagcaactcagcaatggaaccttccagctcccaacccttgctagtgcccacgggctttcccaaagggcaagagaacatttctcctcctataattgccatctctttgttctcccgacatggtgaacaccatccggactgcgtgtatgtcccaaattacaattctttctttgctaatgaaatatgaaatttagaggctcttc

SEQ ID NO: 252910 - DNA, 358 bp, Gossypium hirsutum
atttcatcagtttctccgctgctaccatgagcctctccttatccttcactcatccaatcttaagccgccacgtctattccgccgtatttcctcctccccggtttctcttcctctctcctctcatccccaccacgtcccgtttccctattctctaccgcgcgccccaacgcgccaccgcactctcagccaccgctgtaaccgcctctatcttccgagataccgctgcttccgcctctgtctttgctggcgcttatgctctcgtcttcaccttcgatattctcactcaaaaggagctcattcagcagaatgtaagtagaaaattggtgcatatattatctggattactttttgcattttc

SEQ ID NO: 252911 - DNA, 372 bp, Gossypium hirsutum
cggacgcgtgggggatcattcttaatctctatatttctcgatatttaaaattttagtctcgatgcaaatgaaagtcattagatccatatactgcattttttaaagtaatatgtgaaaatagcacattgacatgatgctacacatatgataatatgtttttagcattatattttgaaaataacataacttaatgaatttaacaactattatttggcaagaactgaaatttcaaagttcaaaaagtattaaggattgaaaattacaaaattaaagtatatgaagtaacgactagtttctcattgcttttggaaagtgcagtgaaaaaacgcttataaaaaactttgtttaaaatttgagtgtttagtattatag

SEQ ID NO: 252912 - DNA, 316 bp, Gossypium hirsutum
ccgacccgtgggcgggcgcgtgggcttattctagcgatattaccaggggtcaatttgagagatgaagcttcaagaggcatgggtggtggttccgtgggtgggtttggaaccacccacattttggattttgacctttaccaacctggttattggcttaatatggaaggttggatggccatgggtggagctcaacttctcatattggggatttgggccggcattactaggcattcattacgcttgaagggttggctggttgttgtgtggggaagccctgttgtgttcttgggaatattccacttttcaccttataaag

SEQ ID NO: 252913 - DNA, 374 bp, Gossypium hirsutum
cggacgcgtgggttcaggtacaaacatattctccaaatttatagatcgttgttgtactatgtttcgtcctcgaattaccggtagcctcttcctcttccacgtcccccccaacctcgacccctacctcttccaccacccctcccaccataagatatgccttccaatgctctgttcacaagctgattttgcatgccaccagctccacggcccttctttgtcgcaaagttattagatccattagctgcagtagaaggtcgctttaccctgcacaacaattgcacagttgaatttgtttcgtttcagggtcacacagtaaaaagaatcctcttgaaacatgaatgacaagggagatagtttatgttgttcaatactac

SEQ ID NO: 252914 - DNA, 334 bp, Gossypium hirsutum
atgaaacgaatgcctaaacaggaaacttggattggtaaccttccaattcccaccttatcttgattttttatatttgtaaacttttccttttgttgcaaaattagattctttacttcgtgaattttttttttaagtaagattctttacttcgtcttggacggcttgacttgtttgtgatgattttgtattttggctttcatacttgtttggattaataatggttttctcttctttcttgccctttcattacctttgaaattgtgaggtcgttcattgttgcaattattatggaattcggcgaaggtcctttttttttttaataattacttaatct

SEQ ID NO: 252915 - DNA, 239 bp, Gossypium hirsutum
atccctgatgttggctttgcttgtaagaagtttaatggctgctctggcctgctatggcattttggctgcaattttgtctggcagtgggtggagaactggtatcaagaaagggaaccgggagtagtgatggagataatagtgggggtggggacagagaaagacataagggactgtccctcttgaactctgccttttggcacattggagaatgggacaggggagatgacaataatggaacc

SEQ ID NO: 252916 - DNA, 363 bp, Gossypium hirsutum
cacacatcttgctagccgattcttctccatttagcaaccaatgcacatatgtgctcacacaaaaatgctaaaaaggaggttcaagaatcatcaagccatcatcacatgcatcattaacaagcttcatattttgcatgcaatggcattaacatgacctccacctaggccgaatcttaactcatcctcatgcctcatcaccacaacatcaaacatcaaccaagaatgatgcatccatggtcaagtgccatttccatcacatagcaagatttagaccatgggctaggtagaactcaagctaacaactaaaacatgcatgcatctcatggaacatcatcaaacataccttagcctagctacatgcat

SEQ ID NO: 252917 - DNA, 240 bp, Gossypium hirsutum
cccacgcgtccgcttataactgtgttgttaaagacaaaatttttaaaataaattaaattctatatataaaaagaaaatatatatccttatatttcctatagaacatataatacatatttcttgtacaaatattaaaatatatctaataaaaaaataattaacacatgattcattacccataagatagaaatcacatgatacttaaattgtgttatttttaagtttcaatatagtacattc

SEQ ID NO: 252918 - DNA, 314 bp, Gossypium hirsutum
atttcgggatttttttattaaatagtttattccatggtttccttttttttaattatctaaattttaaaaaaaattaattatttattttggggggtgggttttggttttttttttaccctattaaataaatttttttttaccttaccattttttccaccttccacttccttgtgtaaaagtattattggaaattaatttggaaatttggtaaaatacctggttttgatattgatttttcctgcggttaattttttttaaaaattaggtggcttacctgtaattaattaaaaaagggattcctttatttggatttt

SEQ ID NO: 252919 - DNA, 389 bp, Gossypium hirsutum
atgcttgcaggcttggaagtcctaagtgatgaccctgatctagtgaaggtggttgagtctttaacttgtggaaagatctttgcagtggaaatacttgacaaagctgacattccacttgttgttctatatgatacctcaggagaagatgatatcaatatcaatgccacctgcttgaaggctatatgtgacaagtcactagaggttcacctgcaggttgacgccatgtacacaaatgtcaaagtaactaatatttgctctgatgggacactctactgccaggtgccttgtaagggtctgaacaagctcaatgaccttctacataagatagaggactacttccattgcaagcacatgacctccgagtgctttgtttcattacccttctgtgg

SEQ ID NO: 252920 - DNA, 375 bp, Gossypium hirsutum
cttgggccactttgacaatttggcctgattttcaactaagtatggatggatttcttgattgggctgggaatttgcttattgggcctcgccttcaagaatttgggcttttgtgactcgtatcattccccccttcctcaaaaagattcgtcctcgaatctgaaaaatcaaatgaactcgactttcctctatcgaacgggactaatggcaattgagtccactaaaaagaatagccatgagatagtaaatagcaacggaaacaagcttgtagtccaatcataagcataacagaacaggtataacgtatgtgaatggacagattcagattaccatgcaaacaatctaatttactcaccactgcctcgtcaaatatttgaa

SEQ ID NO: 252921 - DNA, 342 bp, Gossypium hirsutum
  unsure (1)..(342): unsure at all n locations
atcaacttttcctgccttncccacgccccaaattatttgggtgttttggtacctttctcacatctggaaaagagacatactgtggctgattctttttccatatccggggaaagtctgttctggtacctaaaggtgagtgagagctttctttgatttggataaaacagtccctccagcagctattttgggttcactcccagcttttaatgattgttccccgggggaccataaatgtaaaggaggttagttaacaaggttcagtgtgatggtgtagttgcttttcttgtttgccaaaaccatttgatcaggcacaagaacttgttttagtgagcgtcctttatt

SEQ ID NO: 252922 - DNA, 374 bp, Gossypium hirsutum
atttaataaattgaacttttttccacaaatccaagtataaataaaattttagaaaaccagtaacacgtggcacattttagtgaaccaatatgttgatttctttttcacataaaaaatttattttattcttctattttttttgtttattttaatatttaaaatttatttgttaaatctttcaaaatagatgaaaaaaattaacatttgttaattttgttaatgtgacattcacgtggtaatccacatgcatgtcacattagtaattaattaatttaaaaatgttaactatttaaataattttttaaaaaattaattaattactaatgtgacatctgcgtggtaattcacatatatgccatattaacaaagttaac

SEQ ID NO: 252923 - DNA, 361 bp, Gossypium hirsutum
cggacgcgtgggcgcctctggggctcttgttacttaacctagggctgttctttattttccttttctctctgttctttgttccgtttgctttacttctttctgcttcaatgtcgtttaggggattcagtcgggtatatctcactctgtcatgacttctttattggtttatttccttttgagatgttaaaaaaaaatgtttaatctgctatttcttatgttgatatcaatttattgtatctgttaaggtgactttctgctattgcatgttgtatatgttgtttggttttctgtaaaactttgaattacttctcatgttccaatcgatgctccaaaattaataaacatgggcacccatttttta

SEQ ID NO: 252924 - DNA, 218 bp, Gossypium hirsutum
acttttttaaactctacaccggaattaaattatcatgttctatctttaactcaattccatattatttatgaaaaccatgaggaactgatccctctatggggattagcgagtggaggtatgatttgttaactgttttatagggctactcaacggatcaactgtttgggaaaggaagaacctaaaccctagggagtcattaacgggggcatgaacccagc

SEQ ID NO: 252925 - DNA, 230 bp, Gossypium hirsutum
gcgaaagatggcaacaaggaagagaaaaaaggagaggaaaaagaaggcggtgaggaagtaaagaaagaagccggtggtgaagaagacaacaaagacaaaaaagaggaaggtgatcaaagcacggaagccaaggcagctgccgcagaagcggcggctgaaggttcgacggaagagacgaaagtggcggtggaagtgaagaaaaatgaatactgttactacccgccaaagta

SEQ ID NO: 252926 - DNA, 184 bp, Gossypium hirsutum
atgtgggatcgccgttcttgtttgtgtgtaggtgtcatagccacttgacaatgcaaatcttatgtatgacccttacttgtaagaccatcatccttggggttgagtcccctgtccccattgtgaatcgtaagggcaaaattccagataaggtaagcatttcttccaaacaggggaagcttatctt

SEQ ID NO: 252927 - DNA, 395 bp, Gossypium hirsutum
ataagatgagttgttagaccaatcctttagcttcctgcaatatagtggaggaaaatcaatggtagcaatgggaggttgtggtatccctagctgagttgtatgagcttttgctacctggtgcacctcagcctgaagattgctagagttgcttgcctcatgacatgggtcataatgggaactttgtcaagccccctacactggctgccaacataaatattcagtaccccaacgtcacccagctacagcccaacatcacccagctattcacctactagtcccaactacacgcctaccagccctaactacagcccaacctcttcaagctactcttcaacatcacccagttattccccgacctcaccaagttactccccttccagcccacgatacacacc

SEQ ID NO: 252928 - DNA, 394 bp, Gossypium hirsutum
atgggaagtgaatcgctctcgtcggcagtgtttgtggagggcctgaggagacagggaggctgtgccaggctggaggagtcttgtctttccgaagctggaaaggatcttacggaggttcgcctttccctgcctgggaagaatttcccctgtggtagcagcagcagcagcagcagcagcagcagcagcagcagcaacagcagcagcagcagcaccactgcctcctcttctggggcacagacagaatgcctgtgctagagcgctatttccacccagcagagctaggcaggaggtggacaggcccagaaggtgtgctgccctcctccccgggaagccggccggggtgccagcaggggccgctgccctgggacttgccagagatgatcaggatggtaaa

SEQ ID NO: 252929 - DNA, 287 bp, Gossypium hirsutum
gtcaacttaaatggccaaatgcataccaacatttacaatgcagatctcatggctcaaaatcataactcaaacatatcaagataacactagcctatacattccatataccatatatacaaagcgccaaaagtactaacgagatgatcaatagtgtgataacatctcccgacgatccccgagtctgagctagctttgataatctataaaataatgaaaaataaacatagtaagctttaaaagcttagtaagccatatacaaataaagttatcaaatgagtatttgcata

SEQ ID NO: 252930 - DNA, 389 bp, Gossypium hirsutum
atcgcgccggcgtccgccttcgggagctccctgctaggctcgggcggtagcgccttcgccccgcctctgcgcgcgcaagacgacctgacactgcgccggcggcccccgaaagcctggaacgagtctgacctggacgtggcgtacgagaagaagccttcgcagacagcgagctatgaacgcctggatgtcttcgcccggcccgcctcgccgagcctgcagttgttgccttggagggagagcagcctggatggactggggggcaccggcaaggacaacctcaccagcgccaccctgccgcgcaattacaaagtctctcctctggccagcgaccggcgttccgacgcgggcagctaccgccgctcgctgggctccgcggggccgtcaggcac

SEQ ID NO: 252931 - DNA, 388 bp, Gossypium hirsutum
atagaatttctgaagagaagaagtagcacaaagaggaccgacacaggttaaacgttctacgtcttgataaatcacagaagcagcacccaagccatcttaaagggatgttggaagaactaaatgcaagtgaagattttttcacagtagtggacacatagtatgtgtttataatttttgtcatcataccagatcacagaatttttttctacttttatctttcacaataaggatgattctacatctacaagagtacagagaagctacagtttatgtaagatacacataagagacatgccgctacagaagaatgaactctgacattcctatcttgtgaccctgggctgatgacttgaggagaaatgtgccattacaggggttggtgtccttt

SEQ ID NO: 252932 - DNA, 382 bp, Gossypium hirsutum
atgcgactttgaacccattttttggcagtgttcatattattaaactagtcaaaaatgctaaaataatttgggtgaaaatattttttaagtagtgttatagtttcatgtttatcttttaatatgttttgtgaaagttgtgtcttttcactaattacctatactatgccaatatttccttatatctatctgtagcatttatagtacatttagaagagaatatgaatatgaaacttaacactttataaggtaaaaatgaggtttccaagacttaataatctgatcaagttcttgttatttccaaatagaatgcactgggtctgttaagggctaaggataagaggaagataatgttacaaattattaatgaccaaatattctaaaa

SEQ ID NO: 252933 - DNA, 288 bp, Gossypium hirsutum
cccacgcgtccggtagaagaccaagtttaaaaatgcatagcataatttattattcatatgtataagaatctagcatgaaagtattaaattgtcatgacctgcccctgtgtattatatttttattagttagcttatatgttgattatgattaaattaattatttgatttgttaataatgctcgtgaccctaaatcgtcgacggagaagggttaagggtggtacatatttaagtgggtaggtttatttgggttttggataatgagtttaattgaatcgggttagtgattt

SEQ ID NO: 252934 - DNA, 361 bp, Gossypium hirsutum
gtagttacaaaaaactaggtgcacaacccctttactaaacactaacagatccatacttattcatttgacccctttaggcccaatctcgttcacatggcctatcaggtccaatcacattcatatggcccaccaggcccaatcacattcatatggcccatcaggaccaatcacattatatggcccatcaagcccaactacttcgcacctaacagttagatttacacaagcaagcccacgagcccatcgggcccatcgaggcccagaacagccctaacacctgagaacgctcgtgacggctttcagcattttttgatttctaacaaagaagggtgtgaatacacacctgtttatgagaacgccc

SEQ ID NO: 252935 - DNA, 370 bp, Gossypium hirsutum
aaaaaacttaaaattctctctgaaatgagaggagagagagagaatgctgggttctggcctccgtcgagccgaaacttagttctcggcctcacgcgtctacgcgccgtcaccaattccttcctgtacggtggtcgaaggtccaaaccccgattttcaacgcaaataaaggttcgacccttctccttttcattatttacagtttatacatgtatttaaaagtatcacctttgagtacttagtcgattgaaatgcttaatgcgtgtatatgtgcgaaaataaacttttttgctgattctttagtttttattgattctctgtgtatattccagtgcatgcccttttacaggtgaaaagaaaggctttattgtcc

SEQ ID NO: 252936 - DNA, 382 bp, Gossypium hirsutum
aggatattaaaaattctctccatctttagctttcttcttgttctacggtgagtgactccggtggcttgtttagcaccggagtgggtcaatctttccgtttcctttttgtttcgcttcggtggtatgaagatcaaagaattaagggtgcatcgatatttgtgctggttgggatctagtccgtacgaagtaagtgatatcagatctttgagatctgcggtgtggctctagatccttcttattttgtccgccagatgatgaggaatcgatcatttcctgcctgcatgtccatgtttttttgctgattgctatgtgttcactccatttgtcgatcccctgttaatcaactatctttagactacattggtctgttgtgggtctgatc

SEQ ID NO: 252937 - DNA, 377 bp, Gossypium hirsutum
cctaccttcaccaatgatcaaagactaccaaacctctttttagtaattaaaagtaacataaatttacagttgaaacacaatcctagctttaggatatttttagaatattgcgtaacaaagcttggattgtgctataaatgttattatttgttacttttattattggggaagaaaggtgttggttgtggttggcaacaagtgcaggatgaagaagagaagagagaaaagagtaggaaaatgaaggaagtgaaatattgtcatggcaaaatgctagttggattgccaacaagaatgtcatggaaattctaggaagatgatgcaacattcagtccatgtcactctcagctagctatacttgtactagataaaccaccatg

SEQ ID NO: 252938 - DNA, 301 bp, Gossypium hirsutum
ctgcaggcatatatccagctcgcacgatctagcaactgccaggtttaacttaccttacataccaattcatacatgaccaatggggtaacttactgccatggcactggacgagtcaagacaacatggcaactgtgaaaaccatgctgttacccaagtatatgcacattgcagtacatacaaaactatacagcctagcgtcagtccctagatgaccagaccagtcgtgcttctgaacagactgacaggctcaatggtgaatggctcgcaatgtgtggaatccaatctagcacagctggaacca

SEQ ID NO: 252939 - DNA, 312 bp, Gossypium hirsutum
gcgaaggcttcgaatatagagaggggggcgtggcgtaattggattaaagcataagaccagagacatatatttatggtgaggtattaatcaatgcttgaagtacttttaccattgcccattgcggtatagagataaagagttgcgacaatatactatagtgcctccacttataggtgttcgggttcttaacaaaatacccgagtctcatgaactcatatttactacgtaggtctagtggtttgagatcccaatgccttttctctcgcggatgcttgcactaactcataaagcattattagccttgccagagtt

SEQ ID NO: 252940 - DNA, 403 bp, Gossypium hirsutum
atccactgcactcctgtctgggtgacagagcaagaccctgtctaaaacaaatgggcattttggacaatatattcttgataatggaacctggacagcatttatcaaacacggtagggaaggttctcattctgcattataaaaaggactgccacatatcaactgttagagataggaaataagatggaaaatttttaactgtttattttcttaaagagacttcctgccctgccagagatcttcaatagcccccagtcagtcatccagaagccattcacataattgattatcttggcttccactttgaaagagaaccaccttttgctatacttggctgcattttttgctttaatgtcttctgcagaactaggttcttctggtgtttagacgtattttcctatttttt

SEQ ID NO: 252941 - DNA, 271 bp, Gossypium hirsutum
gcgtcatattatgctagagatggaactgaactgttggatatgaataatacattcaacactttgtacctagggagaagaaagacttgtatgtaaagagagtacagagaactgcgttgtgatatgatatgatcagtgagatagtagatgacaatgcttgagttgatgcaacagacactactgtagtgtaacatttgattgctttaaatgctacattgaccattgagaaagtagatgtttcctatccaaattatgccatgaagtgtactgtatt

SEQ ID NO: 252942 - DNA, 407 bp, Gossypium hirsutum
ataagctcaccacctatgagtacatcgtgcagcaccgcccaccacaggaggccaagggggttcacagggagctcgagtcatgtcctcccaagatgcggcccattcaggagatggagttctacatgcggaccttcagccatgtgcgcccagagccccctggccaggccaggccagcagcagtgaatgccaatccctcccagtttcttgccaccagtggccaagcggaacctccaccaccctcttccccagacactgttgccctgcctccccggatccgaccccagaaaaagaggaagaggcgcgtgtataaagtgcggacgtctgagacctcggatcgggcgtcggggcccagggcccccggccgccgctccagctcgtcgacggattccgcggacgccagccctgtg

SEQ ID NO: 252943 - DNA, 286 bp, Gossypium hirsutum
atgaagagactctgacacggggcgtaatttatacatactggggatttgtgactgacttgatactaattcagtttgtgcagtgatgatgccagtgtcctaactggcttattgccatggttgggcggaatgagtacagtgctcacacattgtatttaatgacatatacaaagcgaatgggaagcgaggtcttgtcatgtggatatcatgtagaatgcatgtgggtgcaccctttgaagagcggagggctcttgtgtctgagagccctctagctgtccacttggtttat

SEQ ID NO: 252944 - DNA, 381 bp, Gossypium hirsutum
taccgaaccccataattcacaattgaagccatacagctatgggctgaagacagctgggctggggagacgatgaccctgatgtcaggagactagaccagtcctagttccagggggaggcctgcagacccctggccccttccaccacctctgccctccatctgcagacctcggctgcaccaggctctacattcactcccccaagtctttggaaatttcctcctttcctttgaagtcacattttccttcaaaattttttgttttgcatccaaaaccaaaagaaataaagctgtgggaggctgtaaaaaaaaatcaaatatgtttaattttaataaaattataatcaatttaaatattctataataataatttgattataaaagg

SEQ ID NO: 252945 - DNA, 396 bp, Gossypium hirsutum
atgttttgactttttttctatttaatactgtgtatttttaaaatctgggtaatattgtatattttttaaaaagtatttttggttattggttgtggcaaactgaatttgctttttaatacttaggaatccacagcttttattgaaatagctcttttaataaaaacgactactgtatcttggcgtacagtgtagtacgcttttaaaaaaacttctaaatattcacagtttttctttaatttcatgattgttttactttctgtgttttaatggtctctgaatgtcagttttatagggatgttcttgccatagagtccatctattccattttcagtctatttgaaatgtgttattaaagtattatttattttaggttttattgattggattgctttcaag

SEQ ID NO: 252946 - DNA, 375 bp, Gossypium hirsutum
aattaggcaatttacccatttttcaaaaacacgcagatccttcctgggtaatcgggtcaacttccagatcctagtctaaaacgatgtcgttttgaaggccaccgttcaggccaaaacgacaccgtttacatatggctatataagtaaattttttaacctaaaaatcatttggaaacccagtttttttaaaaaaaaaactcaaagaaatcctctgtaggaggattcagggttagccttggagcctcgtcggacctccgttctcaggcacctacacgtgcacgcgccaccgctagggccaccacacacgacggtcggagggttaaaaaccctcgtacttcggagcaaagtggtggtaagctccttccttttaatatt

SEQ ID NO: 252947 - DNA, 379 bp, Gossypium hirsutum
cccacgcgtccgcgatgtttcaatacaatttcaattttataactttttgctcattttggttggtttctgacatgtttcattcaggttaattatacgtaaagggtagaaagatgagtcgcaggaatgctccgaagcttgagttgaagctgaacctatcgccaccaagggcaagggttaatccaggagtggaatcaccaagccgatcagctaccatatcaccgacatctcctccaagctcatgcgtgtcgtcagagatgaaccaggacgttgatgctgctaacgtcagatactcaagcagccctgaggcgacatccatggttcttgtagggtgccccaggtgcttgatgtacgttatgctttcagaggatgatcctaaatg

SEQ ID NO: 252948 - DNA, 381 bp, Gossypium hirsutum
cccacgcgtccgcggacgcgtgggctggggcagagccttttaaacacttcctccatcaatataatccatatcccatgcaatatgtcatgtatgcagaatgtcatgcccatatttgaatcaaacaatcacagtcaaggcattcatatcaccaacatatgttcataatcaaatccgtcaaccatacactctaagtcagtcacttgcccacaagggcaaaacagtcatttttcatattataaaggtattttcgtaattttgccaaatatcagggttttccatgttcattacaattatcaatattttcgagtgtttaaataatgatctttaacccactttatcaaatttaggcttttgggcccaaaacccctaatgggccttacg

SEQ ID NO: 252949 - DNA, 391 bp, Gossypium hirsutum
atctttgtttgaagaaagggatgaagtatttttctcttttccatattttcctggtgtccttttcaaagggttgtgtcttagcaggtgtgagagcctgcactccttcctgaacagcccttactctgtgcccaagtcaacccaccggtgctttacaacagataatgatgataggaatagcttgtgagattgcccaggggctctgaacttgtgactgcctttcctgaagatgttattttcatggaaaaacatgcttgcttctttattacagggatgttttctttggagaaattgtatgaggaaaggcaggatttcctagggccgatgaagcaacttgctaaagtggaaggagaagacaggaagtcatgaaaagggagctaaagagttaaataaa

SEQ ID NO: 252950 - DNA, 384 bp, Gossypium hirsutum
atgttttctggaaagaacacaatcacccccaggtgtgaactacttctctaggggacaattgaagcttagcatctttcacttttctacctactgacccaaagtccttttaccatacgtcgttaccttgctaattattttttcacacatatcttatttactagtttgttaattgcttaaaagtaaagattacatcctatctgttcattgatcagtgattcaacaaatacttagtgagtgccaaggaatgcattagactcaaagatgataacacaggtagctaaaagctgtgcgtgcaaaatcctctcaatccttgatacattccttggaggtaggttctggggttagccccatattacagataaggcaactgaggtcagagaaatt

SEQ ID NO: 252951 - DNA, 378 bp, Gossypium hirsutum
atttgaatgaactttgttcaaagagtgatttttctcctctctaaattcgtatgagtttcgatctgacttatctagcgtgctagtggcgtctatcgttctcttttgaacttatcaccttgctttggtgtggcgttcaaccttctacaattccgcaatcccaccttgaaccgaatagaaatcggggtgacacttttagtgttgaatcgtttctggtgtttaagctcatttatccattccaccgactatcctagattttacccaactataatatctttttacaaaaccgagccatcatttatcaacttccatttttcttatttttatacttaaatcgagcctactacccttatgaaattaccatcaccttagccaaccttt

SEQ ID NO: 252952 - DNA, 383 bp, Gossypium hirsutum
aaaccaaataaaataggttctaaaatggattttaattaagtataaatacaaattcaaccttcaattttatatttttttaactaaatttgataattaatattttaaaatagttaaattgtttttaacagaaatttaattaaaacagtggcaaccctcaatgtaattcatgtgtactctatactaacatgccaatatttgttttatatgtcatgtcatcaaatatttaaaaattataaaaaaattttaaaaatttaaaattcaaaaaaaattagcatgaagtatacgcgaattgtcaaatgagttgtcaataacatgataaacaaatgatgtgcatttaatatgatgtatttacatatttaaatctctttttattcatattttaa

SEQ ID NO: 252953 - DNA, 381 bp, Gossypium hirsutum
aggcctaggtgtgcggactatgaattagacgtatgtaacaatggactaatttgcaatcttttgattggtgcaatatggcatcacattactttatcaattttttatgattatttttttctattgagtgaaacttgcaatcttttttaaaggtatgttagttatacacaatcaacaacgaattctttccaaaattcaaaaggaactaaaagggaatagatttggaaatcgattttggaaggtgttgcactagtttcatgtatgatagacttgcatagcatcaagacttttaatgtagatacatgattcaaaaatgattacctaatgaactacaaagaacaatggaaaaaatttacctcatgcaaacatgaaagcttaaaacct

SEQ ID NO: 252954 - DNA, 358 bp, Gossypium hirsutum
aacaatgaaggggttactcctgattctgctcataataaactcctgagcaaaacccattgaagagaaaagagattttggtttcggtttttcttagcagtgttttttaacaaacaatagaaaaaaaaaacgataggcaaaggaatgaaagagagaaaccggtttatgtaaaggatgctatgttcatgaatattttgagtactgacagagaaagtaacaaataaacggagagtggtaagggagcgcgtgtggcgcgtggaatctcttttttttttcttcttctctctttcaatttcttaaccaaaagcaaacaattgatatccgaaatactacaatcttaacatcgaaaggcagagattcg

SEQ ID NO: 252955 - DNA, 384 bp, Gossypium hirsutum
gttcacagtccttgcttctaaaagaaggcatcactcaaaccggatctccgatctgcacagatgaaagtttggaggagcaattggatgacccctttgagccagaggagccagaggagaggtgggagtcctccgaaggtttcgatgttctcgtggataacaaatcagaggatttggattatgggaatgattcggaatatcagaaggaccctgaagaggagcagacagattacttctttagttatgattatgaagattcagttcagcatgagaccaggtacccggatttagaattttcgtatgatcgagatgcgtatgatgcttatgagggttcagacaatgagtatattttcaataatccgaggaatccttttgcccaccccggag

SEQ ID NO: 252956 - DNA, 404 bp, Gossypium hirsutum
atgccaggctggtctcgacctcctgacttcaggtgatccacccgcctcagcctcccagagtgctgggattgcagatttgagccactgcgcctggccagggcaggcccctttaagtgtgcatgagcaggtgcggggtgttgtgttcttcagggaactggggttcaaccctggaggcagcaggcatgcatgcacgttgcacacacaagtggtggggcgcgagggctgagggaagcgggctgccaggccgtcagaggctcctggtgaccgtttgtggcccgtttttctgggtctctcccaagagtgctcatggcccaacatggctcgggtcccccatgcccaagggcagcacagaaccagagagggaacctggcagccacagggggtgggagaggcaggatagtggt

SEQ ID NO: 252957 - DNA, 374 bp, Gossypium hirsutum
cagactagaatatctgatacccaagaagacatcgctgaggcatcgattgcctatgggggaccaggggtttatcgattttattgctcatttgcttgaagtaaacccaaaaaagcgcccttctgcatcagaggctctgaagcatccatggctatcatacccatatgaaccgatatcagcttgagttgcatgcagatttgcttgactcttattgactggggaaggaggtgtattttattactggctcggagttggttttgatctatttgaagtcatcactgtcaccccccttcacatgcctgcaaaatgcaattgaaaggtgtgtttgattttggttgggtataaatatttatggttttaattcctttcccccgata

SEQ ID NO: 252958 - DNA, 397 bp, Gossypium hirsutum
atgcaaggcctcctgcaattgttcaaacagcatttattaaattcgcagtacacaccgagtagcgttatgtagagaggagtcagattatctacttagattcggcatctacttagatttagcatatactagctgagaaattgtaggcatgtttgatacacatttgattccaaatctttttcttctggatctgctttttattttacaaaaatctttttcatacaaatggtttaaaagtaacaaaatctataacaacaactttggatttttatgtataaactttgcgatttaaatttactgaatttaattagggtgaaaattttgaaagtggtattctcacatgactaagttcagtaaaaccctggattgaaagtgagaattatgttcctagaacaaaatg

SEQ ID NO: 252959 - DNA, 387 bp, Gossypium hirsutum
cccacgcgttcgcggacgcgtggggtcgccatttggagttagctgccatcttggtgcaaaaggatcctattcgtgcagcagcttgggatccgataagcactcgtcttgttctttgcactggcagctctcatttgtatatgtggaccccttccggtgcgtactgtgtaagtaatccgctaccacagttttctataactgatttgaaatggaattcagatgggagctgtcttcttctcaaagacaaggaatcattctgctgtgcagctgtgcctctactgccagaatcaagtgactattgctcagatgagtgaaacaaatttctcttgtaatttgtcttgctgctatctagagaaacagaaatataaataggcattctttagttttttt

SEQ ID NO: 252960 - DNA, 361 bp, Gossypium hirsutum
atgctggggtgagggtagacgtgggggggctgggggggttactggggtgggcttttaatttcctcccctcgctggtttctatgagtctttcagacaagaccttaaatgatttctgtctgctctgagcggacgttaaaatgggcccccgtcccctatccacaccctccttcctcagggcacttactaagggaggggtctccctctccatctacccaatggcctacctgcctccaaccctgcctgccgccccctgcccaccccacatctactggccactgaaacacaaacctatttatttctaggcctgtagaaaggaaatcggactggggttcccggttaagcaccaagatggctcctgggc

SEQ ID NO: 252961 - DNA, 340 bp, Gossypium hirsutum
cggacgcgtgggctcggctactaattaactaatcaattagttgatacttgcttatctcccgacttcgtcttgcctatgataacttcctagggttgtcaagtctagtggtttaaggatatgtaatttgtaccaactaatccctcttcggaaaacctaaatactctgttaattacaacctcatgcactcgttaatctcccctaggggatttagccactcatgttattcataatatctttattaattgaataaacaatgtaaagaacatgacgagaagaaaagagatttgaataattgtggatttaatatcgaatggggaatagagtagtaaatctattggtt

SEQ ID NO: 252962 - DNA, 394 bp, Gossypium hirsutum
atgaaagtggcattcattaggaaatgaaaactgctgtctctggcatcctgtagtttatggagggtggaagatgaagccaatctctacttgagaaggctaccaaggagagaaacattgtccccaggggaaagctagattttagacaaggcaaagagcaggaaggggtggttgaagagattgagaatgacattccagaaaggacaatagaaagtcttgggaaggagggagagaggggaagagagaaaggatagctggtcacatagagtatctatagggataaaagtatagctaaaagaacctacattttaggtggaggtaatacagctgcctaagcttaagtgaactgctttttgaatcttagtttgctccttcataaaattggattaatataata

SEQ ID NO: 252963 - DNA, 402 bp, Gossypium hirsutum
atttgcctttatgacaagcatatgttttgacattcaggaggagtagtgtgtgatgtgagatttgaaattcatttcctttttgttaaaatattaataaaactgttaacatgtttgctttttctgaataaatttgacctttaataaaacacttaaaactctacagatccatttgaacgtctactaaaatgtcactttaatatttgaagttgctatctcattactatttttccttctatttaaagatggccttcgccggattttatgtcaggttggtttgcaggaagggccagatggtgaaaactcttctctagtggacagactgatgcttagtgattccaaattatggaaaggtgaatcttttaactacttttaaggtgtggaggaacctatataactaattgg

SEQ ID NO: 252964 - DNA, 389 bp, Gossypium hirsutum
atatcaatcccgaaaaagaaatttcaggttttgcattgaattccatcaagcgagcaacaatgggtttcttggagctgctgtaatgtaaattgtaaatgtagtgtatgtccatacactcaacagaggagtaaaagaaaagagaagatgcaatctcgtgctccgccaaccaaatccaaatgggaaattccatcgctcacaaaacccgttacgcattgaccttcctctgcttcatacttctcgtcctctttacccttttcctcttcaccaaacgtacgctcgaaccctacctctccttctatcaaccatccttccatatccactcttcaaatgccgcattcattgatggtaaccaaactcttgacactgctcacgagaatagggaaatgtgt

SEQ ID NO: 252965 - DNA, 388 bp, Gossypium hirsutum
tgaatattggtttgagtgagtggttaatgagtgagtttgaaacggttcaacctttttaaaggaatgggcgttggaaagcaaaaatattgtgaattgggaaatgatgtggtaagcaaaggaaactacttcatggcgtgaggactacgcacttgggtcatgggttgcgcgtcggtgctcgcaaccatgacaaactggtgcgatccatcgtgttcgagggaggtcatttagcccaaccaaactggcttaaccaaactggcccagtgattggagagattaaaagcccatctcaagagcctgatagaaatgggaagtgttctagaagatataattatggaatcttagagttctatttgtatatagctggttatgtaagcttagagttctaatt

SEQ ID NO: 252966 - DNA, 388 bp, Gossypium hirsutum
atctttaagagtgatactttgaatacaaccttttatcatattttaagttttaatactgggaaataaagtgtctacattaaaactttaagaaaataattgaatgaattttaggcccaaataaaagtttgatatattgtatttattctctcctttgatatagcagagacaaagtatgtcctcatagaagtcatttttactttttctggatatggccttcataaatttgcatagaaaaaatattttctcctaaaacaccataagaaactactactttttttctgcatggtttaggcctttattatttaagataataggcatttttagaactattatcaaatagttatgtttatttagattcaactattttttaaaagaccagactattttt

SEQ ID NO: 252967 - DNA, 370 bp, Gossypium hirsutum
aaaaaaacattaaagaaaataaaaatcaccatcgttattatttttcaaatcatggtacaaaagagaaaagatcagttgttctcaggttaataatttatattatgtctattacttttggttcttcgattgtcagttctctatagaccgtagaggaaatgtaatttattttcttggttacaggttgctctttacctctgctatgtcataatgttttataaattggatataagtgactatttaatctttgcattttaaggaggaacttatctgttatttattttagaattgtttttcttcagctgaaataacccttgacaaatgtgacattgaattcctcacttgtattagatttgatgcactggagatagca

SEQ ID NO: 252968 - DNA, 420 bp, Gossypium hirsutum
atcccgcagtgaaggttgcccgaggatggtcgggcctggcgttgggcgtgcggcgggctgtcttgcagcttccagggttaactcaggtgaggtggagccgctatagtcctgaattcaaggatcccttgattgacaaggaatattatcgtaagcctgtggaggagctaactgaggaggagaagtatgatcgggagctcaagaagactcagctcatcaaagctgctccagcagggaaaacaagttctgtgtttgaagacccagtcatcagtaaattcaccaacatgatgatgaaaggaggaaacaaagtactggccagatccctcgtgactcaaactctggaagctgtgaaaaggaagcagtttgagaagtaccattccgcttctgcagaggaacaggcaaccatcgaacgcaacccctaca

SEQ ID NO: 252969 - DNA, 394 bp, Gossypium hirsutum
cccacgcgtccgcagtcggtaacttaattttgatatctcagaatgtaccgcaatataaccaccgcattttttgaaataaaatactttggatatgcctaatttacgctgaatttgcctcggtagaggtattttcaagtatagctttaacaacttccaaactattagattgtataatgacttcatggtgaccccttcattaaattagcctgagaccctccaaaatgccccaaagttcagcattaaaactgttgtaataaagtggctgatgccctttgcaattgggctaaaacaaacaattggtaaaatggattttaacatggattatgcttcggagaaccatgattttgttttgaatgatgccattaattgaaagttgacccttaagtcttttatc

SEQ ID NO: 252970 - DNA, 281 bp, Gossypium hirsutum
ctgatttttaagttttctatgtgtccattcggccaaaagagatgattgttcattatccaaagctgccatttatttccttctcattgctggaaatcttttggccattcggttcaaggtgttcacaccttaaggctcttcaaaaccgtccattcacacctgatatggctgcttcaggtcctctctttattattggtaaattttcagcaatagttgcctcttgaatgctcatttaaacccattagctgaatgtagctgctacatgcatctccaagatccatttg

SEQ ID NO: 252971 - DNA, 367 bp, Gossypium hirsutum
atccaacgtgttcagcatcatgtgaacggagtctgccggacgtctccgcgacctccagccatggtgctcagtcatggggtcctggaggttgaggcacttctgtgccgcacgtttttgtggtttatggcgatgtccgagcagagtttgagaggatgggtctcagagtgagaaaaagaaaagtaaaatggcgatgctccgtgtggagagtgtgagagcggtggctgccaagggaaagccctgcacagccctcctgccaccctgcacggggctccccgcacaaccccgcccaagaccacttgatgtggggatggaccatcgaagggagtatgggctttaaaaggtgccagacactgaggaggcacatgcc

SEQ ID NO: 252972 - DNA, 386 bp, Gossypium hirsutum
cccacgcgtccggacgactttgtgtcgatcacatttacctagggctgtatgccggttatgttactctagttgatggctatgtgcctaacataatgcagttatcaatgggtttgtgccacgtattctgttaagtggctttgccacattatctgtttctggtggctatgctacaaatatctgttctggtgtccctgtcacaatatctgtatctggtaactctgtcacaatatctgttctggcagccatgctgcaaattctgtggtgtgtagtaaatggggtggtccagttgtctccccacatggcgtaaggttggtacgggggtgtatacagctggattgggttgggattgcattcacattctaattctgattctattacctaatact

SEQ ID NO: 252973 - DNA, 394 bp, Gossypium hirsutum
aaatgatgtcacttttttttatataaactaaaaaatatttcatgtttatttttaaagaactttaaataagatgtcatcatatgattatttgatatatcaaattataaattgtttctccataaaaaaatttagatgaagaaatataaaagcacgttccatatgatcatcttcattccaaagtttttccatcttgccatctcgtaatttcaacacgataagattctttgaattaaaacttgataaagatttgaaggggaaataatcccaacaaagataccttagcttattaggaagagatacactatcaacttggtttgcaagtagcttcgggttccaatcctctttctcaatctcaggtttatagaagtaaatatatctaagattaaacatgttc

SEQ ID NO: 252974 - DNA, 254 bp, Gossypium hirsutum
atgaaaaagaaaacataggtctcttaaaccaggcaactttcacattctgggagttgagactgagcaatttctccttgtaacaaagaatctccatgaaattccgtttcatctgttaactgtcactgagcacaacactcctcctctgggctctcttcctgctcctccagattctgctgctttccaattctctggtgatcttgagactaacaactggagactgaggccggagcagctgactcctggcagctgtgctt

SEQ ID NO: 252975 - DNA, 488 bp, Gossypium hirsutum
  unsure (1)..(488): unsure at all n locations
ctgtccgtgcttctactaaagcattcagaattcgccacttgcaagggtngtctggagtncttaggcganncagaaggaannatgttaagggcttcannacagcaccanntcagcaacctattctatgctacctaccatctatctagaatccatggtttnntcgatgtattccaacngnngtgatgattacttttngatccactaanncacgtggnngccctganntttcaggnntagcttgattctttagagtagagnntaccttaacttataggtcgagaggtgtcttnntaatttttnntccccccaagaattaaatttaagttatttggagattcattnnagtgaattccaagtttttttgttttttgataatnnntttcgtagactaaaattttctcttttgagtttgggcttttttttcctgccaaattttggcaaactcattaaaccccacttttcttacctgaggcaaatttagtaatttt

SEQ ID NO: 252976 - DNA, 420 bp, Gossypium hirsutum
  unsure (1)..(420): unsure at all n locations
atctgagagtcgcgcagagtggagtcagaggcaatcagtcctcgctccggtctctggggatccggaccgcggcggcggccccgcggacgggatgttccggggcttgagcagttggctgggcttgcagcagccggcggcaggcggtgggcagcccaatgcagacgctccacccgaacagccatccgagacggtggctgagtccgcggaggaggagctgcagcaaacgggagaccaggagctcctccaccaggccaaagacttcggcaactatttatttaactttgcatctgctgccacaaaaaagataactgaatcagttgctgaaacagcacaaacaataaagaaatccgtagaagaaggaaaaatagatggcattattgacaagacaattataggagattntcagaaggaacagaaaaa

SEQ ID NO: 252977 - DNA, 399 bp, Gossypium hirsutum
gtatattctccggagagttcccctttccatacttcttgcaatagtatatgaattttaatatgaggtatacatgatacattatgtgtctttcatcagttatattagtttttaatagaaataactaatttactctttgagcaaaatgtaatttgactcttagtacaatatctctatagcacttttattaaatcaagatttttttatttcaataataataatttcaaactaatacaaccaactttctttataacaatctcatttatttgtcaacattttgtatgttataaagaaatagttatacacctaagctaatatagttcatcctctctataattgtctcatttatctattataaatctatatcattttgcactaagaacaatactgatgctaactaaa

SEQ ID NO: 252978 - DNA, 428 bp, Gossypium hirsutum
acactatataacaagttggtacgcagaagcacgctggtgccccgccgcaatttccgggatgaaaaacacgcatgagaatgctaggttaaagaaggagatcattacccttcagaaagatttgagggataggacagatgtcattgggacgtctgatgaaatggcaagcgcattaagccaaaaaacagacgagcttaacacaccggtaaaagacttgtcacacaaatatgcagaaataaagaatgtgaaagagaagctagtctaagaaaattccaaacagacctgtgagatacttgcagtgcaaaatcttttgcaaaaacaacatgttccattggcacaggttgaagctctgaaaaaatctcttaatggcacgattgaaaatctaacggaagaattgaagaatatgcaaaggcgtgacgagaaagagcagt

SEQ ID NO: 252979 - DNA, 379 bp, Gossypium hirsutum
gctttccatcatgatttttatcaagttcttgaaaatttgagccatctttgccatgcatacacatcagttcactgccggccatatgtctctctttcacttgacctttacatttgaccaacaaaggaaggacagcttcataactcacagagcgttttgcgatgcattggctgaagaaagtgcaagactctctgccaaccaacttgccgccgccgcaaatccagctctcaacccatcttcgcttttccctttccaaaacccatgggaccctattcaaacctctaaccctaaccctaatggcccacttcaagtcaagcccgagtctcaccatctcacgccatacttccaagaactgccactcccgcctccaaaggccctgttc

SEQ ID NO: 252980 - DNA, 409 bp, Gossypium hirsutum
ataaaatggtgttccatgagaaaaacaacttcatttagctttcagaagtaattacaggtggtttgccccttgatatcctttgtatttgagtatgcagaagtttttgagtattttccagtatcgaattaaaagaagtgtgctgtagtgttgagaaataatagaactaataatttttactgcttcattaaggaccctcttaagtgaaagtggaattttttgtattgtaaattgtggggtccagccccacagggtcggtgggtttttctccctgtgtgtggagatgagagactgtaggaataaagacaagacaaagagatgaaaaacagctgggcctgggggaccactaccaccaagacgtggagactggtagtggctccgaatgccagactgtgctgatatttattggata

SEQ ID NO: 252981 - DNA, 418 bp, Gossypium hirsutum
atggcaagagtgcacctttgtttagatctgggagtaaagggaaagagctgtctgtctctcgtgtgttttcagcttggctctgtgggatcagttatgcctcattcctgaaaagggcctttttatccccccagaatgcttttcctttgccaataccaccttcctcagcctgccctttggaaaggttgagaagcttaaaaagtcaggtaacagaaggcatagatgggcttcagaacctgatttgtaaatgttaaggcaaggctggctgccactggtgagagtgacgcagcagcctataagaagtcactgcgcgtatgaggttgcgatcacagtgcatgtggcaggttagatttgagaaatggttaggattgttctgttggacaagtgcagacacctgcccagggaagcagctctctttttt

SEQ ID NO: 252982 - DNA, 423 bp, Gossypium hirsutum
atcggttgaccaggtgaacggaagcaaggtggtgaggaagcactcagggacggacagaactgtgtgaagcccgccgggccccaccccgcgctgtccatgcactgtgagcaccactaggaaatctcagccacaccttttctgtttaattcccatgcatgccaaactcttttcacacctaccgaccaattctcctgctcctcttgccctcttcttcacaccaaaatatgattgtgtccctgctgcagaatatgtatttcctaattgctgtggccaaacgcctgtgtgccgaatcgcttgcttctgatcccgctccgtgtaacctaagtgcgctgcggacaaagccccggccacggctgcgtcactcctgatgttcacaatgccacatagtcacacacctaattctcaagtcggagcaacacatac

SEQ ID NO: 252983 - DNA, 296 bp, Gossypium hirsutum
attgaagctcatttaaagagaagcatgcacccgattgtacatgaatctcaaagttgcttggtacactcttttaagtgtcctttcgtgaaacgatgagacactcatagatctttgtttgagctgatcagctaagacatcaatggaccaatcgatacttggtgttcacacccaaagaaccattcaaatctgagggttcacactaaaggccattcggctaccacaagatatattcatcagctgattatctattcggtgaaccatgaagcattaacttcagctcttaacaacattgaccg

SEQ ID NO: 252984 - DNA, 280 bp, Gossypium hirsutum
aaacccttcttcaaggtttgggcaacaaaaccagcacagtcaaacaccatggcaaggttaggttatggttcttcagattcccaacttctacatatgatgctgagaaatatagttctcctctggtaccttcattttcatagtttttaataagcacttaatttctttcaatttttattatagttcaattattttattatataatggaacaactttcacatatgttcatctatatataaaattaatagaagcattatttgattgcttcaaacgtattcaacgt

SEQ ID NO: 252985 - DNA, 264 bp, Gossypium hirsutum
atcttggccaccggctcgcggctcgtggaggcttgtccgagacgcacgcgagtcagactcgggttggggtcctggcggcggcggcgcgagcatgtcgtggcttttcggcattaacaagggccccaagggtgaaggcgcggggccgccgctgcctttgccgcccgcgcagcccggggccgagggcggcggggaccgcgtcttgggagaccggccggcgcccaaggacaaatggagcaacttccaccccaccggcctggagcgcgc

SEQ ID NO: 252986 - DNA, 400 bp, Gossypium hirsutum
gcttggtaggaaaaatggaaagaaattccattgtttggtagagttgaaaaatgaaaggaaagaaaataaaacatttgaaaaaggcataattttcaactatcatacccctcttattttctctcctcattggaatcattagtttttatgcattaggatggaaaatgatcatctcttctatttctttcctctcatttttcattcctaccaagtacattcaaaatttattttcttttcacttttccattttctcctcccatccttccacttttccacccaaccaaacacacttttaaagttcttttgcaatctgaaaagctagagggtatgcatttggtcatacctctggcatgtttgtttttatgttgctcatcaacctgtgtgaaaatgcaaatggacatgc

SEQ ID NO: 252987 - DNA, 270 bp, Gossypium hirsutum
atgttttggctttgcctgcattctacttcgatacagactggcacagcaactgaatatgttgctcatacattagcttttctttcataacctgctatcagttctctgatccatgaggaagagaaagagagtatctgacaggtaagattgctttttaaagttgttttaaatgcattacatgactgagaaaagaaaaatgcacattttattgttgcagtttaaaatttcatttcggtgaaactaaacgtgaaacaaaagggtaaaaggggtttg

SEQ ID NO: 252988 - DNA, 387 bp, Gossypium hirsutum
tcgcccacgcgttcgggcgtatgggtttacaaagccgttggcaactcctttgttttcaaaggttcgggcttgtcttaaaatgggtggcccatctcaattgcaggcagtgatttagtagatggaggaatattgagaaatgttatagacattagtagttagttggatcagcacctaaagtcagttaaactgttaacaatagttatagttttgttaacaattcccacattgtattataaatttcagagcttagtctcgtacaatgaaatgtatttgggttaactttcatcttcttgctttcttctttcgcgtcttatttcatccaaggagaaaaacataaatcaatttcatcctatgtgcatacttggtattaagaatggaagtcaatgc

SEQ ID NO: 252989 - DNA, 320 bp, Gossypium hirsutum
atgtcggtttactcttgcttaccacccaccgtagcccaccttgcatgcatgaccagcccctccattccagcctgagctgtgtgtgcccctgcgggaggacccattgatgccagaaagctggtaactccctcccagcatccctgcggaaggagtcagtttctgagagtgtggcctttcaaggtgaatgatgaggaagggtttcccagtccccacagtggccccacctctgggccctgcaccagagccctcctgtgtcacagggagctgtgcatccatgcacacgcctacttacacacaacatttcacgtacacgctaattt

SEQ ID NO: 252990 - DNA, 392 bp, Gossypium hirsutum
gaaattgtgaactgaataaaatagaaatgaagcattgaattgcatgggtatgtatcgggtctcataggccttatttattatgaatttaatattttgagggtatattgtgaagaattataaaagcatgttaaaatttttttgaaagttttaatttagatgaaattttataatacggttaaatacgtttacaagcgtttgtgttctggtaatgcctcgtaccctattctggtatcgaatacgggtaaggggtgttacattagtcaccaaattttaataagttttcattttggtcaccccgttaactcaatgttattattcactcattttagtcactcaactttaaataaattttcatttttggtcaatcatttaactttttaaaaaatttattt

SEQ ID NO: 252991 - DNA, 387 bp, Gossypium hirsutum
cgaccaccagctccaaggattgagacttacgatttagtggaacttgactctagccaacaatcgcttctgtgggatcgccttatgctagatcaacacttctcaatggcgaaccccacgccattttgtctcttagctcgccaacctctgacacagtaagctaacaaaccgattttgcaaccttcccaaaacatacaaagcggccgcctttgtatacattgaaaagcttacttcttaagggacatgggcggaagcatcagccccgtagtgcagagaaacgatgaatactcagcaaggaggctaaataccaatttttaagcctcatgaactcttttgggaatttttgacaaccttcggctagatgggtttagtggctcatggttgtggtag

SEQ ID NO: 252992 - DNA, 187 bp, Gossypium hirsutum
cggacgcgtgggaaaagggtcaaaattctgtgtgtttgtgaagcaattttaccaaaactttgaaaataccttattttcccctccatcttcccaaactcacaaaagattcttcccactccacttggtttgacatcatttgttctcccaatcttccaccactcaattttgatttctaaaattatattct

SEQ ID NO: 252993 - DNA, 207 bp, Gossypium hirsutum
ttttgtgaactcaatgtcgaaacgctacgggcctacgttaccgggtgggtggcaacaatcaaacccttttttcaagcagcggtcatggactcctgacgctgaccgagactaggcgatgtttattcggaaggaaaattacggatcgaagatacatcaattgcatagctttacgtaagatgatttcaatgagctcaaaggttgtacaga

SEQ ID NO: 252994 - DNA, 375 bp, Gossypium hirsutum
aatttcttcttattggtactctttgttagttcgtcacatgataggctcttttgtctcggtttacttacgatggtagattaagagatgattccaagtttagggttcattgaacaaagaaagcggcggtggcttagggttttagcatatcaaaaacatagaaaggaggaagtaggtaggcatggtgaagctcaccgccgacttgatttggaagtgtcctcacttcttcaatgccctcaagaagcgagaattggatctttgaggtgctggttcgcccttctttcgctgcaaccctaaccctcatcataataatgttctcaaaattccctttctttcctttttcccctttcaggtaacaaaattgttgtaatcgaaaac

SEQ ID NO: 252995 - DNA, 236 bp, Gossypium hirsutum
  unsure (1)..(236): unsure at all n locations
tatataacaagnatgtacaaaaaagcaggctggtaccggtcccctattcccgttatcgcggagtaccccactcgctcctgagaccactgtgcccgaccggagtgctacatctgacgccgatttctcccataaaggcgaccgcatgattcgtgcattacaacggctaccacttttaacgggggagaaccacatgcgcgccttcacctagaaccttggtttaaagacaaccgatttca

SEQ ID NO: 252996 - DNA, 404 bp, Gossypium hirsutum
atagcagctcgcccctctttcccacatatccgtccaggtgagatccggccccaccgagacccgctccccgctctggacggaggatcccaactgggtccggggctccccctccgcgcctccgcccgctgttgcatcatctggttcccaggacccccgacgcacccgcgcccacgcctgaggtcttggccgcccagaagctgggagttcgggcgtccaagtggccccgggctcccaccccagcccccgcgccggcggagcggaccccactggcggcgagtcccggagcgtggagcggtgacgcgggctgggaatctgggggagacgcacgcttcgtgcccagcattgagttttcgctgcattgtggatgggaaatgactgtttgcaaatcgccctttttcggcgac

SEQ ID NO: 252997 - DNA, 275 bp, Gossypium hirsutum
atagggaaagctggagcggctcgcctgccgtaccggtactcggaatttccgggccagacccacccgtacctccctgcctaatatgtagaggccggccatgctatgggtggaaacatgtctccaacatgctatgctagtggtggatgttcagaaaaataacatagtgagcgtggcgattaaataatgaaaggaagggtggtgtaaaaaaaattataacatgggctgatccatacccacatgttgccgtgaattgtggtttgacaaccctaaggaag

SEQ ID NO: 252998 - DNA, 336 bp, Gossypium hirsutum
tggagactgttcacatgactgggtccttaacagcatgcgggggcgaggccacagacctggagctggctatttcacagctgcacaattaggcacgctggagcacctgctggctggcgttgggacccatcaaccgctttggccatactcttcaaattgctatcgcacaagctaggactgagtgcgccggcctggctgaccaatacgcatactctgcacgtggggcaggagaccctctaagagctcccaccaacaagccctgaggagcaatggctgcacttcagctcgccaagctggacccgccccgtctgctgaaggagtgcgctgaccatacaaatg

SEQ ID NO: 252999 - DNA, 130 bp, Gossypium hirsutum
acccacatattatcgacattttagctctcatgacatgattcaggcagtactttgtatcagccaagtcatcagtgatgttactgacgccgatcttaaacaaacattgctttactagcgttcaaaacaattc

SEQ ID NO: 253000 - DNA, 376 bp, Gossypium hirsutum
ccccgatttccgcgttggagaccgctcacacgcgccggcctgaagcctcaaggggggtcctgaccgattattaggaactgattttggcaattggtttacaattaaatgtcccgctgcacacgaataatgtatcccatgagaccatcccaaggaacccttttttgccaactgctatataccatttaaagaaacacatggcctgccttccaggcttaataacggatgctgtgcctcgctcggaaattgcacttagggatgctgagatcactctggctggtccatatgctgccatgcaaattgactctcttgacctggcccacctgctgaaggactgccaggtgttattggacgtgaatctggccctgggcgggttgat

SEQ ID NO: 253001 - DNA, 300 bp, Gossypium hirsutum
ggtgggatagctttttataagccaagggtcaataaatggattgataaatcagaggtgagactttgagcctagatctcgaaattcaagtccttctgtctacttgcttcaccatcggaaattgtaaatcaaaaaagaaaatatactttataggtatagacttattatattaatttttgtcgtcaaaatatttttaatgagataattgggatatgcaggcagacttttgaagaaaaaaaattatgattccaggtaaaagaaattggattgtgagaaaaatgaatttggttaaaatattaaacg

SEQ ID NO: 253002 - DNA, 348 bp, Gossypium hirsutum
atcccgggtttggccaggccctgcgctcccctccggactggcaacccctggtccccttcctctttccacttgcattcgggggtgtctgctgttctgagaacatcagaactgggaagagaggtggagtcacatgcattcttggtgggcattattctaaacttttgtatccaagttcatcccccttcttccacggtggcattgtcgtactaaacagttcccccatgcgtgctgctgaagagctgctcaccggaggcaggcaacggccccggcactgccccttgcattaagtcatgtgtttgatgtgctcttgtgaatttactttgtcggaacagaatatttacatgtcgg

SEQ ID NO: 253003 - DNA, 378 bp, Gossypium hirsutum
cagaaaaaaagggtatatatttaaatattaaatcgacttgatatatggtttaaatatttgatatggtcttcttttttaagttttgattacatgggttacatattgttttaagcatctcatttgttcatgaagataaatattaacaaatttatttatgtcgctatagtagggtttataattaaataataaatttgattaaaacatatctagtatgcaaatttgtgttaataaaccaatgaattttatggttattcggatttgattcaattcaaagaattgttaaaggtagtagttcatacgttttatattattccatgtgtaaattatttacaaaaatgacatgagcaattgtaaatgaaaagttctatgagcatgaat

SEQ ID NO: 253004 - DNA, 306 bp, Gossypium hirsutum
ctatacggaaagctggcgcgccctcatgcaccggtcccgtattcgcgattcgagccaatctcctcgacaagatagagatgtatgtgggcctccacgaaagaccgactttcaccctgagcttctctcaattattcgcttgacgcagacaacaagctcttctatacaatctcctgcttaaagagaacacttcacagtcctccctcaatacaacactttcactacttacctctatctgaacatttcaggtcaatcatctatgggtgactacaaggtaccgggtgtgcacctctcatcctaattgacatc

SEQ ID NO: 253005 - DNA, 394 bp, Gossypium hirsutum
atgtcctactgatcataaaacttttgggtcactggtttgtgccttgctagccaaagtctcttaaatacacataggtgggccagagaacattggacagatcaagagagattagaacatctggtttctctagttgcagtattggacaaagagcatagtcccagccctcaggtgtttttgacactaccaagtagttctgggttgaccctctgtgcagtggaattggtgattctgaattgtgctttactgatggtgctgagttgctctgtccctattatttgacctacgttttctcctaatgaaggtgttcatttgccgttcatgtcctgttatacttcacctccaggaactgtcatggatgtccaaatggctttgcagaagggaaatgagatgacag

SEQ ID NO: 253006 - DNA, 392 bp, Gossypium hirsutum
atctcgtagtcgatgcatgtcccagacatgacttacactgtcttacgtctcaaggtcgaagcatgtcccagacatggtcttacactagctctcaaaatgtggctgatgcattagttcacacaagtgacccaaacgtcacggcatgaatatctgatttatttcctaaggttcaataaggaattctactatctctattctcatcacattttctcatttccacaatcaagaaatttatgctataataattttagtacaattcaaatacatatattatttatgtagttgtactatttacatacaacttaccttggattacaaaatgtggcgactagtcaatttagtcgatttgcttagctttccttcggtacaggttcagattcggtatttcttaa

SEQ ID NO: 253007 - DNA, 361 bp, Gossypium hirsutum
gaagaatagctacatgatagggaagagaaatgagaggatgaggaggagaaaaggaaactaacgatatggattatgaggaggaacattgaacattttataattctatttttaaaagacttgtattaatttttggaagattttaatttaaactttgtagctgtaggattaacagtagattcttagttattctgcctttcgtttaagttttctatgtaggagcccaacatgaaggagaaagaaacaatttgagctttacaggatcaaatgaagaagcacccatcatttgcagttgacgcgacaatgatgaattgggaaatttgtttcctatatttttttatgggcttcacatttgaggacaata

SEQ ID NO: 253008 - DNA, 399 bp, Gossypium hirsutum
atgtagtttaggttttctttgttgtagtttgggtttgggtgtgtttttaggacaccttgttagtggttctttctgttttcagaattcttaggtaacagacattaaccaaagatgcctgtgaacctaacaggcagatcataggaccccatgactgatgtttactctttttaaaaactaaaccagactgcactctgtgcattcccagctggtatttgcatgggggtgtgatgggggggtctaagctgagaggaaaacacacaggtctctcagcatttttaggcagtcacactttccagccgatctttttcatttgtaacaggaaccattgggaggtgtagggttggattcagtggtaggttgtgatggggttttttttttttcatggtggtttaacctacc

SEQ ID NO: 253009 - DNA, 408 bp, Gossypium hirsutum
atctcagatgtcaatacctgcgcagaatgtgcaataaaataatgaactccaggattttaaaccttgggtgtggacactgtcccttctttctctgccccatgatagcatcagagtaatcttactctaaaaggaggttaagaaacaacaaggctttaggaatcatgtcgtttgaggacccccattttataaggagggaaccaaaatgtagaaatgagtgagcaattgccaaggtaattcccagagccaggatggggctcaagtctcctggtatgtggctcggggttctttcctattccaatgtgcttcctaagaaatgacaatgtattctgttcactgctggttgtcaccccagtctgaccacggcttctaagagacttggagtggaggaagggggaagaaacaaacacc

SEQ ID NO: 253010 - DNA, 403 bp, Gossypium hirsutum
atgtgcctcagggggtcccctgaaactaattttctattggtgggattccctggattcattatatgaaatggtgacatgattagaggaaattcttttgtagtatgaaaattgtcccttttcttcttcagtacttgcctccttactggcattgaattatcacagggacaaaatctggtaaattttttatttctaactctcccatcaaacccctgttgcccagtatttatttggtggccttcacccaccggagggaaaaaatgagcttattcaagctgccaatgtttatctatgggctgtagcagtacatggaactgtactgtgccagggatattgagatgctctgggggtgtattgtatacctgccagttttcttcatttctgaattgaggtttcttttcttgat

SEQ ID NO: 253011 - DNA, 399 bp, Gossypium hirsutum
  unsure (1)..(399): unsure at all n locations
atgtggggcacatctaacttaactgtgaaaagacacatgacacaatcaccttgctgctgattacacggcctggggtctctgacttctccccttaccctcccgcctcccaccctccctgcaacaacagccctctagcctggggggcttgttagagtagatgtgaaggtttcaggtcgcagcctgtgggactactgctaggtgtgtggggtgcttcgcctgcacccctggtttctttaagtcttaaatgatgccccttccaagccatcatcctattcccacactcctccactcccacccttggccgaagcatagattgtaacccctccgctcccctctgagattggccttcggtgaggaattcanggctttccccatatcttctctcccccacctttatcg

SEQ ID NO: 253012 - DNA, 276 bp, Gossypium hirsutum
gagggcttgcacatgtgtggcgggcaacttggcgtggggtctcgaattattacatggacaatgggtgttgcactgttagaagctgcgaaatcattttcaagcatactagcgctctcctggatatcaaatactgcaggccaagatctgatccaatgatccttattgccattcttttaatggcttagggtcaggttggtggtgcgtcatcatgtcttcataatcggatgccaatattttttcggaggttatataatgctgtcgggcggtataacattg

SEQ ID NO: 253013 - DNA, 249 bp, Gossypium hirsutum
acaaactagattatgatatgagttacgaatttttcataggccatccaaaattccataattctctaataacaaaatgaaaattaaaaggaaaaaagaaaaagaaaaatggcacattaaattcttattaaggatgaatgttgataagctttgtttgaaaataatgattttgatctgataacaccaatgtccctttccttggcattttattggggaagaccaagaatgcacgtcaaaaaagggtggcgggtt

SEQ ID NO: 253014 - DNA, 377 bp, Gossypium hirsutum
  unsure (1)..(377): unsure at all n locations
gaaaaccaaagtaaacaaacggaaaaataaaacaaaagcctattgctcccattcggccgaccccaggatccgcgcagtccaaccgccaccactgcgaacggtggagaaccacatgcgcgccctcacctagaacctcggcttaaagaccaccgatttcagccccagaaatcccaccccaagcttcgatttcggcgaagtggaaagggatttcgatggcccattcgcacaggtacggagcagaggacatgcgctggcccttggcgcgaggcgtacagggctgtgctggcgcgggtacgggggctgtgttggagggtatggaggtagctggcgtgggggctggggcttggctgnctggttgtggcgcaaaagtggggaag

SEQ ID NO: 253015 - DNA, 393 bp, Gossypium hirsutum
atcaaaattctaaagtgaaatcgaccacccaggttgtaataaaggaatatttgtcaaggtaaaaggaatagaaatgacttcacttatgttgctaatttgatttgaaactattaaatatttaaatacacgatatgtggttctgcagctgcactcttgctccaggcctgcaaaactcataaaataagggcaggacagacagactttatgtgtatctatatgaaagagaatttttgaaaaaagaaaacatcattagtacttctatgtaacatagtaaagtagatctacaatataccttgaaacataaaataaatgtgactattttaagtgttagagaaagatgcttttacatacagttacctgatttagtaagttactaagtgtggcagattgtgg

SEQ ID NO: 253016 - DNA, 358 bp, Gossypium hirsutum
atccaatgttaagcacaacatttactctctgtaagcctccatttcttgactgtgaagtgggtctaccaatcacctgccggtcactgcaaggagtatatgagatgagccatattaccacttagcatggggcctggtgccagaaactagctactctcactgttggagggaaagtcatgatcattcttgcttttgaccatgccactgagtaggccatggcctgggagaaatcacttttcctcccaagcttccttttttttcccccctggtgaaatgagtgatcttgacagcatcacctataaggatccctgcagtgtctacaactcgatgactttggttggatcacttttaggtagtcgag

SEQ ID NO: 253017 - DNA, 221 bp, Gossypium hirsutum
cgaaaatttacacattctaaaagggaaacaaacaaatatacgcgcgtacagatcaccggatggcgagcggtgacgtggaggccgtggattttgaaccggaggacgatgacctcatggacgaggacgccgattttgatgtaagtacaattgcaactagggtctaggtctgaattctgaatgactgtcgccgcttctacctatctgtctgatgataagaagac

SEQ ID NO: 253018 - DNA, 394 bp, Gossypium hirsutum
gcaacaaactatcagatcagagtttcattgacaaccgagttgtggtggatggcaacctcattacaagcaggggtcctggaacttccatggagtttgcactaggaattgtcgagaagttttttggacgcccgaaagccttagagctagcaaaggtaatgctttttgtacactaatagatcagcaagtatgaatgcttgtcctcggttcttgctaccatagaacattctacgagatgatacatgggaatatcagaggtgagtttgcatttgactacagatttactttgcggtttatataccatagttggttgataaataaatgagactaggaacagttgaccaataagaacacccgggtttagctatgatgctttctttttaacttattatattta

SEQ ID NO: 253019 - DNA, 425 bp, Gossypium hirsutum
atcagtcacaggcgagagccctgggatgcgccggccagaggccatgctgctgctgctcacgcttgccctcctggggggccccacctgggcagggagtaagtcggtggagtctgcccttaacctcctctgcctccctccaggagagccagggcctcacccggcccttgtcccagactaactctggtcacagaaccatcctgtctgcctggaggggcggggtcccctgttctggcagaggttgcccccatatcactgcatggggatttttttcccttttgctctcttttctgcagagatgtacggccctggaggaggcaagtatttcaccaccactgaagattacgaccatgaaattacagggctgcgggtgtctgtgggtcttctcctggtgaaaaggtgagtgaggccatgtccccacccatccc

SEQ ID NO: 253020 - DNA, 218 bp, Gossypium hirsutum
  unsure (1)..(218): unsure at all n locations
cccgacccggactgcagtcatgcggcagcgactggagaaggacgntntgcagtgcctgagggggaagatgtaccaagaatgatccatgtaacttacaaggcccttcgtggccgacctccttatgctccaaaccatgcaggcccacatcagattctgagctatgattctcattgtttccagcacaggcagcatccatttgctcgccaccagttatgaac

SEQ ID NO: 253021 - DNA, 333 bp, Gossypium hirsutum
ggaatatattaaggtcgtattaaaatttcattaaggaattttgatgtttgagtagataattgagtaaaaatgactaaattgcaaaaagtgtaaaagttgagttctattagttaaaacggtcaaatgactttagaaatgaaagttaatggacttgaatggtaattataccatatatgatgatagtggatgtgcatggataggttttaatgtaattagaatactttttaaaggttaattaagccatttgatgattaagtctaatgttaattaaacaaaagatgaaaaaacctatcatctgtttcattctcttattccttggctgaaatcaccatt

SEQ ID NO: 253022 - DNA, 398 bp, Gossypium hirsutum
ccattttaaatactttttatatatcatttgcttagaattgttttatattttattttagatttttttactttgtatttatttgttatttgtgattcatgattataacattttgtttataaattattactttgtgttgtatagtgctattccatcgcattttatttgttgaagttttaaagtcattttattcaaaagttttcaaaataaggcaatactcggtattttgcatcttcgagaaggttgtgccgtaacttactgggttccaattttcctcgttggatctaagtaaccgagtacccatttttttcaatcaaaacgcataagtttcaaataaaagcttattctcaagaattcgaggtgttgtgccctaactcactggatatgacattttgtatctt

SEQ ID NO: 253023 - DNA, 246 bp, Gossypium hirsutum
atgcttgggctctggagtcattcagatgcccggagctgtccctgggtcgctgtgggaccatgggcaagtcttcgtatctctggccctttgttttctctctcaaatgagaaagtacccacctggtgggggtagttgagaagattcaatcattattggctctgtttgtatttgaatgggtgctcagtatgccacttgtggaggtggcagctgcagctaactgggtcggaatttcaggcgtatctaatc

SEQ ID NO: 253024 - DNA, 301 bp, Gossypium hirsutum
  unsure (1)..(301): unsure at all n locations
attccggtcgaccacgcgtncgatttttatctaaattatgatatagtaaggtaaacatcatccaaaagctgccttaagactgttgactaacaataagaaccccaaacaaaaaatagttaagacttcatttcatattgaattttcaagtttgtaatgacatattttgagggggggatgtgatgttggtatgtatgagaaaatcatgttactatatttctgatctgttagagaatatttccttttggttcaaggtttatctgtcatctncacaatacagtgaaatggttcaggtgactggcgt

SEQ ID NO: 253025 - DNA, 369 bp, Gossypium hirsutum
  unsure (1)..(369): unsure at all n locations
attgctggtgctggtcctcgaagaaaaaagtacggaaattgagagcgtttaaaccttttgaaagcaatgtaacaataattttatagctttaaatgtaataaattgggatctgcattttgtatgtttcttttattccatatttctctaatgattcgtttttattgtgttttataaaactatcagtctgtgacatggaatgtagaggaaaaacattcttgaaccctagttgcttgtgaaacatgggattctgcaagtgacagtttgtttttgctcttgaagttggagtgttattttgttacatggttaattcatgtcaaaagtatcataggctaagacattatcaaagttttaataacantcctttttctt

SEQ ID NO: 253026 - DNA, 231 bp, Gossypium hirsutum
  unsure (1)..(231): unsure at all n locations
tttcttcaaacctttctttacacacggggggcggtacaggattatggttctccactaanagactgcttcaccactataggtactgtcccataccattacccctagagcctaatagaaggtacataccgtttattattgtctttctttctattttacatcaccttcttgaactgcgaaaatttataatatttatcataaacttttggtcttatcaggcatcatgcatttttt

SEQ ID NO: 253027 - DNA, 425 bp, Gossypium hirsutum
  unsure (1)..(425): unsure at all n locations
acttcctttctccncnnnaaattaattnctacgtggggaagatattnaacccttactcgctctccatcctatcacacaattccttataactcccacacactcattaatttccctacccccctcctatcactcttttaactttccccatcactattctaacccccctcatatcccttcctnattctcttctacttcttccaaactctccagtctgtgacatggaatgtaaaggaaaaacattcttgaaccctagttgcttgtgaaacatgggattcttcaagtgacagcttgcttttacncnngaagatggagtgttattctgttacatgcttaattcatgtcaaaagtttcataagctaagacattatcaaaggtttaataacatccttttttccttaacgcgtttgttaaagttgttaagaata

SEQ ID NO: 253028 - DNA, 419 bp, Gossypium hirsutum
atcccgccacgcgaggcagcggcgcacggatcaagggattgaagaatgtcccggattccactggggaaagttctcctgaggaatgtcatccggcacacagatgctcacaataagattcaggaggaatcagatatgtggaaaataagagaactggaaaaacagatggaagatgcttaccgggggaccaaaaggaaaatgctacccagcagttcaagccggatgcgcagtgatggttttgatgaagaaagtcaaagagactattggaggccaaagaatgaaatttctgggacactggaagatgattttcttaaggcaaaatcctggaacaagaagttatatgattatgaagctaacatgccagacagatggggtcacagtggttataaagagttataccctgaagaatttgaaacagacag

SEQ ID NO: 253029 - DNA, 385 bp, Gossypium hirsutum
atgcttttttgaaagcattttacaaggttatatcccatcaggttgcttaggaacttttgcagcctccttcaacattatcattttcatttgaattgacactggcagcttgacacctctggacacctggcatggcaggtggggccacctccaaataccgtctttccgtgtctgcaccttcaacaagattttctctgtaaattctgctccaaaacaatttctataaacacagcattacttttgtcttgttcacaaatcagatttggaaagaggtgcttggggactgtcataagtctatttaaagatagcttgatttaaataaaaacaaaaacaaaactttttatccaagacaattttctttcattatgggaaattagtttcaatggct

SEQ ID NO: 253030 - DNA, 127 bp, Gossypium hirsutum
atggcggatttcattggcgcgccgcggagaggccaggcgagtggtgcggagtaggcgccgtcgctgagccgaagaggaggatgcggaagacgcctttgcagtcggtgcgtgtgaccttagtgcggcg

SEQ ID NO: 253031 - DNA, 399 bp, Gossypium hirsutum
gcgagaatcctactttgttccttgtccttgtcgtgacgtgacaacctatttccatcaaaatttagcttgcttaaggtaaaaaaatacctaaaaatttatgtatacacttctaggcaaccaacttacaacttatcaataagttaaagtgataaaataccaaaattattaactatcgaaaccaacttcaatcctatatactccaaactaaccaaacaccatttcaagtcattagcaaaagatcatattttatacaacataaacctttgacacatttagccaaaagtccctaggtacatgccaaaaaaccaaaatgaaccactttatacaaactttgttgggttggaaacaataatctagatgctgacttcaattcctaaggcttcaagaagaatctaaact

SEQ ID NO: 253032 - DNA, 393 bp, Gossypium hirsutum
  unsure (1)..(393): unsure at all n locations
gaaaaaagtatcggattggtagatcttgtatacgaacgtttatcaagacacaccttacctcaaaagagcattctgttataagccctcttgagcttcccgttttatggttcctgcgagcatcttgatcggtagtgatcctgcatgtgttgcggactaccgcaactctttgtgagcgtcccgttgtacgactgattgtggtcctgcatatattgaggacacaaatgtggctctttatgagtgtcctgatatgggctcttttttatcttcctaatatgtctcgcttgaacttcctattatatggctatccgaagctccttgataataactcttcggagttacctgttaagctcattgagcttcctattttaaactcatatgaatntcctgttatag

SEQ ID NO: 253033 - DNA, 357 bp, Gossypium hirsutum
attgcgtgccggggccagggccgaacggctcgccagtgcaaagcaggccccttggggagacggcaggcagcaaaaggcttccttggcaggggttctgggcgtttggggaggggaggtgctcagagatagggccgaggatggagctcccaggtgggttggagccgtgggtggctgggctcgagggcgctgttgcagtccggggtctggaagaggcgatccccgggaaagccagcttcagagccgggagaggtcggcaagggacctactgcaggagcccccaggtgggggtagggagggggcccagacctgtgccaggagggatgctgaatccccatcgcctagctccggggccttgca

SEQ ID NO: 253034 - DNA, 396 bp, Gossypium hirsutum
ttcaaaacaagaaattctcgtgtttcaatcggatcacgattaaatattaaattgaactcgtatttttaaaaattaagataacacgtgtttaacaagataccaattttgggcgtcgcgagggtgctaataccttcctcgcgcgtaaccgactcccgaactcgaattttctctggattcttacgtagacctaaaattacctcttttttagaaaatttaaaaataaaattttcttctaaaaagagaatttattaggtgtccgatcacacctagaaaaaaaaaagatcggtgacgactcctttttcaaataaaatcgagattcagttttcaaattttcaatacttacttcgactagcgcccgtgcccaatttttaggtcgctacagctggcgactccact

SEQ ID NO: 253035 - DNA, 233 bp, Gossypium hirsutum
tcgcccacgcgtccgcccacgcgtccgggcacgcgtccgctgccacagatctcccatttttcttctccctaagacgcttcgccccataacccatctaacaatggtggcctcaaaattctgttttgctttttctcttgctattctttcaatcttggccgatgatgctgtccaacaccatgctctggcgccctctccttcttcccccgtggactgctcctctctgattctaacat

SEQ ID NO: 253036 - DNA, 400 bp, Gossypium hirsutum
atcgcctggtcctcttccggtcaccagcccacaggcagcagctgggctgaggggatgacagacctgggtcctcagcctccctgggcttggtttctccatctgcatctgagagtgatgggcaggcgggcatcccgggcggggacaggagaagagagagatgcagatgcagtctgcttcctggatgccagaccaagtggtctagttttcaaggcttgtgtttttgggggactcttgatcagatgggaccactccccacaggccgttccttgtggctgcagtggcactaagctctcagactgcctggctgcccctgtgacctcaggagcccactcccatcgggccctgccttctctccttcctatgcctctggtgctggtcctgtgtcttgcccctcttctga

SEQ ID NO: 253037 - DNA, 357 bp, Gossypium hirsutum
atggcagatatacgaaccgattcacagctggtgctggaggcggttataagctttatgagagatacatgccggccgtgtattcagtcctgtctgcctagctagaggtgcctatcagctcgtggctcgaatatgttactttaaaccataatatctatctttactgtcatgtgcagctggatcgaatcatagataccaatactgctgaaactgatggaaagcactccggagtaccacaaactgctgcacaagctgcatagtggatcctacacgaccatcgtgggcctctcacgatgcttaacaacacgctctactattcaaaccacacaccacagtgtgcttactaaagcatcacaggat

SEQ ID NO: 253038 - DNA, 395 bp, Gossypium hirsutum
cccacgcgtacgaattatgtattgattttgagtatgatcctgctaatttgagctatttatgatcttctatctcataggaactaaatttgaggcaaaagtaaaattaagggccaaaagcgtgaatttagatataaaatgggccaatgtgcgacataaggaaaagttggtgccaaaagtgcaatcatggaggacacaagggttgaaatacaaaaagaagagatttattctattaaactctattttaattatattaggataattaatattgagataattattaaggattatttttaggattttattttatttatctttatttatcttcaattaaatgtatttatcttttaggaatttaagtaggattagactatctcccctatcactataaatagggg

SEQ ID NO: 253039 - DNA, 409 bp, Gossypium hirsutum
aacaagtgtgacgcaaaagcagcgctgctggctaccgcgcgcgagtatctcggcgatatcgctcggtcatgttgcatcacgcacgtgaactctctggtgttacgggtacagggcaacacgatgagcaccctgggacactactcgactattaaccagtggctggcaggcacggcggttggagcaatctagggcgtaatgtggtggccgacggagcttgccaagaggcgactgaagattgaggacaggagcccgtgacgcacctacaagggttagatggactgccttgagcagatatacgcgcaccagggtatgcgtggcgtcaacactggcatgttgactcacactgatgccagagacgcccatcttctgcgtctaatcaataacctacgacgcgctcacactagcgctt

SEQ ID NO: 253040 - DNA, 397 bp, Gossypium hirsutum
cccacgcgtccgcactgattttggctagggctaaatgccctattgtttaggctgaacaatcgatttagtttttgtgcaattttactaataggtttgttttggatgtcgttcataaggtctaaaagtgtgttgtagtgtcaatgttctgaaaatcaccaggtttgtgacttgaactcgattaaactatgaaactgtacgaaatagaatctgccagtcaacgctacaagactgtttgtttggtcgtgcattatgccgtgtgggctacacgagttggacttttaaggcatgtaggccacatgggcgtgagggcccattttatacgttaagttatccgaatgtgtgtttcgtaaaactcttaacgactaagtggaatttatgaaatctgttaaaatcatta

SEQ ID NO: 253041 - DNA, 418 bp, Gossypium hirsutum
atgtcgcatgctaaggatggtacttgcatatggtgaattactgttgacagtttccgcagaaatcctatttcagtggaccaacattgtggcatggcagcaaatgccaacattttgtggaatagcagcaaatctacaagagaccctggttggtttttcgttttattttctttgtttttttcccccctctcctgaatcagcagggatggaaggagggtagggaagttacgaattactccttccagtagtagctctgaagtgtcacatttaatatcagtttttttgaaacatgattctagttaaatgtagaagagagaaaaaagaggaagtgttcacttttttaatacactgatttagaaatttgatgtcttatatcagtagttctgaggtattgatagctttctttatttctgcctttacg

SEQ ID NO: 253042 - DNA, 398 bp, Gossypium hirsutum
  unsure (1)..(398): unsure at all n locations
caaagatgttttcccatctttttgttgatggtctaattatcatattaggacctataatttcaagtttcatgactatttggcccttttagcatctagcactcaactttcacattttattcaattcggtcatttctctaatttatcattaaattggtcaaattttcctatcgatatttttcatatgagttttctatcatattacatatcatgcaataacattaaaatatatttcaattctagcttaaatttatggntatgaaaccactattctgatatcaccaaatttaggccgttacaattctcctccttaaggattttcgtctttaaaaaatcttaccagtaaagaggttcggctcccatgtagcctcttcaatcccatgttgttgccaaaggacttt

SEQ ID NO: 253043 - DNA, 384 bp, Gossypium hirsutum
gagagaagagtcccgaagccccaactatcaaaagatacaatctcatccctcccacacccattctcccgctatatctgcaacaatggccattttgtgcccttcataaaataatttcccctctgcaagacatttactcattaatctctagaaagggtctttgtgattatcgaaaatggccacaatcgctgcatgttcttctcacttgttatctgcttctacccatttccatggcttccctaaaacctatctaaaaatttattccccttttcttcataagctcaaggactcaactcagtatcttgaagcacacaaatgtggtttgagcatgaaaacaaaaccaagtcattctgaatactaagccaagtatctgttctgctataaata

SEQ ID NO: 253044 - DNA, 395 bp, Gossypium hirsutum
aaggagagaaagagacgacagacacaggcaaacacacacacatagacatatacagcaagaaaagaaaagaaaagaaaggaaaagaaaagaaaaggagggaattgaagaaagctttcataccttagaagagaaaacgatgtcttaagagctctctctcttacatatcctttcattctctgcaactctctaacaagagaaggtatagatgatgatgatgaaggcttgttgatatatgattctaaagaaattctatggcttcccaaggttaccaccatcaccaccaccaccaccatcaagcagctgctggtatcttcagtttctcaaatgggttcgagagatcagccataaaccaccaagaacagcagcagcagctggtacaacagatccggagagat

SEQ ID NO: 253045 - DNA, 326 bp, Gossypium hirsutum
  unsure (1)..(326): unsure at all n locations
cccacgcgnccgctcgaactctcgggccaaatcntgttttgcgaaaagacgccaaacagataaattttgtgattcctcttttctttctcagatcccttcgaaagcgattcttgttatcaagcttattagatttcttttaaatcgaattgaagttgctgattctaaatgagttcggccgaccttctcagcatcgaccctttagagctgtagtttccttttgagctgatgaagcagatctagtgttcttttaaattttcgaataaatctgataattatgtttcttttcaaggtgataaacgacaaatccaaagaagttctgctttcgt

SEQ ID NO: 253046 - DNA, 399 bp, Gossypium hirsutum
cggacgcgtgggttttggtgctcctcgtccttttgcaccgtatggacccaggttttctggagattttacgggtcctgcatctggcatgatgtttccagggcgacctccacagcctgggggaatgtttccatctggtggaatcgggatgatgatgggtccagggcgtgcaccatttatggggggtatggggcccacaggtgctaatcctgctcgaggtggccggcctgttggcatgcctccgatgtttcccctacctccagcacctgcctctcagaactctggccgggctattaaaagagatcagaggacaccaaccaatgacagatctagtgcaggatcagagcagggtagaggtcaggaaatgggtgggccagggggtgggttggaagatgagacaca

SEQ ID NO: 253047 - DNA, 422 bp, Gossypium hirsutum
atgtgaattctaccaaaggagactacaaacttgcagcttaaaatgggaaccagttcccacactggcttaatttatataactgcttggctgtattgcgggtaatattagtagcacgatgcacttcatttttaaacgagatgttactattatattgcttaaatgcactagcacttggactttgtgagatgcacatgtgtcactcagagtgctggcttatttaaaggtcaagccaaggagtttgtggatcagccacaactactgttttctaagacgattgatgtgaaggacttagtgaagtaatttttatattttggacttcccagcatgatgtcctttttaatgactgccatgctttttttggactcagtaaatatttggaattgttagaaaagtctcattactttgataaaatgcatgacatg

SEQ ID NO: 253048 - DNA, 419 bp, Gossypium hirsutum
atgcagtgctggaggtgcaggtggcatgtggaggggccagaccaagcatcccaggcaagcatccttctgccgggtattaataggaagccccacgccgggcagctcagccaacgaagcagcagccggctgagctgaacccagcaggtcgtctgctcccgcctgtcctctcgtcagccttcctcttccagaagctgttggagagacattcaggagagagcaagccccttgtcatgtttctgtctctgttcatatcctaaagatagacttctcctgcaccgccagggaagggtagcgcgtgcggctctcaccgcacgatggggcctagaatcaggctcgccttggaggcctgacagtgatctgacgtccactaagcaaagttatttaaattcatgggaaaatcacttctgccctaaacgaag

SEQ ID NO: 253049 - DNA, 387 bp, Gossypium hirsutum
cggacgcgtgggctacttgtaaaaactggtttctatacatgaggtgcatgtggcatgtcatgtgtcactattgaatgttgtgttatggcatggaactagcatcatattttccattttcagtcatttagttcctaatgaaaatgggctggtttgcacgtagtccttgaattgctggttggttccttatccggttattttcccattccttttgctccgaatagtcacttgtgtttggctcgactcttcattttgcttgaagtatttgtggccatactcatataaaacacatattcatgcccaaagtttacacctgactttgagtaacattgttgcttccttcgaagtaaacatataatctttccccttatccatgtagcaaccaggatg

SEQ ID NO: 253050 - DNA, 288 bp, Gossypium hirsutum
cccacgcgtccgttattaatcaatctgttcgaaaaaattacaagtgtacttagacgaaaatactacagttagggcaccagatctaacacaagatgagtccaaccagtgtcattctgaggacacaaagagggcgttacgagattgggtgagggagaatgtcacaggccacggatcaaagtccatgaccattgtacacaaaatgtcccatagaggtcaacttattaaatgatgctcatttgacccatatgaactatcccgatttgtgaaacccatggagaagctcatcta

SEQ ID NO: 253051 - DNA, 392 bp, Gossypium hirsutum
atgcgagctgtgccgctcgcggtaccgctgggtcagacagaggtgttccaggccttgcagcggctccatatgaccatcttctcccagagcgtctcaccgtgtgggaagtttctggcggctggcaacaattatgggcagattgccatcttcagcttgtccgctgctttgagctccgaagccaaagaggaaagtaagaagccggtggtgactttccaagcccatgatgggcctgtctatagcatggtctccaccgatcgacatctgcttagtgctggggatggggaggtgaaagcctggctttgggcggagatgctcaagaaggggtgtaaggagctgtggcatcggcagcctccatacaagaccagcctgggagtgcccgagatcaatgctct

SEQ ID NO: 253052 - DNA, 353 bp, Gossypium hirsutum
ttttacaactgttcgagacccctccacgagaagcattagaatttcctgaagcaaacaaggaaagaagtattcatatccttcaatctttttctatgtaatttagtatagtaatgtttttatattcacaaaaaaaattaactcaattttatctcaaattttttttccctagtttcacctctgcttttagtcatcctaactttagaagcaaatcattatgattttagtaaacaaagcattatgaagtagaatttttttttaaaatcgaaaaagtaagaggaaattggatagacaaaatttcaaatgttgctaaatacaagatatgacgatatatcttcagagtaaaaataccaaaa

SEQ ID NO: 253053 - DNA, 384 bp, Gossypium hirsutum
aaaagaatatgctaaatttcaccaattgaagcctcaatgctgcagcaatgccatagccttaaacctgacaggaacaaattggaaacttcatacttaaagagctccacatcagcttttgagcttaacccatcttttaatcaagtgctgatagtatccgggaaccagaaagaataggctagacaaacatgtaaaggcccaaaacatttctaataggaaaaaaatagaatacgaaaggggtttgatctagtctatcttctttaagggatgatataaatatcatatttctcaaaaaataggagggcagccgctgagattgaacaaacagaacaaaaactttcagggtaagagcgtcggaaaagaagcagataagaggaggaagaacaa

SEQ ID NO: 253054 - DNA, 399 bp, Gossypium hirsutum
atgccgcggagccgggcggagctggcctgcggctcccgtggccggctctccggccggagacatggcccgggggcccggcccgctaggcaggcctcgcccggatacggtcgccatgcccaagagaggaaagcgactcaagttccgggcccacgacgcctgttccggccgagtgaccgtggcggattacgccaactcggatccggcggtcgtgaggtctggacgagtcaagaaagcggtagccaacgctgttcagcaggaagtaaaatctctttgtggcttggaagcctctcaggttcctgcagaggaagctctttctggggctggtgagccctgtgacatcatcgacagcagtgatgagatggatgcccaggaggaaagcatccatgagagaactgtctc

SEQ ID NO: 253055 - DNA, 374 bp, Gossypium hirsutum
cggacgcgtgggtttttatagatagttttcatgaataaaacaaaaaatcaaaataaatattacgattattacatttttaaaattttattattcataactataaatttaaccctcaaaagtctaccaattttttaatttgtccttattcttttggttttttttttcaattgcaccaccaatctttcaatttttatcaaattgatcaaatttggatggaaaaaaactaatgtatccattaattgactaacaattgatgaaattcattgatgtggcatgctagatgtacttaattattgatgtagcactattttatcttatacatcatgtcaacaaattatttaaattttataaaaaaattgaaaaaaaaagatttt

SEQ ID NO: 253056 - DNA, 367 bp, Gossypium hirsutum
atttctcatcgttttttttttcttttactactttttactgaccaaactcatccttttgtatgctttaatgcttctatctgatttttttttttaccgtgattcttcctctttttctgataagaattattggattatatttatcaaattgggtttttttgttctgcgtttggccttttcccttggatctcttatattaaagtggaataatttgagacgaacaagggcttttagggttttctacggatagaacccatttcatgcttttaatggccatctccgctagatttgctcatccctgtatatattgctcctttaatgatttttcagttcctttcttttgttattgaatcctttagatcgttctgat

SEQ ID NO: 253057 - DNA, 391 bp, Gossypium hirsutum
atctctgtgactgcctatgtgagaggcagagagggcgagtgcctgcgagagagaatgagcctcccaccagacaggagggagatgtgcgtggatgtgtgtgatgtgcacatgtggccagaggcgtgtgtgcgagaccgacactgtgatccctgtgctgggtccggggcccagtgtaacgcctgtccccagccatgctgtggttacctctccttgctaccctgtcatcttgcacctcccggagtgagcagcgaggaacagcagcactggtcccaagcagaggccttgccctgctgggaccccgggagtgagagcagcccaaggatcccagggtgcagggaactccggagctgcccacctcctgctgccccctctgtacacgcagccagtcccc

SEQ ID NO: 253058 - DNA, 374 bp, Gossypium hirsutum
cccacgcgtccgctcagtgtttgaggctagacttggtagttggaggtctcagagtgatagtgtttgatttggtttaggtaaaattgtcataagttttgtacggttggtttaagactttttataaagcaattatataaagtgtgttacaaagtttttatgttggactttcgtaaagtgttctttggaatgaactttagtaactgtggattttatgtctgaatgttttgacgcgggtttcatattgtttcaaaacatatctaagttctatttagtttccttaagttgaaacgaacaaaagggttttcttgatttgaattaaagtttttgtatctgccaccttcggtgtctaaacgtaacctccgaaattcgatcta

SEQ ID NO: 253059 - DNA, 372 bp, Gossypium hirsutum
gtccatcttcaattaaagcgaaatgagttgaccttcccaattccgaaatttaactagctttacccttcacgcatgctttgttaaaattgttccaattataaagtattcttgtacttttcataaatttaaattttagtccaagtaattttatttttaataatttaatcccttacatttaaaattttaaaatttaggtccaactgttaaaattattttattaattcaagtttattatagttccatttatttagctatatggctaccaaataagtattttttttatttcaaaaagtaatacaaaaaaattaattaaaaatttttaatagtgttaacaattagacttgaattttcaaatctgaaaaattaaatgac

SEQ ID NO: 253060 - DNA, 392 bp, Gossypium hirsutum
atagagagtactgcaaaatgccatgcaaactttaaagagaatggcccgtttactaattgctgcccttctgatgtctttatgtatagttctgatagaattttcaccagtctgtgtatctctggagtgagatctgtgtgcaaagtgacatacaattggaaagccatttttgttgtaaagacattgtttttccgacttttccgatgagttagaaaaatgtttgtcattgctttaaaatcatagctgttctgcttaagaggaattgaatttaaaaatgagagagtattaaaactcacgtggcagtatcctggtcttaatcagatattgcagtgttcaaacgaggtatggacacatcaacatattcacctttttgaaggactagtgacttgtttaaa

SEQ ID NO: 253061 - DNA, 368 bp, Gossypium hirsutum
ctttcataaaggcgctgggattggccaaaaaatctacataacacatttcagagtttctaaaaggggccttttagaatcgatgacgacgcttcagtgttttgattagccataccaaacctgaaaagacccaaaataactctccgatctcgttactgatttgcttctccatcccaaatcattgaatcgtcgattgaggtgtcattaggagcctaattgttgtcaatctacttctactaccttatgcgcgaaagagggaatagctctagcaagataagtttctacatttctttttagtccctctattgccaagagacgtgcaacaccatttgcatgttttgacacataatgaaaaacgcagtgttgatacc

SEQ ID NO: 253062 - DNA, 146 bp, Gossypium hirsutum
cacgggggaggaaaaattcaaattggcaaggggggtcctggattgggaatttaaaaaactagattggggggaatcggttccatgggatggccaatggggggaggggacaactttttgcttggaagtgggcggggaaatataagggg

SEQ ID NO: 253063 - DNA, 392 bp, Gossypium hirsutum
atatttttatatctacagacgtactcttcacttatggtggcgttttatcctgtcacatatataaataaatatatatatatatagcaaacagccttgcaaatcatcggccagaaaagctgcagggcattggcagggcctttttctacctggttggcacctgggggggggggtaaccaggatattggaccggctgataattcaaaactggtaatactggccagggggtccaaggaaaagttgcccaaatattccatctaactggtctctaccccaaatcccaaaaggcccaaatttccctttggaattgggtgactaagtgtagtctgtggctgacctagaaggacacaaagttatcaagagtttcccttcctagaagatgaatgttacctttt

SEQ ID NO: 253064 - DNA, 392 bp, Gossypium hirsutum
atgaataatcctttgaaaaggatgaaggaggaagatattttggatcttctggaacaatgtgaaattgatgatgaaaagttgatgggaaaaactaccaagactcgaggaccaaagcctctgtgttctatgcctgagagtactgagataatgaaaagaccgaagtactacagcagtgacagcagttatgatagtagcagcagctcttcagaatctgatgaaaatgaaaaagaagagtaccaaaataagaaaagagaaaagcaagttacatataatcttaaaccctgcaaccactacaaatttattcaacaacccagctccataaggcgttcagtcagctgccctcggtccatctctgctcagtcgccttccagtggggacacccgcccattttc

SEQ ID NO: 253065 - DNA, 347 bp, Gossypium hirsutum
agccttcggaccccggacccgagacccgtggcgggggtcgacaccagggggtaacagacttaattcacttatttacaggccattttaaaaattttcagaccaggtggcttactgggtgactgggcccttaaaaatcatatcttgaggtccaaaacttggaaataaagttcggaaaaacttcctggaactagactcatatatccatctaaaaatttttttctagaatttttgggcgggccaattaggacattttattaggtaaagagttccctgtgtacacgggtcgactgtgttgaccttcttgcattacgacttatatatattcctgtgcagggattaaatactta

SEQ ID NO: 253066 - DNA, 377 bp, Gossypium hirsutum
cccacgcgtccgaaatgatttagtgatcgagactcgagaaaatagcctgactggaatatgaataataatgagaatttggcaagaacttgttaataattttcttcttattttcatacaaacttactaagcttaaagcttactccccctttcctttttctcttagtgttgtcaggtcgacttggggttggagatcgtcggaggcagcatcacactatcaagtcaccacttttggagtaatgatgcatatgctagtaatttcaagtgagtggcatgtatagggactagacaaatgatatgtgttattatgatttagtcaaatatgttggctatattgagttatttgtatattgccttgagatgtggctcatattgattat

SEQ ID NO: 253067 - DNA, 370 bp, Gossypium hirsutum
aattatctctaatccgtactgtgactgtctcgacagactatctttgatttgtgtttattgtctcagcagactttatctttgtgggttccatggagtatttcatccatgggtttacaccgatccactatcctggcatactaacttatgatgttatatagtattttatccatgggcttacttatcatacttgactgctataacaactttcatctatggtcttacactggatacctcaaaccatatactttactggcatggcgtggttcatctatggtcttagaccattaacattactatgtaccatgctcccatgacatctttcatccatgtgcttacgttacatatcctgtatctagactgtcataacttc

SEQ ID NO: 253068 - DNA, 367 bp, Gossypium hirsutum
ctatgtgtgcgagttcttcaaccgagcactatgtgtgcgagatcggttagtgggcactaagtgtgtgaaatgagattcgtgtaagacctcgtttgggacgaaggcattgatttgagatgttgtgtaagaccatgtctaggacatggcatcgactcgatatgtgataacatgtaagaccatggttggactatggctttaagtaaacgacgtactcagacaagtacgacgctctttaaattgacaaatgttaggaagtagaattgaagttagatgttgaattttaattagatactgatatttggtatctgagtttgaattggggattaatagatataaattgacgattgattattatttcagctgtaat

SEQ ID NO: 253069 - DNA, 197 bp, Gossypium hirsutum
cctttttaataagaacttatactagtcctcctccgaggaagaagaacaacatgaacactaagttggatggagaagggcgcaacacaccagagtgtgagcccacctattaaccaaccacctatttgtagttcgtgcaagccgtacaaccacaatcattggctgcctaaacaaagaactactaatgatcggtttcggac

SEQ ID NO: 253070 - DNA, 375 bp, Gossypium hirsutum
gaaaactctgtaatgccatgaaattgatataaccaagtttaggcaaatttcttgttcttcttaattcaatttattaagtgaatttttccaacattaaccatctcttgtagatatgtagggtaggggttggaatttttgtttgtttttgttttaaataaacttctaacgaattttaaatagctttaaattttatagttaagttccaattacacttttaaattcttaagatgaggatacagattgaagttataaaaattatattagggattttcaaacacttctttaactttaaatttctttatataagtttaagttatgaaaattatattataagcataaacatgtatgagtgtttcgaataattataattaaaat

SEQ ID NO: 253071 - DNA, 240 bp, Gossypium hirsutum
aaattttattagaagaagcactctattgctctgtttctctcggtgtagcataagatcaagatcaactgttcttcaaccaaaagggaaaaagctgcttggaacgttgcactgataaacaatcaagctcaattgaatagtagaggaacttcgcattggtgttcttggaaggtcccccatttgcttccaaaggggcttattggagattattggttttgtgggcatctgaccttttaaatccat

SEQ ID NO: 253072 - DNA, 393 bp, Gossypium hirsutum
atgctgtgtatgatcagttatctacctcagagtctattgtcttttgtgctgggacaggttgctggccctccctgtttccacagaccaaatcctcctagctcaggagctagggctaagcagttgtttctttcaagtattttttagttcttaaattttatgcttgtatttgatgatagatgtcagtgacatttcatagtttcaaaagtccttgctgctctgagaagtgtagattctagtgaaaattacatagtcataagagaaatgtgtttttgtttttgtttttgtttcatttttttaaaggtggggtattattggttctatgctccctggaatattactgctttgtgaaagtccagactgaacgcagcaccctctgtgtacctagtacaggta

SEQ ID NO: 253073 - DNA, 309 bp, Gossypium hirsutum
atctcctcactcacccttcctggcgctttgggctccccttgcttgttagataagatgtgtcatgtgaaaaagcacgcacccccagccaaatgggctgtggaagaccctgcggcaaagcgagcgggtgagcggactaccgtggccgggctaccgtgactcaccgtgtgcgctgcaaaccctatggctgcgtcaacaaacgaagaggtaactactcttacagcctttccgattgtgggtacactgcttgcattagccgggttaacactggacggcaccgacattgggctcatgctaaccacaccggacatc

SEQ ID NO: 253074 - DNA, 393 bp, Gossypium hirsutum
atcctcaggggtgagaacaggattgcagaactgcgcttacgccttttggaaactcgtccagtggcaggagcagcctcccaggagcagagcagacctgctcggtggtcccctcgccaaccagggacccaagaagccgctcaaggaaacacggtcccgcggtgtccgggaggtcctaacaagaaagctttctgctcatccatggctatgagttcatgccttaatgcaccccacggccagtgacagtggcagtgacaacagcgggacctgcctttgaagattggctgctgcaagggttgatggctggcatgtcgcaaagaccacccagcatgtactggtgtgtggggccggaggagtcagctgtgtgtccagaacgcgccatggagacgcttaacg

SEQ ID NO: 253075 - DNA, 397 bp, Gossypium hirsutum
ataaaaatatgaagtaccaggaggctaaacccactggcctaagatctcaccaaagttcatgagataaccaggactaggacccacggctcccgacgcccatacttgctgtgttatgctgcctccatatctgtcaggaagagcctttccagaacgactcagcatatactaagaagagcaggtatggaaagatctattgtcaggcaatcttagaattccctatatgagtgggagaaagatgtccaaattccttacgcagtggtattaatgatgatgccattgccttctctaagtccaggactgttttcctacagtgtgcctcaaacgtgtggtagaggacaggattctacattcacagcctgttccatctacgagcttttccagatgctacttgtggtag

SEQ ID NO: 253076 - DNA, 287 bp, Gossypium hirsutum
ataaaaattctaaccacgcggacgcgcaaaccaacattacgtaggggggtagaaaaggctgggcgatgacttacattctggctaacttgatccaagtaagattcctctttggaagtgggaaacacatactacggacgaagtggccttaaagaccactaaaaaggatataacatggggcattaatgacaatgaactaaatgtggccatgtgataccttcataactgactacaagctgagaaaaacaagtgtttttagtgttgtggtgaagcaaaaaaggaggggttta

SEQ ID NO: 253077 - DNA, 266 bp, Gossypium hirsutum
aggacacgtcggtcttccggggtagaacccaacgacgctcacccttttccttctttaaagccaaaacagatgtatgacaacccaagtatcatatgttctaagtgactgaaaaatgtgatggaaaacaaggatttacaatcctttaaagcagatactcggacatggtaccaaggcggtagcaccgagtgccgtatcgccatacgagaattggatatgaaaccgactggatgagctatggggcacactactgaacgtaacaagctaga

SEQ ID NO: 253078 - DNA, 374 bp, Gossypium hirsutum
gaacaactttcaaagtcattaatcgttatattaccttgactgctatgtcaaaattactcatatcttgtgagaagttaatagtttaaaaaattctttaattaagataaacataaatagaaatactatgtttatggtctaaaatggctgttatggcggtgtactgctgttactctttttttacaagatacataaaaaaattctagtttattagaaatgcaattttttattgatttggtgtaattaaaaaccccatcactaatataccattataaatttaaaaacttacctcatttatcagttgtttttctagattcaattaaatctagtgactatgaataaaatagaaactctttctcatttctctaacctttaca

SEQ ID NO: 253079 - DNA, 317 bp, Gossypium hirsutum
gccccgacgcgtactcccaggcgtgacccatgcctccggaggaaaacatgggttctgagcagaataaaggaactagcttgcctccattggtgacaaatcttagtgccgacagacgtggcatattcggaacggcggcggatattaactgctgttcaaagggttaccgtgccctccgtgcccgggaggagcatgctgtcaaggctcaagctgccatgggggaatccttcatcgtaaatacgaagcgggaagatgccgctgacctgactgaaaagactgctcttgagctttctcaaggaggatcctcatctactgagggc

SEQ ID NO: 253080 - DNA, 360 bp, Gossypium hirsutum
ctgtaagacattttccatcggctctttatccaggcaaatattacacgctgctgtctcatcaccttgcttgccgtctttctcagtatcccatgcctcttgacagggaactgatatcagccgactgatgtcactggtgtcaagaggcaaggcttcccttgccttagaggagctgaatggtttcagtacccccccaaacggggaagtctgaaagccctataagcagggtggtcggtccaaatgatgacgaaagaagcacggtgagcattcagccagaaagaaacagtaggtatagcattgcaggctcctcagcgcataacaatgagggccaaggaagctctctatcgctgccaagttacatgg

SEQ ID NO: 253081 - DNA, 243 bp, Gossypium hirsutum
agccgctagaagaggtgatgggtctgctggttatccagggcaacctgacagctgtggttcccaaagaccatgaatgactttaggctcagaaggccaagccagttcacacggaagagatagcagtagaggcatttcacaggggccaaggggcaaggtggaaattgccttataaaagcataatgcctataaaaccgacccagaagtcgaagtataaaagaccaataagaaatgggaacattccaa

SEQ ID NO: 253082 - DNA, 341 bp, Gossypium hirsutum
cccacgcgtccgtttagatcgcgagcgtacgaactttttttttttttgctctggactaatgtgatgccaaacagtgaggacgtattggggcttgtggcttgatacgactaaccgagggagtgggaccgggggggtgcgccctgggggaaggagaaggggagaggcatgaaatcataagggagatcgggacgacatacaggtagcggtaaacagtgaatgctataagtaaagagccaaagaaaggaagattggaggcaagaacacagctggatataggataaaaaatgcgcgccaaaaaagtaatggaaggaccatgggacggagccgcaaagaatccagga

SEQ ID NO: 253083 - DNA, 412 bp, Gossypium hirsutum
cgcgttggtgccgggccggaatttccgggatcagacctgtgccggcacctgctgggagggacacgaggccctcccccaggcagaagagcatgccctttgccgttgcatgcaaccagccctgtgattccatgtgcagatcccagcagcctgttggggcaggggtgccaagagaggcattccagaaggactgaggggcgttgaggaattgcggcgttgactggatgtggcccaggagggggtcgagggggccgactcacaaaaggggactgacagtgggcaacactcgcatcccactggctgttgttctgcaaccatccgattggctttctgaggtttggctgggtggggaccgctcatttggccactctgcaaattggacttgcccgcgttcctgaagcgctctcgagctgtt

SEQ ID NO: 253084 - DNA, 307 bp, Gossypium hirsutum
aacaaatcgaagtacgcggggactgctttcaacttttttacagaaaaatgatagctatccactaggaacggtggttgactttgcgaaggatgccaatggatttacaatattaaaagtgaggaacctggcatatcatgcaaaggccttagtgaatgatcccaaaagctcattgcttgccgatagaaatcctgcagacaggactgatttaccaatcattcctgttcgggatgcacacggtggatcctaaaaagatcaagcggacaaaagggctgcttatttggataaccacccaaatgcattttgaaag

SEQ ID NO: 253085 - DNA, 145 bp, Gossypium hirsutum
tgcgagctactcattcgacagcctctcaactcgggggtcaaaattagcctacgcctgcatagatcctcatacagctattaaagtggtatctaaggtgaatctacgccacctgcgatgaaaaacgcccagacaatagctaaccaac

SEQ ID NO: 253086 - DNA, 378 bp, Gossypium hirsutum
atccaatatcactgattagttacatcctttgtgtgggattagctgtaaagtgtactgctcttattcttgttcagaatagtgaattggtagccaaaaatacatgtatcacagatgttaggtcgaatttaaacagcacagtcaagtgctctggaagtttttctgctaaattagtagattaaagaatactataccttagccatgggaagcagcacgttttcctttggtaggtaggatctctatactagtgaacagtgccagtttcacactttggatttagaactgttctctagttattgtaacacagaatactgtcaatccctaatttacttaatgttacttattggaagtggggctgttgaaaaacgcacaggagggaaa

SEQ ID NO: 253087 - DNA, 315 bp, Gossypium hirsutum
tgtacatgatgacacatgtaaaactgagacggcgccatcatacagtaactttgaggagatttaacacctttaggccgctggatagtgtaaaataagtgacacggggcagtactccctactgcataatatacgatgtaacgtaaagtcaccgaaaaggtgatacctatctgtacaatgctgaggccatggaaaactaccacataaagatcttcccatcccagagaaactcgtacgtcccttctagatgatccaatattgcccatcctgtgcgagcgacctgttaactctcttatttggggaattaaaacaactggc

SEQ ID NO: 253088 - DNA, 390 bp, Gossypium hirsutum
aatttaccggatatctaacaaagtgctgacattacaggcgtgagctaccaggcgcgggcctcctgctcttctttctaccgtctgctcaccattttaggcttcattctaggaagcatctttcctgaatatttcaccactaaacattctggtggtggctagatggcctagttaatctacacatttcattttatcacctccagattttttttgtgtatgtcaaccgatacattcaggggagaacgccttaatacatgaaaataataaacttgcggagcacacactaatgaccaaggacactttaactctgaacctaattcaaaccaaatagagagagcctgatagaaagcagctctgccatccttgagttagaacatccaggaagggaaggct

SEQ ID NO: 253089 - DNA, 169 bp, Gossypium hirsutum
caaaataaactcatattgcgagaggggggttgagcctccgggcacgccaaggtaattttagttaaagtttaaaaaagactgatatctcgagaggatagttcatttcaaagaaaactataaaaagggtggtttttctaatggaacaaagcttacaatcgctggcttttta

SEQ ID NO: 253090 - DNA, 345 bp, Gossypium hirsutum
caaaatttttaaaaacttcacgaacatgactttatgtttatgtttttattaaacttttattttatatatttaatatggtgtgatcttactgtggatttttaaaaaataatgttgtggacaatttggctatttaatgcatggatgttattttttttcttgttaactttagttttgttaaataataaagttttatttgtaaggtttattaaggaatattttatataatcaattaatattggaaaatatttgaaaatattaaatctaatccattgggtgtattaaaatattagattttttaaaacacatcaataatttcaatttggcacttctaaatagtttaataca

SEQ ID NO: 253091 - DNA, 248 bp, Gossypium hirsutum
cccacgcgttcggttgttgagcaacagtggtggtgggtttgagacaagtttgactcatatggaagggcttaacatgtatggcaatggtgctgataatggtttgatgataaggaagagagcgatggttgtagtgaatgcaagctcgcattctaagcatgcaaagacttgggcactcactcatgaggagaacagggttggtaaagttacttatacgcaatgtttttataacaacccaaaagattcattat

SEQ ID NO: 253092 - DNA, 407 bp, Gossypium hirsutum
ggggggcgccagcaggcaccgccccaatattccggatgcgaccaacgcgtccggaaactggagaattcggggggaaattataaggcattttgtattttctttatctatcttttttgctctatttgttatttcaattataaaaaaatttaatgttttcaattatttaatgttgtttaaacatattctctttttttagttaattaacattattatttaattctttttgtttcaaacgcttataggatttttttcttagctttattactgatatttcctgaataagagaaaatatgttttcttcatttgttgatgttgacttatttttgttttataaattttgagatttctattttttttgcttatctagaattttatagtttttgtttttacatattataataaaattt

SEQ ID NO: 253093 - DNA, 364 bp, Gossypium hirsutum
gcgggttatgtaaagttgcttggcgccatgagcacctcctaaacatgatatgcagacaagtgatactaccggagttgaatgcagaggaaataaagagcaacttggggaacttttcaggaggtaacaccaattttgctaaagataagcaacataagctatggatggacttactttaaagaagtgaaaaaaaactgcgagagagacttgagggtattagtttttatgcttgtagaagtttggtattcaactcagccaccacttgctttgagccaggaaattggtctccttttggtatggcacaaatggagcaatgggttgcaagtaataatgatcaggtgcacgaccaacttaaaattgtggcaac

SEQ ID NO: 253094 - DNA, 263 bp, Gossypium hirsutum
gagataaataatataatggagctgcatgagcaaaaactatagtttctccaacaggggcaagcacatttcatgaatgatgatgatagggcaatcgacattgaagttctttctagatggcataaattgaaactagattatgatggcaaatctgagagttgcctaaaaacatataatgctggtgaattgttcaaggcttgcattatctgcattgcacgttgtatccattgtacatgttgcttaaaggactgcttattgggacgaaa

SEQ ID NO: 253095 - DNA, 186 bp, Gossypium hirsutum
tgcagactgcaatttatatacatatctgaactgtaattttatgctaaaccgaaaccagatgcagatgctccagtacatcgcgttcatcgcacccagtgtggctcctctcgacatactaggtgttccttcggacagtaaccaccgacgttaaatattgctatacgcatggagaggctgagctaaagg

SEQ ID NO: 253096 - DNA, 386 bp, Gossypium hirsutum
gggcgcgatatccgggattgagaccatggcggcgggtgaggggctttaggcgggacctgtggttgatctgcttctgggacctcatcacatcaccactattcgcgtggtcagtgtagggaccggcacccgtagctactgccgacaggtccaaagggcacattccaataccgtcggggaaaacatattttagtttgggaacgatcctgttcagaaataccactatctccctgaagtgggatggagaaccttgagacctgtctttgaatataacctggtatctgcaaagtgctgattgggacaatgggatctacaacttcaaggcagcaaaagtcaggatgtctggggagcaacttaaggaaaaatgaggcttggctcggccagatcaa

SEQ ID NO: 253097 - DNA, 380 bp, Gossypium hirsutum
atcagtggccttggcccaggcactggcgccaacattttctgaaaccttagaagaaaatagaaaccacagaggtcagagtgagcatcttcacagacattagcaggtgcccaggggacccaccacaggctgaaatgccagcctggcacagatgtggttctcactggcaagaaccggccccggcccacgctccccactcctgcggagagctcacagccaggctaggaggcggttgtggggcccagccttcaggaataagattagtgtgtattcttttctttttttccttaaatcagtctttcttctgaaaacacctaattattcttttctttttttccttaaatcagtctttcttctgagaacacccaatgcatgtggattgg

SEQ ID NO: 253098 - DNA, 193 bp, Gossypium hirsutum
tctgaacgtgcctacatttgcaggctacatgtcggacgtattttaaccctaaacagggtcaacctccctatactcaaacgactaggacttagggccgtgaggggtttactgtataacacaactggcttgaatctagaatgaatcgttaactctcaaaaaaaattcaacatgtgaagagcatggagcagaattc

SEQ ID NO: 253099 - DNA, 360 bp, Gossypium hirsutum
cccacgcgtacgttgaccggcaatagcggcgattttaaataaactccacaatacttctttgcaaaacggctccgttttagggtactttatgacttttgtggcgcttccccaaaaacgccgcaaaaaaattggaatatagcggcgttttctgagaaacgccggtaccgataacgaatttgaggaaaaatctgagcaaaacagtactgttttgctgtttcattttattgctttagtggcgcattttaaaaaacgcctgaaaagaatgcattagcggcgtattcagggaaacgccgataaagatatctagttttgaggaaataattttgacaaaacgctccccgtttattgcttcattttatt

SEQ ID NO: 253100 - DNA, 300 bp, Gossypium hirsutum
  unsure (1)..(300): unsure at all n locations
gtaacccctanggaaacgggaaaaccaaacccggcaatcccatccctttaaaatggttacatatttccggaaaaatgttattaatattgaaacaaaacaggaaatatttgttttttgaattaaaagtgtcgattttaactcaaaaaatgtgttataaacaaaacatttataaggcttcacctgaattctaaaaaaatttataacaacaactcgttgattttacaaaattaggtatcacagagctattacttatttaaagggctaataataaacattcttgaaataaaaaaccaaaaaggt

SEQ ID NO: 253101 - DNA, 229 bp, Gossypium hirsutum
tccatgcgttcggttacagctgacaaaagaactgtttatatctttttggctgaccagtgaaatcttcgaatttgaacgcggattgatacactatgcagatagggtactaatggatcctaatcactgattttcctaggtatgtggcatgtgcaaggtatgcgtatgtggatgtaaacgggtgctgcaacgaggacagcgcggcactggggatggatgctgaagcttctag

SEQ ID NO: 253102 - DNA, 363 bp, Gossypium hirsutum
gattttacgagcttattaattgaaagtatgacagcaagatcgctcattcccaaaccaagtaccttcgggatttagccggatatagctactcgctcagatgccttcgggacttagctcggatatagtaactcgcacaaatgccttcgggacttagcccggatatagtaactcgcacaaatgccttcgggacttagcccgaaattagtcactagcacaaatgccttcgggacttagcccagttaccatccgaatattcatgcacatatatcaataaatcatatcacatctatatttcattttcatcactagaactcaaacacaagacacttgtcaaccattcccatttttcggctcaatagccac

SEQ ID NO: 253103 - DNA, 308 bp, Gossypium hirsutum
cctacccggagcattaatgcccatagacttgccaacattacaagttgaaacgtctggctttaaaatgggtggttaaacggtaagtatatattagatgagcaaggtcctaggaatctagtgcatagccgtaccccaccatcattccgttgtaaaaaatgtaacacattcagggttactaatggttgcatccacgacatgcggccatcgttaccattagacagatgcctatacgaatcaacattatgcgacgattgccggttgacgtgcttttcatctcatttgttataagcctataggaggccattagg

SEQ ID NO: 253104 - DNA, 221 bp, Gossypium hirsutum
gagattttaaaaagtgaagcgactggcgcctgacatggattgatgaaacgggcgcgactataataatggcaacttatgctttaattcgacaaattagccggaaatttgtcaaaagggaacctgtacttaagtgctgttgttttgtccaaaacgagtccttgtttcctagtccatgccttgattgaatcacatttgcgagccagagaagctacagggctgtg

SEQ ID NO: 253105 - DNA, 423 bp, Gossypium hirsutum
ccggattacgggggcgggcgaggcggccgggccggggattccggggtgcgacctgctcggaggtatggtgctgggtgtagatgcaatgtggctctcgatagcaccttatggacagttgggccccaaaggagggatgacaatagctactgaagtcctaaagagcaagcctaactcaagccattggcatacaggcattagacagaaaattagaagttgaaatggtggtgtgcaacttgtctggaccagctttatttttttggtaagtataaaagaaaatgctgatagtgatatgcttactgctgagctaatggatcaaggcttggctgatgaatactgactgttttccttgaacatgtttggaacagtgtgtatttaccttgagcatgtttggaacggggtttgtgtaatgatgttggtcaaatg

SEQ ID NO: 253106 - DNA, 353 bp, Gossypium hirsutum
attgtgcacatttgttgacacgaatgagtttcttggttcaatggtaagactttaacttaccctttagtcctgtgtttgagtatctgactgtgcaaatagaaatttacttttgctaatttttctagtgtgctgcccatgtagtggtggtggttgggtaaaatgcaatttttaatctgataagatataaggaaattgaggctagttagttatgattgagatttctgatgttttttcttaaaatagaaaaaagaaaggtttatactatcattatcaaaagatttatattgaacttgtttggattagtttatttttccactagaaatttcccttacctttcttcgtttacccacttt

SEQ ID NO: 253107 - DNA, 272 bp, Gossypium hirsutum
accaaatagactattaatgtatcacaaaacatgtctaacccaaaagttatgacatttataatttcatatatataacaaatggccaaactgaattacctattccaacccaacctaggtatatgccatataaccaataaaagaaactatacaaacattgttaagtctcggatttttgtttggatgctaaagtcgatgcccgagacctcgatataaacctaacattcgtcaaaataaaaacaaaggaaatataagtatgagggggcaagtaatat

SEQ ID NO: 253108 - DNA, 238 bp, Gossypium hirsutum
cccgcgcgtaatcccacgtgttaccagcgcggcaagtgcgcccccgtgttcgaagagaaaattcttattgaaaaagccaccaaaagtctcgaaaacactttctggggtcctcgcagagtacagggagggcaagaggattacgcttccctgcaccataaagatcattgactccatcctcttaggaaagctccttgacgcctacttccaccaaaaccgctgggttggggccgcagatccc

SEQ ID NO: 253109 - DNA, 385 bp, Gossypium hirsutum
attcggcgcccacgtcggatgtgggacaggcttgggggaaagagcttgtcctatctcaggaacaaactaacaggctgtgggcagagggtctgaaaggtggggctttggggtagtgcccaagcctggccatattgccaggagtggtgacaagtgagaaatgcatcttccatcaaacaaacacgtggtgcatggccactgcctgacagccagatggcctgtagaaagagctaccagggctcccagacctgtggaacaaaaaggatggggaaaaggcacaggggcactgagtgtccctttaaaaactaacacactgaatattctgtgcgatccagaacagtgtggcagctttcacagcacaggaccattcatcaggggcctaaacgtt

SEQ ID NO: 253110 - DNA, 345 bp, Gossypium hirsutum
aacaattgcagtgcatgtggtaccaatctttaggcaggtgtctcagatagtggatcatctacaaagcatgtccactacatctgcctcagaatccgccagcatcagggttcttaagtttgtcataaacagtgtgttaagcggtaaatgattttgttcaaatttgctagaatatcatcctttttttatttgtcatttttgtttttaaatatagaaatttaggtacttgcagcggaaagacaaatgggggattatttcgtatattcagttgtatgttccattttgtgtgaaatagttgagagcgtatttacttctcaaaatgacttatcgtcaatgggtagtcaaaaa

SEQ ID NO: 253111 - DNA, 159 bp, Gossypium hirsutum
gccccctatcaatttcattccagggggtaccaagacttgggcatgggccttaaatagggggtcatctttttaggggggttactacattcaagcgaagaagccgcccgcataagggttcttaagcctgcccgagatagccaggaaaaacggggaacttct

SEQ ID NO: 253112 - DNA, 307 bp, Gossypium hirsutum
cggacccgtgggagccagggctgtaatgtttcaaaatacaatttgtctgatactcacagcaaaagttttccacttgaacaatcatcattgcaaacaattaaaattatcggaaagaaaacataaattgattccataattctgatattcactaaaccctcatcattcggtcaaaagcaggatcgacccaacacttctttttccaatcgaaaggtcattaatgtattccccagacaaccaatctaggccttatcatcacggtctgacacggaaatatttatttttcatggattgcaacatagcccagggc

SEQ ID NO: 253113 - DNA, 409 bp, Gossypium hirsutum
cgcctggggtccgctccgcaatttccgggatccggaccggacttccgagacatcaagaaccggacttgagcaggtccttccaatatagctgccaaagctccgactgaccagggacctttccagagctcaaggatttctggacctttctaccaattgtggaccatgggagggcccagggaggactttcatactgctgaatgttttccagagcatatattacaatctttcaaagtcgtacactagactaaagtggtttttcgagcgatagggcatcaggtggtgggaacagcaggaaaaggcattccagtctgccccactgggtccggcagccctcccgggaggggcccacatccttctactccagtccttgtccaggggtagaggcagaccagcagctggacttgatccc

SEQ ID NO: 253114 - DNA, 354 bp, Gossypium hirsutum
cggacgcgtgggtttgtttgtaaaaagtacttacccaaccaatacaatcgaatcccaagtgaaaaaaaatggaaaaaatactaatattttaaaaagttggaatttgggatgatataataagtttgttgtcatctgcaacagctgagtttggaccttcaatgggtataaaaggtggaaatgcagcaaggatcccagaacatacatgtcataaagttatagagacaaacacatgtgagttgcagaaatgcatccacgaatgttccaaggaacctgctggtgtcggggactgcacagattacaatgtttgttattgcactttttattgtaaggatccccctctgtgattcattcata

SEQ ID NO: 253115 - DNA, 270 bp, Gossypium hirsutum
gcagctaaagacggaaaacatgacaggagttaatgataaggcacgccgtttttgaaaagctcgagaaaaccaaggtggaatgtggcaaatactttttctttgttagccgaaacaatcaacaacatatggtgaatctcttagtaaaaagatatattggaaaaaagacagtacttttataatttctttaacttttttttccattttttaagggtaaattggtctttgtggcagtagttagctaataaaattgacattttgtaaaaaaaaaca

SEQ ID NO: 253116 - DNA, 313 bp, Gossypium hirsutum
agagccatatggcaagggggtaagccgggctggccagaactattccctatgttgggaagctgaagaaggccaatgtggtcagaggccattacttggacctggtgcggcaggacatactcctgcacctggagaagcaattacttgaacaagaaactgcaacgctgacagagcttttataacctccttaactccaggttccaccatgtcagcatgtcatgaagctactgccggtggaataccagcttaatcagccgcagggggggaactaccctgttgagagtggcccctttcatgaggaccgaggctctcatac

SEQ ID NO: 253117 - DNA, 368 bp, Gossypium hirsutum
taaactttttgaaaggctctccttaaaaaaaggtgcctttggtttggtctttggattgataaaagaagtcttcttctttttttttttattctctaaacaaagctgtctcaagtaaaatagtaatttgttcatcatgctttgagacctaaaacacatacatgatgattaatgtagggaaagatgggtttaagatacctcattttatattcttaaatgataatcaaggctttaactaaagatgattacaggtatatcacttcttttctcttctaactttataaaaataattatttcattttcctatttatttttttcgtaactttcgttctcaatcaccattaaatagatagaaaagttaatgtttgtta

SEQ ID NO: 253118 - DNA, 283 bp, Gossypium hirsutum
cggacgcgtgggcggacgcgtgggcgtcaagattgacaaatgatcgcacgaatgctacgagctccgtttctctcactttctaaatttcaggtacctcttgcttcacttccagtccttcttggatctcatggacgttgcggtacacaagtgattgagaataattgtgatcctactggaatttcatcaaataagatctcggtttatggattcagaatgtttttcaccgccactgctaaagatttgtcggctaagaagtgcgtgccatgcaacacgaaggatctac

SEQ ID NO: 253119 - DNA, 238 bp, Gossypium hirsutum
ccataatgaaatacaccggggggcttgactgaactcagtgggagctagattaacaggtaagactgtatgagagagactatgacaaggtgcaagcgattgctgatagtttgaaaacatgaacagatccgttgacatcgtacacagactcgaattgaagagagattatgtgtctgatagggaatgatgggtttaagatacgctatttgtggttgacaaactttaaatagggcttaaagga

SEQ ID NO: 253120 - DNA, 274 bp, Gossypium hirsutum
tgccacacgaactgctaggtggtgacggtaaatgatctatgcactgtcttttaatgatttgcaactcatcaagaacacttaatccaagttttaaccatgtccagaatctgcctttgaaggacatgtaatatgtgaatgctctccttttacaggatctatctatgttcttgccacatcaatatacatattgctttaacacaactcgtcaaagttgcccacatttaactcagacttgggtgcaattattttaccttttgtttatgttttaaatatc

SEQ ID NO: 253121 - DNA, 230 bp, Gossypium hirsutum
  unsure (1)..(230): unsure at all n locations
accacgcgaacgcgagggggtcgcccacggcgcaagaaccgaacaaagcngaagaagggaagccaaggaaaagcaaaaaacacggccggaaacaggaaacgggagaccggccaggcacgcgaacgccnaggacgccgcccacaaggcaacaacaaagaccaggagcaacgaccaaggcaacggacccagaggaacgaacaagaaaaaacaccacggggggacaaggaggc

SEQ ID NO: 253122 - DNA, 339 bp, Gossypium hirsutum
atgccaggtccccgaagccgactcagtcagcttcctgcaggagctgctggcactaaggctggccctggaggaggggtgtggccctggccctggacccccgagggagctcagcttcaccaaatcttcccaagctgtccgcgcagtgagagacgtgctggccgtggcctgcgccaaccagtgggagcagctgagggggccgggtggcaacgaggacgggccacagaagctggattcggaagctgatgctgagccccaggaccccgatagcacgaacctcttagagagtgaagctcccagggactatttcctgaagtttgcctacatcgtggatttggacag

SEQ ID NO: 253123 - DNA, 322 bp, Gossypium hirsutum
tatcgcaagagggtcttcctgagcgccgagtgagcccactcaccactcagtcaggacgtggacttggaactcaggatggggccgtcacagacaggcctgccgagctgggatgtggaaccgcggtgggtggagagctctgaataaaccgtctgtgtcatggccgcgcctgcctctgagtggtcaggccacgtctgcagggcaaagcccatcggggtcctcttgggtggggacctgatggctgtgggatgtgcttggcctggagtcagtgtgggggtaacatagtcagatatttgatgctggcattccctctagagttaggggc

SEQ ID NO: 253124 - DNA, 198 bp, Gossypium hirsutum
caatgatgcctcctattaatggaggtgttgaagatattcccaaacttctggtggtaaatagaactgaacagaatagacaacgagtcaaatcagcatacaactagattattaaggccaaagtacaacgtattaatgaagcaaaacccgatataaattttagaaggtcatcaagtatctattcaaatagtggttccaact

SEQ ID NO: 253125 - DNA, 337 bp, Gossypium hirsutum
tattgcttggaaaagacaagctttccagacaatgtttgcagagaaagttacctggaagcgcggacgttattcatacttataaccttctgccacgtatgcggcatggtgaacacagacaaactctctgcaaataactttccactgccatagctctaggctgtccactcttgaggagctcccataacccaaaaaggcaagatctgcccaatgtatcagagcatccttgagcacctatagagaaacttggcttccaaatgagcaatggctatgagggcaaacagagtgctagaattcttccatttgaatccgcttgaactaatcaaggcctctggagcat

SEQ ID NO: 253126 - DNA, 285 bp, Gossypium hirsutum
cacacaatggaaacacctacggagggtggacactatgtgcaacatcatcaaactatgtaggaaaaaagttacacaacaaacggaaagcaaataatgttgtaaaataaaaaaataaaaccactaacctgtaagtagtggagaaccgtatcaggagtaaacactaacctgtaaagagttggctcaatactggcttttattaactctgatgctggctatgccatcgtatagatgaaagaattaaaataatttgcatctgagattttgttaacagaaaataataatttg

SEQ ID NO: 253127 - DNA, 351 bp, Gossypium hirsutum
aagcaacatgttttcttcaaggatattaattggagcacacttgcaagacaaaaggctatgttcataccatcaactgaagcacatgacactagttactttatgagccgatatatatggaatgcagaagatgaacaagttcgtggaagtagcgacttcgatgacttgactgacacctgcagcagtgggtcactcagcaacgtgcaagatgaagatggggacgaatgtggcagtttgacggatttcagtgctcctgcccttgcagtgaagtactcatttagtaatttctcatataagaatttatctcagttggctttcatcaattatgatctggttgtaaagaacgcctaggaa

SEQ ID NO: 253128 - DNA, 373 bp, Gossypium hirsutum
ataaactataagaacctgccagaaaaagggaaaaagaagaattagtaaaagaaattagaataaaatttaaattgaagtaaaagtaaatggctaaagtattaaaaatggagtgttcctaatatcttagttccccggaaacggcgccaaaaacttgatacgtgatcttagtgataggttttaaatattaataatgaatcgctcttgaaactaactattatcacgatgaaggtatgtgtacctaatgagcagtagtttatgtttagcatgaccggattgtcgaacctaaaggacctaatagttctaggtattgactgttcttttctttatctagtcctaagaagatatggggtttgtttttaactaactaattaac

SEQ ID NO: 253129 - DNA, 282 bp, Gossypium hirsutum
attgacaatgcccttgctttgtcttcagactagcatgggattctgacaagtaagaaattaggatccacaggagacgatgctctgaagcaccatttttgagccttcctatgagccaggagtggcccaggtgtctgagatctgatctatgcccaatcctttcacgactgtactgattggatggcatatgtcatacccttgtgctttaaaagttcattagagttttttctaaagtaaatggtccagatatttttctttttaggttaggcagtggtgcatttttgt

SEQ ID NO: 253130 - DNA, 243 bp, Gossypium hirsutum
cgcacgcgtcagctgactcgaggaagaaccgttcgaagcgcgtcctcttcatcgttgcaaactgacgtattgttaagaataggaagcatccttgctgtatggggaaactccggatgcattcaccaccacaggatcctctatgacagatattgccctaaagtatttcggtaccctactgtatgaggttcttccacaagctccgtatcatgttttactgccgaattgacaacatcgtcacgcttt

SEQ ID NO: 253131 - DNA, 135 bp, Gossypium hirsutum
tgcagcctttcttaaccttgggaaagtaacatttggaaagtcaatcctataaatgctcaacatatacatatatatatatatcatcaccatgatcgtcatcggcatcgacatcatatatattggggatctaacaga

SEQ ID NO: 253132 - DNA, 388 bp, Gossypium hirsutum
atagacaatgcccttgctttgtcttcagactagcatgggattctgacaagtaagaaattaggatccacaggagacgatgctctgaagcaccatttctgagccttcctatgagccaggagtggcccaggtgtctgagatctgtcctctgcccaatccttccccgactgtacagattggatggcatatgacgtccccttgtgctttcaaagtccattagtttttgttctaagtaaaatgtccagaaatttctctcctagggtaggcagtggtgcacattgtcaggggcaagacacttttgggcaaagtctgtgtggggcccacagcaggttcctcccaacccttgccatttgtttaaaaagttcaaccactggggtttgaaaatcttacc

SEQ ID NO: 253133 - DNA, 264 bp, Gossypium hirsutum
atagacaatgcccttgctttgacttcagactagcatggggttctgacaagtaagaaattaggatccacaggagacgatgctctgaagcaccatttttgagccttcctatgagtcaggagtggcccaggtgtctgagaactgtcctctgtccaatcctttcctgactgtacagaatggatggtatatgacgtacccttgtgcttataaagtccattaatttttgttctaaggaaaatgttcagaaatatctctcctatggttggc

SEQ ID NO: 253134 - DNA, 324 bp, Gossypium hirsutum
caaagaaccatgcatcggacaggacatcaaattcatcaactccctgtgatatagctgaaaggtccaatttcaacatttgcgagacagaatgggaaaattgtggtgagactctttctcctatgtgtcattcggcaacttctttcttcagtgaaagtatcagtgcaagtggcagtggcagttcatttggatgaacaaccacctgctgaaacctttactgagccttcatacaaaatcagaatcatcggattcatgttttgaccccctgggtggaaaaagaggctcctcatttgttcagacggtagatgccctgatattttgcttgct

SEQ ID NO: 253135 - DNA, 299 bp, Gossypium hirsutum
atgtaaagattcaaagtttgtctttattactgtatgtaaattagacattaatccactaaactggtcttcttcaagagagctaagtatacactgtctggtgaaacttggattctttcctgtaaaagtgggaccaagcaatgatgatcttctgtggtgcttaaggaaacttactagagctccactaacagtctcataaggaggcagccatcataaccattgaatagcatgcaagggtaagaatgagtttttaactgctttgtaagaaaatggaaaaggtcaataaagatatatttctttag

SEQ ID NO: 253136 - DNA, 191 bp, Gossypium hirsutum
cggacgcgtgggcccaaatgggaaccagtggctcgtagtagtgtgagtagcaggtctcacagtacatccaaagccagggctgggttgtaaatccgagcctacccttgtattgagagcgctaggcttacatgaggagggccatccgaactgtgatatttattgccagcttaggcctgaaagccaagtgggca

SEQ ID NO: 253137 - DNA, 112 bp, Gossypium hirsutum
tttcgttctctcatgatccttatagtagcgggttcaatttaaccatcataacgctcatatcgatacgcattatcttatcaagccatggctctggtctaaagaggatccaagc

SEQ ID NO: 253138 - DNA, 349 bp, Gossypium hirsutum
cccacgcgtccgctttttcttcagccgcacctctattttctccctcaaaaaagcaccagcccaccgcaaggtgcggtgaccgacgccccaagcttcgaagtatggcctattttggcctcagatcccccttctatctccgattacaacgaagtgataggggaccgacggcctagaagcgaggtacggaggaggacgtggaggcacgaggggcgctggggcgtacgagggtcgtgcgtgggagcttacggatgctggaggctgcggcgccaaggtggaaaccctagggtttctatggatagtctgatcttgggccatttggacccaatttaatttatttggatattgggtt

SEQ ID NO: 253139 - DNA, 309 bp, Gossypium hirsutum
aaaaattaaggattttgtgtatctaaactaattactaaactaagaatgcacagaaagaaaattgggaaaaacttttgggaaaactgattgattaagacaatacccaaggaaaaatccacctagacttcacttgttattcgactctaaatcagacgatttatgcatttgacttgatccgtagaaatccctaattaatatgattatctgtctcgagactaacaacgtttaaccctaggttgattaatggaaatctctctctaataaacttcctagggctgcttaatctcaatctatggattttcttattag

SEQ ID NO: 253140 - DNA, 345 bp, Gossypium hirsutum
atgggtgacagagcgagaccctgtctcaaaaaataataaaattaaaaatatctactttgttactgacagaaccagactagagaatatgatgcaggtttactggcttggtggtctttctagtgctccctgccctgcatccacgccatggaagaacccgacagggggaactgggaacctggcaaccagacacactcacccagggccaaggccactgccgccctctgataggggcagacagaacagaaagagagggcccatctgtgatgcttgcaggagagtattgtttgagttgagaaatgggttgtgtatggccattactttgtcattcaggcctttacttcaact

SEQ ID NO: 253141 - DNA, 295 bp, Gossypium hirsutum
tcggtcattgggataaagactttcttattgttgtgacgtgagctgcttgtctagacatcaagttttatcttatcgagatgccatttcctattttgtctgaaatgcgagacatactacatattattatatacatatatcaattttttttaaaaaaattaaatttgaaaaaatatttgacctaatgagatatattaatacataccaatttcaatatgtattattactaataaaaaaatcaatacatccataaaaagggtgatgactaccttactataaaataaatgtgataatgatt

SEQ ID NO: 253142 - DNA, 365 bp, Gossypium hirsutum
cccacgcgtccgccccccttcttcaatccggttctctttcgtagtcgatattcctctgattttcggcatacgtgggaacgctttcaaccggtgctatttgggtcgcttttctacaagtgagtgcttcggctgggaaggcggaaagaactctgtagtgaatctctgtgcatgttaggaggacaaaaccttcgctatttctgactactatcccgaaagccgattgtcagatgcgctcattatatgctccgtcaaagtttatttttactatttgaccaggtgggtgtttccatttagtattctcctttgaaactatggaagtagtgctctccaaaccatccacttcttttaagtatctatgtacaaag

SEQ ID NO: 253143 - DNA, 393 bp, Gossypium hirsutum
cgagatgccgcttgacggccctcccgccgagcccaagaagaagaagcggatgaccaaattgaagcgccctatcttgtcacccaactcagacggcgatcgtcaagggtctttaaacatcaagccgcaggtccagacaggatatggtacctgtgcggggtaccgtccaatttttagacgaagtgtgaacccaggatgtggtaactgtgtgtggtgccgtccatttttaagacgaagtgagaacctctttgatgtgagtccaggacccaggttatcagattggtccattccgatgcccctgggtgaatttccggtgctgaagttggctcaacatgacaatagtgatcaatcaatcgcttacagtcatgctggaacgtctgaaccacctcccaaaga

SEQ ID NO: 253144 - DNA, 358 bp, Gossypium hirsutum
gatcaaaatagaaaaaaaaaaaaacctaatgctctcaatcttccccaattcggccaaccccaaaacaaccacttattagctctttcggtctaaaaaaaatcaaaagaaaacacttccccgaccccgcttggcttaaacttcgacggtggagacgaggctccaacgacgcgctcgcagccggtcaagggatcaagttgctattggttttctgaaggaacaagtatggggaattctgtgcctgattgggaatatataccagaactctgtcttcttactgtttttgagaaaatagatgaaaccatcagtcgggttcaatttggtgctgttagcaaatattggcattcgctgttcaatactt

SEQ ID NO: 253145 - DNA, 375 bp, Gossypium hirsutum
atgtccgacatcctgcacaaggtgcgtatccagaagatggtggtgtaggcaccaccactcgacgcctgggacacaccacggtgctgcccgacgacatgaacaacaatgcgggaacgccggttaccgctggggactaatggagccagcccatccacctgggccccgtattgtccggggccggagggagtcccggtcctgtgggcacggggcccagctccctggtggccgcagcagcctcagtggcagcagttgctggtggagacctgggctggatggcagataccgttgccatcatcacagacgcctccttcctgtctggcctgagcgcctccctccttggagcggcgttcagacagcccactggaccctgctggg

SEQ ID NO: 253146 - DNA, 380 bp, Gossypium hirsutum
atgcagatgccagcaaccatcagacaacgtggagtccctcacgggtgaaggctgcgggggccgtgccaaggctgtgcacacgcagtccgtacgccacccttgggctccactggcagagagccccttccttctggacgccaactgcacctccggatacagcgttgatgtccattttccaggagggaggcggcctcgggtccagggagtggaggggctgcccctgccacgcaggtcctggccgatggtccctcaccctgccgccctgggcttttggcctgaagcaaattcctgagtgggagtgccagggcctgccacatcctgtcctgtccactgcctgcccccttgtgctggctccacagttctgctacggtgggagctgc

SEQ ID NO: 253147 - DNA, 387 bp, Gossypium hirsutum
acaagagggaacgaaaaagcacgttggtaccccgccgcaatttccgggataccccatacccttctgctgaatcttaacaggagagtaggtgtaaggtatggctgccatgtagtggaaactgttaatgaactaaagaaacacatgagatgggctgatccttgtccttaaccaccagaggtggaccatactgtcagacaaaaatggaggacatttgtgcgtgaacgggaacaggatgatgggatcagcaccataaggtcaacactgcctgggtcaatggttaatggtgattatgtaataaaaggaaataaccatggtttcgagacagatgaagaagaggatggtcagaatggaggtttttaagcaagtttggatagtaatttcctgaat

SEQ ID NO: 253148 - DNA, 341 bp, Gossypium hirsutum
gcctattgtgttataccatgaatagatatgtgaaatgtggccataccacttggaaatggtttaggtcataatggacatgagttataaaatgtgtcaaatacaaaaaatatgtgattgttgaaatggtaaccctaacacaaagagggtaatattatcataggataaaatgagacatgtaataacatgtatgaccttggccaagaaagttttaagggcacacttatgtcatgttagttgtttaaggagcatgtgaatgtgaatggatgcttaagggtgaccaaaggcttggaaaaatagcctttaaaatggtccacacgggtagatgcacgggcatgttttta

SEQ ID NO: 253149 - DNA, 376 bp, Gossypium hirsutum
atgaaacagcaaaaaagcacttcgttgctgggtttggacaatgaatgtgggattagtcccaagtttctagcttggaacagtagcctctttgcctgcgtgatccttgtcagctattcacagaaggaaatctgaaactccgtctttcatttcagccatggaggctgttatccttctctgtcaattagcattcatgtggttttcgctctttctagctctgtcactcttgttttcaattaaatattgccccactctgtgtgtttattgccttgccatttctctagcatatcaggtttaattacgggctcagtaataatgaggaactagcttctctcaggcaactaattacttttgtcttttttggtcggattgtgccaaa

SEQ ID NO: 253150 - DNA, 269 bp, Gossypium hirsutum
cccacgcgtccgaaacaagttttctgttgttattgtctttttgttttttggttcatagagcttgaagtagagagctagctggtggggtgatccattgtgtgaaaggagaagaatggaaaggcaaccctctccgagtcttgaaagggcatcatcgtttgagatggatgaacctctcactttaaccaagaagcaataccaagctgtattggctgcggtgatcaaagcctccgccaaagaaaaaggaaaagctgccgttctacctgatggtg

SEQ ID NO: 253151 - DNA, 279 bp, Gossypium hirsutum
ctgtattatatatatcatttggtacgttcaattgctcaatacctatttacaacgtattatatagaacttactagtctaataataaaaaaattaaacttatctactatcatgcaaaatttatagtaaatacaatcaacccatatgcatgctcctaaccaatcatttgtatttctaaaagctcaagcccataattgtcaaaaaaataaaataaaattaaataattaaaaataataataaaaataaatataatataaaaaaaataattaaaaaaattaatgg

SEQ ID NO: 253152 - DNA, 391 bp, Gossypium hirsutum
atcccgcactgtgtcattatgccaagagaggtttgggcattctaaagaagtatgaggaatacttgatcaataacatagcatagttctttatttgtgaatcacttctctcctagactatgagttactttagaacagagatttatttttccctgtatccctagggtttggcacatggtcggtgcttagtaaacttattttgtattcaataatgccaagtagaataattcataaattatggaaaaataaaagaatttggcaaaattgcaagctcgaagatcgctttcaggaaaaatgtttcaacccctgctcaaaagtacatagcttgctgtgttgttgaagtgccagcatgaggaggatcatgccaacacatccatttattgcccattctggg

SEQ ID NO: 253153 - DNA, 241 bp, Gossypium hirsutum
gaaagttgtttcataaactatgaaaagatgacaccttaaaaggcagtttttaaaaatatttggtcaactaatggggcacccactaaccaagatttttcaacttttcagttgctttaaaatgccggatgactatctaatgttctacatttacttcttcaccaactttactcatgatcctttgagaggatcagaatttactggttgtggcttaactgtgtcgatatcacactttcaaatggtc

SEQ ID NO: 253154 - DNA, 246 bp, Gossypium hirsutum
aaaagagatagggattgccttctgcgaatgtctagtaagcatttatccttctctaacccctcggaaaagaaggagaatagctttatcccgtcccccatatgcccttcgttctcctgaagtatggaagtctgttttccctttcaagtcccttcaatgctgtcgcattgatgtccctttcgctactttcctatcggttttattcatgcctttccttatgttccgatggttttatgattctccttgttc

SEQ ID NO: 253155 - DNA, 175 bp, Gossypium hirsutum
atacaccacccgctgccgtcaattcgtacgggcagaccggggacagcagctgcaagacacccgaggtctaacttcctgccggaggaggccactgaggaggctggggcccgaggtggcgcaaaggaggaggtggaaaaaaactccttagtaaaaaactagtaaattggaaaggcta

SEQ ID NO: 253156 - DNA, 359 bp, Gossypium hirsutum
agaaggtggaccgagcacacgcctaaggaaaagaacccgaaagccactgaaacagccggaaacaaaaccaaaagagaagaagcaagccggtaagaagaaagtgaagaatgctttgaattcgaaaaccttatctggtcaaaactctgcaaaagtaagagacgaagaagtggaatatcagtgtgacatggaaggctgaacgaagagttacggctcgaaacaagctctaatcctacacaaaaggaacatttgtccagtcaaagggtgcgggaagaagctctactcccaaaaaaaactggttcagcatcgtcgagtacattaagatgaccgaccttttaaatgcccatggaagggctgtaaga

SEQ ID NO: 253157 - DNA, 350 bp, Gossypium hirsutum
gctttggttgagttttagggccaattctgtattgcttttcaaaagcacttcttgctccaaaagcacttctagaagaaaagctgtgcagaacaagctgcttttagctgaaatttttagcttttcagaagtgcttttgaaaagcacttctgaaaaggaaaagctaaaatttttaacttttccttacccaaaagcgcttttaggctgggttcatcctttgttatttacttttaatttgtgtttgaatcaaaatagttggcataattctgtggggattattttttattattttaatatcagtattaggatgtttcgatgtaagaaattaaattcatcaatattttttaaatatt

SEQ ID NO: 253158 - DNA, 364 bp, Gossypium hirsutum
tatgctttcttgatggttgaccgagcacacgcttaagggaacaaggcccgggcagagggccgcggccctgccaccccactgcacctggacctgacccagctgaacaggctgagcctggagaacagcccagacgcccttgaccacgctttggaaacttcacacttacccttttatgccgacccttacacgctccccgccaccttctaccgcagggtcaccgatgtccggggcctggaggagttcctcagtgctatgcagagctcacctggacctgtgcccttgagcccactcccattggtacctgtgtctgtgcctgcctttgaccccggctccagctccttcggcccattgggcccctacttgt

SEQ ID NO: 253159 - DNA, 332 bp, Gossypium hirsutum
gaaatccctaaattatgttaatatctctttcgagagtaagaacaacttactctagggtgattaattggaatatctttctaattaaaacccctatcgtcgcattaactcgatctctggattcccctattagatttgactctaatccagtagatttatgtcatcctatttttgcatgaaactccgcttaattatgctagatctactcttaaataggaacttttgcttcactgaaataagtacattaaacttgaattaatatctcaaaaatattaaaacaagaaataagcatacataattgagaacaggaatcaagtatttatcgcgtaaatcag

SEQ ID NO: 253160 - DNA, 397 bp, Gossypium hirsutum
atgagaaattatctccatggttaatagtggtagagatgaacaagcacccactccagatgaccactgcagcctgtgagtattggctgtgtggccagaagaaagacaaatgaaatccgaatgggtattttgaaactaatcaacataatagacataaatcaggtgtttgaatccctttcgtcttgagggtatacattcttcaggtcaacccacactactcccttctggttgtgtaagtaatggagcaaatgcagagtaaaacaaatctggaaaaacagtggctaaggagctagtatcactttctagtttatcacatgaggattctcttatgtttcaggtggccattaaacgcgaaaatcttgtggctgaaattcagaagcgactgtctgagtcttgatcc

SEQ ID NO: 253161 - DNA, 189 bp, Gossypium hirsutum
ttccccttccttccaacgtattagttttttattagggcaacctaaatcaaatcaattgcccgtggttttacaccttgtgacctggaaaaaccttgccgttcccaaactaattggctttgaacacaatccccttttggccagttggcttattaccaaaaaggccggaaccattcgcctttccaaacattt

SEQ ID NO: 253162 - DNA, 363 bp, Gossypium hirsutum
gcatggatcgaataaatgcattcgcacatggctgacttttaataaaatggttcactggtgaacgaacagctaactctagtgagcacttgcagaaagccagtttacaattcaaagctccatgaagggattaactggaactctggactgccttatgagctgtgactgtcatatattcgacttacggcacgctagtgtctgatgaacctccactaaatcatgctagatctactcttaaataggtactgctgcttcactgaaataagcacatgaaacttgaatgaatatctcagaaatattaaaacaagaaataagcatacataattgtgaacaggaatcaagtattcatcgcgtaaatgagaaatc

SEQ ID NO: 253163 - DNA, 271 bp, Gossypium hirsutum
atgcaaccgtccatgctcgcgagtgctaactcggacaataacatactggtacctcaagtggagcgcatatctctgcattttaactacaggcatgggagtatgcaatatgcccactttattagatctgttcggacttacaatggtggaagggagaacaatgcgaaaagttcctgttctttgctttgacacagaagcttatcttgcatgaatgtgcggaaaagttttcatagctgctagctcaatagatcagtgttagtaatagactgaggat

SEQ ID NO: 253164 - DNA, 404 bp, Gossypium hirsutum
  unsure (1)..(404): unsure at all n locations
atgtagcctccttgggctactcccacaccggcccggcttccttcggagagtccagccctccatctgagaagcccgggtaatcagctctgcagagcctgcaaggtttagatgcaaaatgcgtctgcaaggttttcaaaacatttctttctggattgtaaatcaagtactttaagaatggtaaaccggctggggtgcggagttaatgtatgtcttgaaaaaacaccatcgtgatttgccttttaaatttgagaaaagaattccacttcgcttagtttcattagagatattgagatttccagggggaagtgctaagaggaggctgtggtaggtgttagctccttccttggaagggcggngaatggtgaatggcttagggctcaactttcatctatttggctgaaggg

SEQ ID NO: 253165 - DNA, 390 bp, Gossypium hirsutum
ctccctttttctcatcgtcctgaaactacagatttcagcttgcaaaataaaattaaaagttcagaaaatggttggattgggatccatttccacaccaatgtgcaccacttcaccattaccttctaaacccaatcccagaaataattttccaggaaaactttcacacccacttcttggatttcacaaagttcattctttgtctctgtcaactcatttctcccctcagaagaacaaattaactcaaacccatttcactttgaaagcttcttcagtaggaactgcagattacactgaggaacccgcaaccaaagtgaaatttcggacatccttaagtgtgcctgattgctcaacctcattgtctttgcttggaacagggtacagggagaaagt

SEQ ID NO: 253166 - DNA, 287 bp, Gossypium hirsutum
agaacagcaagccgggcccgttccggtcctccattcctgtgctggcgctgttaacacacccgcgatgtagagactcgcctgaccctcaagtgcccatgctcttaatctccgcggtggtgattgtcccccgcatcacctgggtcgatgctccaacgacctacagactgacgtacaatgctcgggcttctaccaccatactgcggtacacagacgccatcgcgttttgaagtgacactcacatggtcaaatctgacaagtacatgcacataataaactctgaccaggaa

SEQ ID NO: 253167 - DNA, 405 bp, Gossypium hirsutum
atccagcaacctcacacagttttgaagacaatttcatttaaaatctttaatgtaagagatgatgatgaagggagggaggaaattggtattttgatcctcctcggatagcacaaaagtggcctagggaatgaattcaggaaagttacaaaatgcagttgtcaggatgttggatatgcttcaggatcaagtacacgctcagtcaattacgtgtccctccatgcagtatccctggggccaatattggatttatccaaccctgctgcttgtccgattcctaaatgatttaagggtttaaaattaactatgactgtaaaaaatctcaagggaactgtggctccccagtctgtcatgaaaaatattctcgggaaaagaaagttgaaaaggagattatattgtcgctgtgtt

SEQ ID NO: 253168 - DNA, 307 bp, Gossypium hirsutum
agaaaatagctccaacacaaaaaaaggactgaaaaaatggcggatgcgagggtgagtgttagagaggttgtcgtgtgtaacgacaggtgtggttgtccttccccttgtcccggtggcgggtcttgcaggttcatttacactccccccttctttccttcattttcaccatacatgttggattgataatgagaaaatgtctgaaaagattaggaagatataaatagaataaaaatttaactctcagaacttggtatttcgtaaaattagtgttatgctttgatagcttacatatttgccttcaaatgca

SEQ ID NO: 253169 - DNA, 409 bp, Gossypium hirsutum
atggcgctgctgcgggacaacgtcactccacgtgaaaacgagctctggacctcgctgggggactcgtggacccgccccgggctggagctgcccccggaagagggacccccatacagacccgagttcttcagcggctgggagccgccggttactgacccgcagggccgcgcttgggaagacccagttgagaaacagctacagcacgagcggaggcgccggcagcaaagcgccccccaggtcgctgtcaatgggtgagtgtccgccccagggcagggcaagggggtccaggaggggtgcttcccgggggctcccggtgttgactccgccccctttttttctgtgtttttccgtcttcctggctcttttcaggtgggtgagatggtgaaggggcgggccggggccgggagag

SEQ ID NO: 253170 - DNA, 404 bp, Gossypium hirsutum
atggaagcccggcagccctttgcaaaggcaccccttgtcttaaaatcactatgtgggaaagctgtagatacttttatatatttgtattggactctgaggaggtgaaacctgtatatattttgcattcgtgctgactttgttatcccaggagatccatgcgatgatcccttgctgtcttccgtgtaaagattgcacagttgtacttgaatctggcatgtgttgacgaaactggtaccccagcagatcaaaggtggaaaatatgtcagcagtggggctaaaaccaagcagttagaagccctatagctgcctttggccaggaagcaaggatggcatgggcacccgccggctccctgggtccctggtattcgctgtgcatgcgtttgccctctgccctggctgtgtga

SEQ ID NO: 253171 - DNA, 408 bp, Gossypium hirsutum
atgaacaactcaaccttctctgcacagtgggtgagtctccccattgggaacatcttaatattctcctatcgattctttgttttgatggagacctctttgctatgcaataaatatatttattttaaaggcaataataacttttgtttaaggtgaccttataaggtcatattttgactttccactcagatcacagctgtggaacttgggatcagaaaaggggagtgatttctgtaaaggctcgttaggttagcaagacaatctacccacttcaagagtactctcctgtcaacatgtattggaaatttttaatttagagggcattacattggcaattttgatgatcaaaaggtaagtttttctttattccacggatgtataatccatcagaaaacatatacttgactaaaa

SEQ ID NO: 253172 - DNA, 410 bp, Gossypium hirsutum
atgggaataccaaaccgtaacaggaatgtgtgatttgttccaatgccaccagtctggaactctatactgatcctcaaggagactgagatatgtggttggtacttgggggaccagagtaaagaactgacacaatccctgtccctggtagggagctcccagcatccttgaggagcaaagacaagcataaaagaaatcatttggaagtgatataaatgaccaggcttcatgatgaccgaaagttgaaagttgggattaggttgggagaagtgccctcaggtccccctggagctcttcttgcattgcgtgaccctcagtttatcctatgcctgtttcatagctgtggaacttttgggaggagggggaaccttttgccttcaggaccactgaataccaggaccaatactgctttc

SEQ ID NO: 253173 - DNA, 411 bp, Gossypium hirsutum
atctagttcatacccttgctgaactaaagatgactggaaactgtttgaaaggttctcggccccttttgtcttttgaccctgtaagtttctcattcagtgtatgaggtctaattttcttatctggcgtggttgtttttagtagatatagttgtgtaattcaatttagtttcaccctcaccttgattttatggattatcaattatttcaggcacatttataatgaggttatagaaacaaatgagcaaacagttttaaacaaggcaatctactgttaaataatatgcttcctttatttttataggcttttgatgaattaccacattatgctttgttaaaagaactcttaattcaggtaaatatcttttagctatccaaaatatacatgatatgtcttggaataaggaactaaca

SEQ ID NO: 253174 - DNA, 388 bp, Gossypium hirsutum
cacgaatgctcttcgaaacttagtccggatacatcactagcacgaatgctcttcgagacttagcccggatacatcactagcacgaatgctcttcgggacttagcccggttatcatccaaatattcatgcacataccaataaatcatgacacatctatatttcattttcataattagagttcaaacacaagtcacatattaagcaatcccattttcggctcactagccacatacaaacagcatggtttagtttgctttatgacacaatctctatgcacatacggctacccgtcatacgtatagactaattaactcaacatataattcaagtagaatcatcatatcaccgtatatttgttatgctcatacgtcatgacttaatcaaatcg

SEQ ID NO: 253175 - DNA, 388 bp, Gossypium hirsutum
aatttggatattttatttggccaccacattctttttttgcggtacatgttgacatttctgtcatcacaatctttccactgtcattttcttgttcttgtcgctattggccactgccaaaccgccactaaccacaactgttagccgccgctattagcctctattgtcaacccttgccatcgaatgtcataatcagaccacaaaaaacatattttcaatttggctaggtcgagtttgtgttgtcttagtctaccttgatgtgtctcggttcttctggttccattgaaaatataggttacaaaaatcctatgtccatttttgattgacatattttattcttaaaataataaaaccctaggtagagatgatagtccaaaatctaagttatata

SEQ ID NO: 253176 - DNA, 405 bp, Gossypium hirsutum
  unsure (1)..(405): unsure at all n locations
atgagcaatccaccgtgccccagcacctgcatcatacacctgcatcatacctgctctaaagcacttaccaagttgtattgcaatggtttgtctacacagttagttttccctagaacgacttattcaaggccaggggctatgtcttactcatttttttaatgtccccagggattagctagttcttgggaaacaactgggactcaaaatagtttgccaagtgaatgattgagaggtccaatcaagctactacttcccttcagtgctgcacagtgcagcaaataaccagctcagatatgggttcaaagaccacaggtttctccttggacagctcagctctcctcataactccatagtatggagtggttgcatctggaagagggggnagagttccaaatactaagtaat

SEQ ID NO: 253177 - DNA, 413 bp, Gossypium hirsutum
atgcctccctgaacagggaggcgagcaggcaggaaaggaagccaccctgaacaggggagaaaacttaacctctcttctcctctccaaacctttcaccttgagtgggcaatgtttggtgggggctgttccttcttggagatgccttgagtcagaccattttgagatcatggaggaaggatgaagaagtgaaaatgacaataatgactctcaagaggctggtgatgtgacatggcaaatgtagaactgacttaaattgaacaaaccctcactgagcacctctgatgttgagcacctgctgaatactgagcactgaatgggggagggggaggggagcacaggggtgagtcaacctgggacttggtctcagggacatgcctaccaatagtgggtatcgtaaggcatgtacccaaaca

SEQ ID NO: 253178 - DNA, 403 bp, Gossypium hirsutum
atctctcatagtggcttccatttaacacaggcaaagccctttaccttagcaaattctttatctttcaaaagtgaccaaaatgaggacttcaaccttggttgctcctcaatagagatgctgatcttgagttgtaatgagaaaagtggacatatagattttagtgactgcagtcagctctctggcattcctttctcagtttgcatctaaaagactacaatatgtcaagcttatctccacctgaatttgctgcctactataaaaacatttcattaatatatctcattcttcctacctccatctctggtttgtcattagtggtattctgaaaagcttaagaaaaaagaatcattgagtagaaagtgaacattttaagttattttcctttttcactggcaattagtta

SEQ ID NO: 253179 - DNA, 367 bp, Gossypium hirsutum
gttctccgccgtctaatctgaaccgagtgatccctactactactctacctgcatggccgccatcccctccaccgcctccgccgcaagtaaccgttgaagaaacgaaaacaagcagtccccagaaccagaaccagaacccagccatcaacgacggcgcgggtatctcatccggttcaccggagaccgatttatctccgccgcttttaaaagctctactcgactgtgctacactcgctgactcggaacctgaacgcgcgattaaatcactggctaaactcaaggaatcggtatcagaacacggagatccaactgaaagagtggctttttacttcactgaagctctccatagcagactctctcatcaaac

SEQ ID NO: 253180 - DNA, 140 bp, Gossypium hirsutum
cggcaataaaactccaccgtttcagaacatcctagagagccgagctttcttcgcttgttggaacatattttttaggcttacatcgactgcggggtaagaatgggtgcctttgtttgacagatcgactgcttatttctctt

SEQ ID NO: 253181 - DNA, 388 bp, Gossypium hirsutum
attggtcctatacttcatagggaatttcataccttgcaaacatattttcaaaggcattatcttagttacacagcagcccaaggcagtaagctgagcacgttcaatatcttcattttatagaggttctgttgaaaactgagaatcggcgtttaattggtaaggtcacatatctataaaccttctgtgtagcaaaagaagcaagaccttcagttaagtgccatgtcacctataggtatctgaaaagtccaacaataaaacttataattaaaaaaaccctcaaataccttatctgtaaacacacaaataaaatcatacagcaattttaaaaggagataaaatgtatttcttatcataataaaagaaattggggttgttgacacacatcatt

SEQ ID NO: 253182 - DNA, 169 bp, Gossypium hirsutum
atgggagaaaggcaccctaataagctttgccggtttaggaaaaactaggccatttgtggtgggtggttaaaggtgggaccttgaaccggacttcaaccagcaatggccttgggggccgcccttatattgggggcttttgcaggctttttttaattaaaacaattggggg

SEQ ID NO: 253183 - DNA, 202 bp, Gossypium hirsutum
atcggcctcccaaagtgctgggattacaagtttattcctactgttttagctcagttcgtatgtatgaggtcatttagtcttcaggttagcatttgagtgagactaggtttattttcaaaacctgtaagagaatggagtggggtattaagaaagaccggtcctaatgactgcaattggaaaggcccttaaggcaaaaattcca

SEQ ID NO: 253184 - DNA, 375 bp, Gossypium hirsutum
  unsure (1)..(375): unsure at all n locations
tatatgggatatggcatcgacatcgataagtgatcccatataataccacgtctgggacatggcatcgacatcagtatgagatcccatgtaaaaccatatctggaatatggcattggcatcgatatgaggtcccgtataagaccatgtctaggacatggcatcggcaccgttatgagatttcgtgaaagaccatagcagggctattggctttgatatgagattacatgtaagaccatatccgggatatggcattgtatgatatatgcatgttttccaagtatcctttagtatttcaagtggttaaatgggtaacccaatgagtatgtcaaatatgagaaagagtatgtaagtactacatatnggtacatgtatgta

SEQ ID NO: 253185 - DNA, 386 bp, Gossypium hirsutum
atggatcgcggaacgtaatggctgtcgtcccggcgtctctctcaggacaggacgtggggttcgtcttacttttctcttccccacttttgcgtaaagctgggcctcatcaggagcctgtggggactaagcggagggcgctcgctctccggtgggctgcgttcgagtcccgccgccgggcgcggcttcccaggacgcctttgcgggtttcgcggactggctcggaggcgaggggaggcggccccggggagggagcccgcccgcggtggctgctcgtaaggatcaggacagggctcagcttcgcggtctgttcctggcggtcacttttcatttattcactttaatgaactcgctttgggggcgttaaaattctccgtaagagttgggga

SEQ ID NO: 253186 - DNA, 259 bp, Gossypium hirsutum
aaaaccctccattattttccgattggaaggctcagatcgaacctagaaaccgacagtatcttctccgtcttcagcaacttcctgtcaatagcgtttttaagtgttgttggctctttttgccaatggagaaaggagtgccatctagcctttttgttaatgatggttccttcatggagaggtttaaacagcttcaacaacagaaggatgacaaagacaaggctgcggctttggaggaatctaaaccccccaaagttgtaaa

SEQ ID NO: 253187 - DNA, 346 bp, Gossypium hirsutum
atcatggagatgcttgaggctccccatcaactggcctgagctcagaccctgacgtggtgcttctcacactggaggagcacacattctagagggactccaagccctggggcagggtggggggccatgttcccagaaccttgatggggtgagaagtacagggcagaaccaagaacataaaccctccaagggatctgcttgatatcccaagttggaagggaccccagatccctgtgaagactggttgtctcccttcagtggccttgagtctctgaatttgtcggggtctcccgtgatttggggtgatttctcaccctctgtccttcccccagcacaaagcactggccct

SEQ ID NO: 253188 - DNA, 347 bp, Gossypium hirsutum
gcgactcaaaagctgctttcctcatcacttttaccagctactctgccttgcatgctgtttcaacgagcactacaaattctcttagttctaggatgccaacaaatattcagatacgcttcattaagaccatgcttgaaccttttacacatagtggcttctgaagacatgcattctcgcgcatatttaccgagcctcacaaattcatgttcatattccgtcaccgatattcagccttgctttagctctagaaattccttcctctgtggatctatgaacctttggctaatatacttatttaggaactctgcctggaagaattcctaagttatactctctgttggtaccac

SEQ ID NO: 253189 - DNA, 356 bp, Gossypium hirsutum
acaactgcacatatatagaacaggtgggtccacacatagacagcatacctggtaccggatcggaatttccgccatagcggatgctgacgctgccgaggtttcaggcagtgagaaaggacgtgcgtgagtgatgatcgtcgagcgctttaatcgggaaacaagtgcacccgtcttcaatacacctactgagttgctggacctgctcacacgtgggaggaataaaacctgaaagcagcacagacagggaaggttaccttatgcaagccacaaacacatcttgtcactcatcccggaggctactgcaccgctggagatatagcgcgaaagattcaaccttaaattgttgagccgtaccc

SEQ ID NO: 253190 - DNA, 383 bp, Gossypium hirsutum
cccacgcttccgattttatggttcatgaaaattaattcgttccacatttaaaattactacttctaataatgtatgaattttatactgacatatcttattattattgcgctcaacaattatttataaaaatcaattccctataccttaccgactgccatccacctttcttaaaaaagaaaaacttcaaacgttaggaaaacctatttaaatagttcaatattaatttttttcataaaataattaattattatattattttaaattgaaatatgaaatgtaaaatatttttttataaattagttaaataattaaaattatatttttttcacatgtataaatatttttataaaatttacaaattttatattcaattaatttataat

SEQ ID NO: 253191 - DNA, 381 bp, Gossypium hirsutum
cggacgcgtgggttttccttcctcgaacaacgccaggaacaacgctgacagcagcgaagacgacgacgacgattctcctgtggcgcgtgatgaaacgcgccgacttggagcggcattagaggaggagagggcgttatctgcgagagaagcggcggcggcacaggaagcggcgacggtggcagagaccaatgctaggccaattggttccaccgaggagccggtgaggatgtcattgatggactttttggaagaaacagagcgacaaatgggcctgacggtatcgaaatgcacgacgggcgacgccgacgccgatgacgaagaaaacgaggagaaagacaaggcggaagggagcggcgggatggagcagacgtgttgcgtgtg

SEQ ID NO: 253192 - DNA, 220 bp, Gossypium hirsutum
aaaaaataggtgagagaaagggttagtttttttgaagatggcctgggaccggtcaagggatccgatcattcctttggcgcggctccgctctgccggccacggtacactgagggccaaaattcgggtaaggtacacggtggtggatgtgacaaaggctgagcatcccaattaatggtggtcacagggatcgaacttctgggcaccacagatattttaatga

SEQ ID NO: 253193 - DNA, 370 bp, Gossypium hirsutum
gagaaattaaccttatgctcagacctgcttcttcttgtcatatgtggtgtctttagaggtggcaaaaggcatgctcaggatctctgcttgacaaatggaatcctaatcaactaaagtgggcagggagagtggaatcttcaacagccttttgttcaataacatccaatggtgagtggttggtttgcatattgcaccttcatttttccatacaggaattgcgtgctctgctagtcataatcacactagtagtttaccagttgattggggctcccacttggccatgactttgatatgcacttgcaaaattttatcataagcttcaacataatacacgcatgtgcttatcatgagatgatttgtatgagtgctt

SEQ ID NO: 253194 - DNA, 164 bp, Gossypium hirsutum
atgcacgctgagccactctcttccctttccccagcatcactccccaaggaagagccaagattttccacccataatcctttctgctgacccctaggttccctctgctcagccaagcttgtatcagctctcagggccatggttaaataaaagatagtaagtagaac

SEQ ID NO: 253195 - DNA, 379 bp, Gossypium hirsutum
cccacgcgttcgcccacgcgtccgcccacgcgttcgcccacgcgttcgtgataatataattttaaataaaatagaataaactttttctctattaagtgatatataagtatttatacttatcatttttataattttttttggaaaattttctatcgagtgaatgctattattaattatcaaatatgtttaaaaatttaagggtaaactacaaaaatagtcacttttgtttgtctcagattacattttagtcactcatgtttgaaatgttacgttttagtcacttacgttatcattttgttatgaagtggccattcttccgttaaactccgttacctccctaacggcagtcctacgtggcagcccaaatgagtttcaaatg

SEQ ID NO: 253196 - DNA, 366 bp, Gossypium hirsutum
cctaaaattcattcaagtagttagtgtgctgcattgtaaaacgtaatataaacagactaacctatatacaaaaattcaaatattattgattattcggataataattcgtctactcaaatagatcaataacttaatcggatccaagcacaacaatcttgatgcatagaagattgatacaaatgcacgtataacaccaatacaattatgtgcacacgtcatacagtacagatgcagatgaaatttcctattgcatctgctacacgccatcttcattcaccttacccaccaacaggtatataatacacatccatccctacacatttcatagtgtcgatatgacacgttgcagtgtttacagtctcacta

SEQ ID NO: 253197 - DNA, 370 bp, Gossypium hirsutum
ggtatttcaataattttgtaaatcgagggtaaaacgataattctgtaaatcgggggtactttggtaattttacaagttgagggtattttggtaatttcacaaattaggggtattttggtaattttacaaaccaagggtattttggtaattttacaaactaggggtattttggtaattttgtaaaccaagggtatttcagtaattctagcctacagatatgagattcacatagtccaacccaatatttactacacaatcaaagaacttatccaattgggcccgtaggcccattgggcccatatagccccttttggcccatcgcggcctgaagtagccctcctacagctagagtagtgagaaatacacacct

SEQ ID NO: 253198 - DNA, 251 bp, Gossypium hirsutum
aaataaatcaatatagtcattatttctaatgttaaatgaatacactctaccctaaactcatataaccacaaacgggaataccttatattattcttatttaaaactacctataggtcctgcccaactcataaataagagaattatgcacttcaacccactcaaactcatgtgcttttgcattagcatcaatgcacatgcccatacagctaagacttaatcaagcacaaaacttatattaggatcatcctaaa

SEQ ID NO: 253199 - DNA, 128 bp, Gossypium hirsutum
atccagagctatggacgacgcaatcgctagggggaacacgcgggaactcaaagactaataccctaaagtggagctggacaacaccgttgcttccatggtcaacgccctcctgcgcgtggagatcgacc

SEQ ID NO: 253200 - DNA, 398 bp, Gossypium hirsutum
  unsure (1)..(398): unsure at all n locations
atccggaacagcctcacatacctcactgtctcgtctgttcatgtgacattaagtagaaatattggttttttaaaaataagtcacagtcctgttgtcaaaactctaatagacagcaaagagggtctgtaccgtagacttcacagttttcagtttttaatgattgtcagtggaggggcttctccagcacagagaccccacccctcccccgtgtccagagacccccctctgccaggtggaggtgtgtccaggggctggggaagccgagatgggcgcttcctctgccggccggcagcgtggtccccagcatgggtcaggggtctgtctctggctatgccccttncgcggcactctgcgccgtgtgacatgggttttgaatcacactgcagctgcttttcatt

SEQ ID NO: 253201 - DNA, 373 bp, Gossypium hirsutum
gtttctcctgacaaggtacaggcggtgttgttacttctaggtggatatgaaatcccttcaggcattcctgcaatggggacagtgtctgttactcaaacgggcttaagtgactttcctgggaggtcaattcagccacagagagctgcttctttaaaccggttctgggagaagagaaaagagcggtgctttgagaagaaaatccgctatactgtgcggaaagaagtggccctcaggatgcaacgtaagaagggtcaattcacatcatccaaggcaatttctgaagaagtagcctcagcctcttcaggatggagtggaacaccaggttctgggcaagatgagaatattcaagaagttttatgtacacactgtggaa

SEQ ID NO: 253202 - DNA, 387 bp, Gossypium hirsutum
atggctccttagattgggtcattactaaaagtacattaaaacactcttgtttaaaaatgaattatttccgtaatcgaagtgtattgatgtattctaaagctagtaaacttccctaatgtttaattgccctacagatgcttcttttgctgtgggttttctcctgttagtggtctgaaataatgattttcctgttctattaatatatagtgtattttgcacaaaaaattaacctggtcagtagtgattaccaaaatatgtattaataatcttggcaatttttgacattttagcccacgttagttctacattattcttaaaagaaactcagctactgcaaattttgtctttctgtaaatgttattaaaatatccagtgagctcttttaga

SEQ ID NO: 253203 - DNA, 378 bp, Gossypium hirsutum
tcggatgaagtggacatggttgagttttcagggccttagtagtgtcactctcacaaagttggagaactcttagaacgacatgaacttaagatctcccaagcgattcgtaagtcatggttttaaagaggcaaaaaacatgggaaataggcttatgctactctgatgtctaatggcgcggtacgaagaaatttgtgcctctactccaactgcatcagcgctaagttgaccaccatgtctataaaagcatgccattaacaacctggaactgatccttgagctccacagcggcgaagaacgaaactcagaaactgcaatatgatggtactgtggcgtgtatgattttgtagagcctctaatgggagagggaccttaggtgac

SEQ ID NO: 253204 - DNA, 373 bp, Gossypium hirsutum
aggagatccacttatccaaaagaaaacaacacgtgaataagaatatgttttccaaaatattatgttttactattttaagctaactaacagtgagtaactgcgaaccagacttcacataagtatgtcgaacccagttcgtagttttgtgaccttgtcaaagctctagtttaacttatgtttttggtgttctatgtggtatttctttcttgtatatttactgtgtaacagcccaattttggtgaaatcgaaatagtagtcttgagaccacaaatctgagctgaaaaataaaatttatttttattttaatatatggtccatattatgatatacatgttacgtgaaaattttcagaagaaaattttatcgattatgt

SEQ ID NO: 253205 - DNA, 371 bp, Gossypium hirsutum
gaaaatcgcatcttttttcataaaaatcatccatgaatttcaatttactccattatcagctacgaagtatatgctgagcttaccttcattcacatatctaattgcatgtataggattcacaacttgtatttgatgaaaactacttgctgctggtagtattacaacataatgcctttcataatatagttagtgtatgaatattgcaaaatttgacacttcctcattgcaatttccctatgtggagcattaatactacttatccttatgagtagagtggtaaggtttcaatttcaagtcttacaattgaagaaaacaatgttactatgaacccgacaaacaacgtggaaggacaatcagtgttctttcactcc

SEQ ID NO: 253206 - DNA, 370 bp, Gossypium hirsutum
atctttaggtatgatttgtaataaaagaccatggtttggttggtgatgtaatgaatatgtgctagcttgatttatatgattgagctaacggttgttattcgaatttgaaagcatggttatatgtccattgataaataaaataaatagagttatttaatgtggttatatgaatttacaagtacaatgaatgtatatgtgattgagatttgttaaattcgatttagtgatattggtttataaatatcattgaaatgatttatttgcttatgacttattaagctttcaaagcttactctgtgtgtttttcctatgtctctagagtttcagagacttgctcggatctgggagtcgtcgggaatatcatcacact

SEQ ID NO: 253207 - DNA, 352 bp, Gossypium hirsutum
  unsure (1)..(352): unsure at all n locations
gtgagctctatatagcatagggttccattttccatatatacctaccaaataatggcgtggaataaaatcctgaatatagattggacattcatggaatgaaagctagcggcccggttgcttctcttcctcctcctcatattttcccaccattttcttctttcattttttcatcacaaactaacttgtagtttacaaacagcggcaaagctagcaattcattatcagagaggccaaaataatattttaaaagcttcagggaaaagtttaaaattttatttaaaaaggatttaaattaaatatttcataactaaaaaggattaaaagagatattataccctntagctatccctct

SEQ ID NO: 253208 - DNA, 307 bp, Gossypium hirsutum
atgtcttttaaggatctgcggatctattgtcaaggacatggtaccgaacggtggacgctgactgtttgcagagcgctcacgaagctttacatcattacccacagcaagaggtctgagcttgagtctggttctcccactggacgtgtaatctcacatactacatattccaccctgctaagtaatagtgtgtagaacggaatggttgactttatctaaaatgtgggagtaaaaaagtacatgtgaaactgtaaaggtcatcattctggtgcaggtatcatgaggaaaggagaaaaccctgggtgggagc

SEQ ID NO: 253209 - DNA, 346 bp, Gossypium hirsutum
ccatttcccatttcccctctgggatgtttctccctaaccctaagcccgtgccctcctccttttttttctcaattcgagttcacctccagcagcaatccacctccggtcctccaccgatccaagaccagacctccacggctccacccatttccagaatcagaggttaggtactctgtttttgatcgccgactcagcatccaacaaaaatcccgatctcaagtgtggggttgtttaattttgtaatgacatgtacctaggatgtctttgattgttagttgttttgtgaatgtgatgtaatttgagttataagtatatatttgtgtttgaagctaaatgttagtatgtg

SEQ ID NO: 253210 - DNA, 259 bp, Gossypium hirsutum
gtataagcaaagccatcataaggtgtgggggaggcaatgcaaccctgagtaaaaaggattatgatttcacaccatttcgcttgttaatgcttgcattatcccctagatgtgcaaaatgactaatttaaagatattttcacatgtgatttggcttgttattcaccttgcacaatttttaatgtaatggaacagttatacaaatactactgtgcaaccctgttatagacatggaatgcgactctacataattgcacttaat

SEQ ID NO: 253211 - DNA, 295 bp, Gossypium hirsutum
tcctacgcgtccagcttgatctcacttacgtaggggtccattttccatatagtccatccatcatctctcaagatcataactttaaaactttaaatatctatcacggccaacaaccccactgcgcaataccattacaaggttgttgatctaacaaatcataacatttcatctttactcgggcatgctcatatgatgttaatacctaaggaaatgttaaccaccaaaatcaaaagcctcttactcaactaaacacgacccacatacgctctatgcagcatgttcatctacctacatt

SEQ ID NO: 253212 - DNA, 214 bp, Gossypium hirsutum
atgctctctacacttgtctgcccactaaaccatcgtgctgaggcttgaagagacactatgcacccaaaacacactattctacatcatgcacatcataactagggacaagaaactaagcatatcatcgctcatcgacaaaagcataaagactctatatagaatgatactgccatagaactacatgccaaattctcaacaccttatgatacttcac

SEQ ID NO: 253213 - DNA, 338 bp, Gossypium hirsutum
atggaaacaaatcttaagttggtcgtttaagacttcagtgtgcttaaatagagcaggtggattataagcaatatttttataatttgttttttgttttcttccttctgtttatgactaaataatacttttaaaaatgatgatctcttgtttggagtttttaaaaaaaattgtatgacaatggattgctcatttataatgtgtgtgttgtccttggaaaacaagatgacagttatacatttttaagaaaattaaaataaaggagaagagaaaccaggatgaccataaaataaactattgtttataaaatatctaatgcattatttttaaaatctttcaac

SEQ ID NO: 253214 - DNA, 346 bp, Gossypium hirsutum
cggacgcgtgggcggacgcgtggggggaaatagaatcatttggaaatggatgtaggtttccaaaaataaaaatggaaatttccaatcctatatagattgcttaaaaatgatcagaagaatgagtttatgtttttggactatttcgaagcccaaaaatgaaaataaatattgaacatattttgtcgaaattttaccaggggcaaaatcatcaaaattttatcgatggtaaaatcgtcaaaattttgttagggtaaagtagaaatgagaaaattgttttatatataaatattaaagtttattttggaaaataaaaaaattggatcgagttgaatctcgttatagagta

SEQ ID NO: 253215 - DNA, 333 bp, Gossypium hirsutum
ggttggggcttacttttttttctaatttttatcttttcttttgtcttactttttcttttttaaataattaagctgaagctgaaaaaaataataaggctagtgatgggtcacctaagtctgaacctctagctggaagggtattgtctttaagtgacatactctatcgcacagaaggtaacagtgatgcttcacaagatgggccaagatccgatagggaagattctgattatgatgaagagctggaattagattttgaaacttcaatatctggcgatgaaggccatgatgttgaatccaatatgctacatggaaggttaaatcttagaattcatc

SEQ ID NO: 253216 - DNA, 386 bp, Gossypium hirsutum
ataacttgggaagggttgtctggaagaaaacatacaggggttgcttttggaatgaatatatcagggatcctgattttatcattaaaggggaagatatgttgggaggggttatgaaaggcctacgtcaagttctgttctggaatccagctgcttgggaggcttgggtgggagtatcacttaagtcaggagttggaggcagtaagctatgactgagccacggcactccaggccggacaacagagtgagaccctgtctcaaaaaaaaaaaaaatctaatccctctttccttcccccaccacaccgactgctgagtcagctggtccatcctccaagagcaacggagaggtggggaccgtgatagggtcacagcaagggctcacaggctgc

SEQ ID NO: 253217 - DNA, 367 bp, Gossypium hirsutum
attaccatcattaaccatttgaacccataccgatacaatcaaccaaaacaatcataaaacatattcattacttaccacttagtaaccggacctgttaagttaatataccatcatccatcactctaattatactacatttcatatttctaaaatgagctaactattaaaatgaataccaaaaccaaactcattaaacattttaattaagaacatgtaaaaccaaacttaagcataataagcaagtcattttcgcatggctttacatacatactcattcaaaataattaactccaagactagcctatacatgccatataaccgagtctcaaaatattatttactgaaatgttaacaggatagtgtgatg

SEQ ID NO: 253218 - DNA, 356 bp, Gossypium hirsutum
cccacgcgtccggggagaacgaatttactaggttcatgctgccatttatgaacttacatgccattaaagtgtttaattatgaagatacatgttccatacaagtgcatgaacgtcccaaggagatgaatgcaaccttttggtgcacatacaagtcatttgaagcctttctttatgactaagcattcatgcacaaaccaagggggaagaaagtgtccattcagctagtgcatgaatctgccgaatttatgaactattttaatacattagtgtgaacgtttttattattgtgtgaacacctagatgtcgaatttgaatggtcatctatatgcctataaatatttattttctttcatttg

SEQ ID NO: 253219 - DNA, 162 bp, Gossypium hirsutum
aaggggaggggaccattttttgtcgatcgctaaaaacaacaagtttacatctccgatactggtatatttagcaaaatctattttacttataaaaatgcttgaacaaaaaagaaaaactaacctttattccccttttgggagcctgcacttatatataattcc

SEQ ID NO: 253220 - DNA, 371 bp, Gossypium hirsutum
cggacgcgtggggttttgtgggcccgggaccactttgcgactagggtcacattaggggtgtcacaaattgtcccaaatacttgaacgcatcgtttaagaatggattaaattaaaacagcgcataaattttaggaaaaatttaaaacactacaaaagaaatataaataggacttaatcagatggcggcaaacctgggagggaccgaatgcgcaaatataccttcaccgcagaaacacgcggatcctgagggcatcggatcgggtcatcgggttgtgccgtgaaacgacgccattttaaacatatatataaactaaaatttgccctaaaaaatcatttggctgattatttctttaaaaaaaaaccttaaactt

SEQ ID NO: 253221 - DNA, 368 bp, Gossypium hirsutum
ataccaagtctccagtcttgcctttgcacacctgttcagaagatggggaattcattgaatagagtcacctgacgctctccttgataattttccttttattattccaggcatcattctgtctgctgcttccccatctatgacaatttaaatccaattattctttctttaatacttaattcaaatggcaccaccactccaaaagccttctctgatcaccactccaccttcctatggcagatttaacaattaccttatatcatggggacccgtaatagtgggtgagaagagaccatatgagtggcgttttcatcttcacctcaacttcaaccagggctgcctggcttttggctggttaaaattttgggatc

SEQ ID NO: 253222 - DNA, 370 bp, Gossypium hirsutum
atgccaccctccctggccatgcgggcatcagcccagaagtgttggcctgactcagtcagctgagctaaggacacacaatttcaagaagggtctgctgcattgctgcctgaagtgttctagttactcacgtagagaccacactctgcacagaaagacgccttcagtaattgctttactcaatgtactttgtttagtgtttgactaaaaatataattaatttccttcagtttatactatttcataatatttatgtttaagcccttgtaaagtataaactttcaaacttgtgagacagcaaagatctctatcatttgaaagctagaaatcactgtgatcacaattgatttagaaaattaaatgcactagagac

SEQ ID NO: 253223 - DNA, 362 bp, Gossypium hirsutum
cggacgcgtgggctaggacacgggttaagttttttaatggacgtggatgaaaaaaaacatatttatataaagttggttaaattaaaatttaaaatttgtatttggttggagtattattttattaaaaaatataagataaaaatattctcctattaatatttcttatttttttatataaaagagtattttaataattgttcaactgagttgatattcaattaacttatgacactattttaattaaaaatttaatataaaattaaatttaacaatatcattaaaaggtgctacaatatcacacaaaataaaacttttaactaccaaaacacagatatattacaattgggacacatactaaaaag

SEQ ID NO: 253224 - DNA, 318 bp, Gossypium hirsutum
cggacgcgtggggcataatcatacatagtgcgcgcagtaggattctgattaacagcaatcgcaggaggtagcagattttcttggtttttagccatctcctcggttgtggttgaagtatcgtcctcttgctcgttctctatgtatcttaagcttcactttatttctctctggtttctgcgaactgtgcgatcgatttcttcgtcaaaaagtagtggtcctgacaggtttcttctagtcataaactataaaaacctgccaagagaaaaaaaaagtaaattaataaatagtaacacaaataaaataaaattaacttgcaag

SEQ ID NO: 253225 - DNA, 342 bp, Gossypium hirsutum
cccacgcgtccgaatcctcccggactacatcccacctggaactgaccttatttttagtttctccgattgacttgaattttcaccatgagagctgatcatccattaaaagccgtgactttagcccatgtcaggtatcaaagaggtgatcaactcggccatttcttagactgggtttcgttagtccctgttttcatttcccttggtggctttgtttctcatttctacttccgtagagagcttcaaggaatgttctttggattagggcttttaatatctcacttcattaatgaactgatcaagaaatccggtcaacaagccaagcctgaagcctgtgcgctatta

SEQ ID NO: 253226 - DNA, 360 bp, Gossypium hirsutum
ggtgaatgtgactaaaactgctaatagggcactagaacaaagtggagcaccagtagaagtgaagtatgagagcttgaagaacaacagcaagggatcaaatggggccatccttttcctagacttaaaagacggttcatcagatagtgactcaagcgctgtcttgaatgaagacaacaacaacggctcgaattacgtgggtgtatcttcatctggggttctacaaagccaacatgtttggatgtcaccgacaacagcctcttcactcaatttcaactcttcatcttcttctatgaagtgcctccaaccccagcaatttgtgaagatggaagaacaaaatttttttagtgcagatgaagcttg

SEQ ID NO: 253227 - DNA, 429 bp, Gossypium hirsutum
cactatataacaagtgtggtacgctaaagcacgctggtgcccctccccaattttcgggatgggctccaagcttgctctttcccgtcctgacttctctcagccgatgttccgatcccgatcatgaggttcctgatccacttatcgggcggattctggggtgtagacgctgcttatcagtccgccccaggcgaggttcttggcaccgacttgagagcttaaacatgtcccagggtgtgcggattagtatcccaagaaatttaaatggcgttcgcggatttttgctcacctggagtaaggatggacatacttctacaagtgtgcagcaaacaacttgctccttggaacctgagttaagaggactttttacagaacccatacttgagcaagcttttcctgaatctctcacagcatgtagatgagagtggctta

SEQ ID NO: 253228 - DNA, 365 bp, Gossypium hirsutum
gtaattgtggtatatccacttagcacgacgttacacgtataaacgtggtatatccacttagcaccacgtttttccattccgaaggttcaactgagatttcctcatttaatctcaattcatcaaccacaaatcaccgtttgtttccattaattgaacaatactaaaacttatttcacatgtcacaaaataaaatattataacataataaaacaatacattatttacatataaactgtaacaccccgaacccgagaccgtcgtcggagtcgaacacgaggtgttaacagacttcaaaccacttattaaatatttcccagacaagctgccaatctgcgtactagtcactttaaaaatcatatcttgag

SEQ ID NO: 253229 - DNA, 215 bp, Gossypium hirsutum
tcgatcactgaagaaggcgtggatggtaacaagcaaagcgtattgtcgaaccttagaattgacgcttaaacatcagaagtatgtcgactgagaagaactatttcagtcgacatgtcctccacgaaatgtacgaatcaacatggattgatgttcctcaaaaagatagcatcatcctatgtattgctacctccttacattatcgactaatgatatgt

SEQ ID NO: 253230 - DNA, 379 bp, Gossypium hirsutum
atgacaccctcaagcacgagctcccctccttcccctctggaggacagtgccaaagcaagtcccccttctcatttcctcactcagatacgttctttcttgctttgaggctcccccttggtgtgcactagagaacctgggtaaggaccaacaaatcactaggcagttccatccaggtgtgtccctaaatagcatgcgttcatgactctggctcactttatttttggccccaggtcaggtctcccaaagggtttcccagcagtcacttcagagtctcctgcagagtcaccatcaagcagacctcttccttgggaggccgtgtcgtcgccccaacccttgacttctggtatcaccatctcctgtcacctgggctccagtctct

SEQ ID NO: 253231 - DNA, 395 bp, Gossypium hirsutum
atccatattctagctccatgtattaataacagtgctttcctgaaccagatgtgtatatttctccttggggcagtaaaatgttgatatgaataccagatacttggtcagagttaagtcaaatactaaatgaataaaagtgaggtctaaagggggaagacagcacttcatctttcagcagattttcttttgccagacaaaaatgtctattcagagactcggccttcctagagccatcctttcatatgaatgccctgtctaaatgcaccagctatatccaggatgtgggttgttttagggcccataaagtgtctgataaacttataatgaaagggttaagtcagttcaagtctgtaaagaatgctttgaaagaatttataagctctaactacttacct

SEQ ID NO: 253232 - DNA, 327 bp, Gossypium hirsutum
cttatctttgtgaaaaatataacccagatgagaaatttgaaagtttctctaatacgaacttctagtgtgaaactgtaaagataatataaagatattctgcatcttcctcattttttgtttcaacgtgacacccattttgacatatatctttgaaacttactcgagctcacacctaaactcaagcaaggaatgatacatttacaaatcaatctcttcactttagttctaaattgtacattaaagttctattcatcttttaggtctttaaatggttatttaaggcttatcagaccatttttaagatttctctaaaatttggttgcaatc

SEQ ID NO: 253233 - DNA, 344 bp, Gossypium hirsutum
gatagctggcacttcgaagcctgataatgggagggggaaaagagggggctgggtgattaaaaactcttacacacctactggataaaacaattttaatgcgcaaaaagcataacgggaagaagaaaagatttttcacgacgaaacacttgcatgctcttcacaaggccttctgtaatcaaccaactaggtccttgtgtccatatgtgcccattgattcaaactcggtgaatatgaaatgtgaacttaaaaccaatggctatcaaataagccgtaggtcatactctccagccattgtaatggaccgttcccatggaagagcctggcaaccactgctgtcaatgatc

SEQ ID NO: 253234 - DNA, 370 bp, Gossypium hirsutum
gtcgagaatgaaaaggatccatctatccgaaacatatatacgattttggtctagggtttatcctatgataaaccataagatatacatatttttaccccatgcttgatatatttatggatgatttctccttggttttattgaattcgatgcttctaatactttaatttcatgttttatactcaggagagcttaggatagcaaaaagagcaagaaacgggccaaaaatggacaaattaggcctaaatcagtgttgcacacggcttaggcacttccacacgggtaatccacacgccattgtgtgacacacgggtagactacacgcctgtgtgtgacacacgagtagactacacccccgtgtgtcatgaccatg

SEQ ID NO: 253235 - DNA, 386 bp, Gossypium hirsutum
atgcaaattcatgtttgtccatagaagaatgtactcagaactttgtgttgtgaaatgatgagaacagaccacctttaagatacccacctgccacttaaaatgacttagttataattagtagtagtctagacgttgttcttggtgtgtgggggtcaattctaacgtcatgttcttttgaataaatctctcagtcatatttgaaaaaaaatacatgggaataaagaaaaatatcatctttggccaaatccagcaggcatctttttttttttccttgacgtttaactcattatacgtggtaattggatcacaagatctttccgtgtaaaaataacaaaaacatcctttagtttacaaaagagttattctaggcttgaagcctctgaaca

SEQ ID NO: 253236 - DNA, 384 bp, Gossypium hirsutum
atcttgcatccccttgtgtccatttcatagggtcctatgggtgtggacatcagatgttccaaatgaaatgttccagtttcaaaccctccatcccattctccctataaacattgaaatgtctttaaagtcctaacatatggaggaggagaccacacttttccaacctgcttcttcagacaaaactttgttggtgcaggtggcctgcttttggcttcagaaaacatttgttttcctataggtgatgggcagaattattgggtagggtgggaagacggaaggcagcaattggtggagggagctctataggctgaattgggagtgggggcacacatttttttgagccctggctcatacacatgttgagatggaatagctgccaaagct

SEQ ID NO: 253237 - DNA, 388 bp, Gossypium hirsutum
atggcctctccctgggaaaagctcattccaagagccagaggaaccctcaggcaaggagacggggatgctggcagtgtggagtccagcaggctgtcgtggaagaggggacgcgagcagcacctgcagtgtctactctggggcggaggccacgttagcacagtgagacactggtggacacagtgtgtccgagcagggctggcacatggcactggatggtgctgcttgaaattggcaaattgcctgctaccccaaggcaacttgaaaatcagatgtggctttgccagtaactcctgcaacctgtagttttattcatgacagcagatgctatcaagggcgctgtgccctttgctgatgtagttgaggtaggaagtttgcttgttttggtgat

SEQ ID NO: 253238 - DNA, 376 bp, Gossypium hirsutum
  unsure (1)..(376): unsure at all n locations
cgcatatatatactgtctatagccttgnngtttcaaatttttagtttttaccttttatanaatatatatancgtatgtgttttatatcaatttttcaattttctttacaaatatatgtacatgtatatatgtatttgaatatatacgtatgcaaattttcacgatttacctatgtctatatacttacacattttatttttctattttgtaaatatatatacatatgatttaaattaaaataatgatttcatgttatgcattaacatttatcacactttcaaaaacatatattttggttttttcaaaatttttggtttaaaatcatcatattttataaattttcaaaatatttggtactcatgattctcgagaaaga

SEQ ID NO: 253239 - DNA, 369 bp, Gossypium hirsutum
  unsure (1)..(369): unsure at all n locations
gaaaatgatttggtgatatgtatagttaaaatganggttaatacaaaagaaagttgtgaaagagtgaatttgcaataatactgttttggacagtagcagtgatgtgattttgtaaaatcacaaaaaatagtataaatttaattagaggctgaatgagatattaaattaaagctcaatgagtgtattttcatataaaagaaacagagcaagcaaaggaactctatatttttagatatttatatttgtgtgtgacttgtttagattgactatgtgatcccctattctgactttgataaatctttaaaaattttaaaaaattaattaagaaatataacttatatgtatagattccttatcgagtctagtttt

SEQ ID NO: 253240 - DNA, 196 bp, Gossypium hirsutum
gccacacgttccatttgatttatgaaagagtcaaacccgtatagggacacattctaagtttctacagcgacatgacttataactatctcctaggatcgtatgaaatgaattagaaggtgagcgttgtttcagactgaaagcttatcgaaactactttcctacacaaataatgtgtgtagaaatgaataggatattt

SEQ ID NO: 253241 - DNA, 369 bp, Gossypium hirsutum
atttaatagattattattaattatatccatatataataaataatttttttcattaaatatgttttatttctagagtttaaaattttcatctttaaaatacatataaatgatgaataaaaaataaataaaaccgatttacctttaaaaaaccaaaagaaaatcacaaattacgaaaaaacttccccattatcttttcgcaatctcgaaaagagacaacctctctccatcttactatgtgtgatgcaactctgtcggtgaccgaccttcccataattcaagttttaaaaattaaaactttatctgcaaaccaaaattttaatccctataaaaagaaaaccttttccaatattttattattttttacaaaat

SEQ ID NO: 253242 - DNA, 188 bp, Gossypium hirsutum
gctcttcaaggggttgggaagggtaagtgtcctcttactactaaattttctcttatcctgtattattaccttatttttgtttcttcctatatttctccatgatttgttttatttattttgagtggctaaattttcaaaaaaggaaagaataatgtcggtaagataccctaaccaagaatgaaataatt

SEQ ID NO: 253243 - DNA, 361 bp, Gossypium hirsutum
tgaagcgatagtcatcttcttctaacccaaacgataatttctacttcctaaatccccaattacagttgccttttttccctaattttaccaattatttagttcctttcatccaaaattttgatcctagaagaagtcgaatggcgtcaagaacagttgccaaagatataataactcttcgaggctcagcggcaatcgtcagcgagttttttggatatgcagcgaacaggtaaagatgagcggaagtttatcccctcccctttaattatcctttttatttttatgaaactattatttttagatttagaataaaaagagtggtgattatggttttctatagcattttgtacaatcgaggagttta

SEQ ID NO: 253244 - DNA, 385 bp, Gossypium hirsutum
atgccagggtgagcaggctagaaactcaggacaccaggtagccctgcaggtgctgggtgggcaactcagcccagaggaagagcaggctcgggagctctcacagcccaacagggactggcccccggccctctccaccccactgccctgaagccagatttcctgctcagcatggacaagacagcaagaggctagccctctgcccaggtggaagctgaccccaagccacccttcacctggacaggatgagagtgtcaggtgtgcttcgcctcctggccctcatctttgccataatcacgacatggatctttgttcgaagttacatgagcttcagcatgaaaaccatccgtctgccacgctggctggcaccaccatccaccaaggagat

SEQ ID NO: 253245 - DNA, 371 bp, Gossypium hirsutum
ctcaactgagcattttgatatgtggctcgagagtgtgctccctgattaagtgccctaatgggtaccctgattatgagttgacggtttatagttttgtaaaccttttgtgtactacatgagcatccatcgatatttcaataattcaatggagaacacttctaatatgagaaattataagattaaaagcgttacatctcaaatacttctgaatacctgagagagtgtagcatgatgagctcatccatgtttatttgatgtacatgtgaattatgtggctaactagcttatttaagtatatgtgattaggcaatttgcaaattttttgggaatcatgttattgtatgcttgtttgaatgaaaataattggtaag

SEQ ID NO: 253246 - DNA, 270 bp, Gossypium hirsutum
atattacatccaactggccctcgccctcctccgtgaggatggtggcatggtgttctctctttgagtggttttctgctttgggagaaggaaagtcgacttcacctcagcctcccacttgcatcaggaatgccttgtgccttctctgggacacgtttcaactctttcaacctcagcattgcacccagtgccccagctgaaggaaccataatacacagcgcggagcatccaaatcaagctgctgtaattagctggaaattatgatgtgcttac

SEQ ID NO: 253247 - DNA, 368 bp, Gossypium hirsutum
atttcttcattttctctcttcacaaacccttcttcaaagccggaatttctaacctaacacttcaatctttccggccaagatcaaagttggcggagaatggtgttccctgaaaactccaattattggtctcacttcgattatgctaccttgatcgacgatatccctgtccctgatgatccttatgccggttttgcttggtctacgcagccaatcgacgccccttctaatgttgtcagtgtggaaattgatggctcatttggagattcagacggtctcaaggaatctggttcaaagaagagggttagatccgaatcatgcaatgcatctagctccaaagcatgtagggagaaattgcgtagagataggct

SEQ ID NO: 253248 - DNA, 377 bp, Gossypium hirsutum
atgcggcggctgcgggggaacgggcgcggtgggcggtggcggagcgggccaggcctctgccggggcagcgactggcgctactggggccagcgggggcggtggccccatcaacccgacctcgctggcaccctgcgacccgcagatcatcgctctcatcgtggagcatctcaagagccggcgcctttttgacagcttccgcccatactgcctggccgacgtggtcaccaagccagctcaccaaaacctgatgcagaaagtggataattttgtgtcaacacatctggaccagccggagtggaatcctacaatgaacaaaaaccaattgcgaaatggtctgaggcagagtgtggttcaataagtcacggatgcttgaagct

SEQ ID NO: 253249 - DNA, 371 bp, Gossypium hirsutum
acactgagttttcgtaaactcaccccctcttttaaaattttcaggtaatccttagtaggcgattcggctatgggaggactcgaagatggccacaccatgaacggctttaaattttcgtcttttacattacttaaattactttctcttttggtttttaatgtaataaggcattttctccaattttctaccttttaatttggggggtttttaactattatgatttatttctgttaaaggcagagcgtggttttccaaaatgatatttttgttcaaaacatcatgttttttcaacattgttgaaatgcttccgcaacaaacatttttttaaaagtaaggcttgtttaaaatggttaacaaataattaagttgac

SEQ ID NO: 253250 - DNA, 236 bp, Gossypium hirsutum
aaaaaaaaaaaaaaaaaagaaatgaaaaaataaaaaaaaaaaaaatgggcgtcccatatataaggtaccaagcttacttactcgatcatgcgcacacaaaatcttttatatagcagtacctaaatttaatcctctcgccttggggtccccacggcattgattctatataaccatgccgtctaccgaacaaaataatgttccttttatattcccctttagtcaactaacgtgcccgc

SEQ ID NO: 253251 - DNA, 342 bp, Gossypium hirsutum
atggtgactggaaagtggctacaatccaaaattttaaatttaagtctgcctccgccattcaaaagtctaataacaaaaaatggtaacctaatttggccggttggtacgtttgacaactgtcaacatttcattcctaccaggtggttttcaatgatctctttcattcccccaataagggtggaagaagttcctggatgcctggaagaagctcttaacaaacttcttaatgcaagcaatgggtagattaatttgtggggcagctctttaagacattcagaggtgggaaatactggatttattaaggaaatggctggttgggggattccaaggacttaccctaat

SEQ ID NO: 253252 - DNA, 332 bp, Gossypium hirsutum
gcaactgctggggcatctagctgcacctcatcagatacacgaagacgaaggtttgacccctcatcattccagcagcgtgctgaggcattggaaggattgctcgaatttagtgcaagattgctgcagcaagagaggtatgatgagcttggtgtgctactcaagccatttggacccggaaaggtctcccctagggaaactgcaatctggctgactaagagttttaaggagaacactgtgaagccagaggattaacaccgatgaacctccaccgtttgtatcatatccatagctgtaatctgtaccaattttttagagttcagcctatccgatct

SEQ ID NO: 253253 - DNA, 387 bp, Gossypium hirsutum
atcaaggtcaatacataagccagagtgaatgattctacaagttgagcatctctaattcaaaaatctgaaatccagaagcttcaaaatctgaatctttctgagcactgacttgaccccacaagtggaaaattccccacctgacacctttgctttctgatggttcagtttaaacggattttgtttcttgcacaaaattattaaaaatgttatataaattactttcaggctatatgtataaggtggatgtgaaacctgaattatgtaattagtcaggtcccattgtatatatgcagatattccagaatctgaaatccaaaacacttctggtccctagcattttggataagggatactcagcttgtacctacatattcatatatattcact

SEQ ID NO: 253254 - DNA, 384 bp, Gossypium hirsutum
attcttcatcaactaatagagcacctaccacagtgtcttacctggtagaggtaagcaattcatattcaaaggttgcaaagtgtttgtaatatattcacaaggctagaagtaggaagagtcaaaaatttgtcctaattataatgagaaccattctaggtcatgatcttggaggacccatgaataagtttccaaaggtgcaaccaaatccatttttatttctgcctgacttagtcacctttgtaaaggtttaacttggtgttgtcaagtaacagttactgaaagagctgagaaaaggaacaatgaacagcaaagatcttgactgtgcaactcagacattcctgcagaaaagacatatgttgctttacaagcaaggccaaagaacta

SEQ ID NO: 253255 - DNA, 298 bp, Gossypium hirsutum
gcggatgaatgaacaaagaggaaatgctggtgcatgtacgggtagattcaataatggtacaaatacatgcatgggataaatgcatggatggacattaaaggctaggccatgaatggattaaatgcatgggatgattgaatgcatataatggcttaaggacacatatggtagctgtcaatgaactatccaaggcacttatttatgcaagaagtagatggtaactaattatatggtgaccatggagcttctagaacatggttcacactttgaattgacctatgagctacgacacatgcat

SEQ ID NO: 253256 - DNA, 279 bp, Gossypium hirsutum
ttttcgttcatttttcgcttattaaaaataatcaaccaaaaacacattaagaatgatgttaaaacataccaattttagcagttatcaaatatccccacagttaagcatttgtttgtccttaagcaaaactctcaacccttattcaagttaatctccctcaatttattgttttcactaacaaagccttatgaataatctacagataatcatgcattggaaattgaaactatcatgacactaaagaataaaagcaatctaagcagaaatttgtaaagcaca

SEQ ID NO: 253257 - DNA, 382 bp, Gossypium hirsutum
attatcaagtgaattaatcactagaaagatgggtgtcagacttgtagacacagcagatcggcatccttcgctgccccttagcaacttaggtggtcaatctgaagctgtgaaggtgtgatttttcaggagctggaagtcttagaaaaaccttgtaaatgcctacattgtgggcttttgacatatttaagggaccgcttaagacgagattagatgggctcctctggatttgtaactcatttgtcacagataccttgtgattgaaaatcgtgagtgaagtgaaattgcagtgcatttcaagggaattttgtatgtaaatcgtgccttagaaacacttctgttgtcttttctgtgtttggtcgatattaataatggcaaaattttt

SEQ ID NO: 253258 - DNA, 391 bp, Gossypium hirsutum
attgctttgtggggttgtgatgagacccacacaggagtggggaagctgagcatggtccacatgggttcaggggaagggggaatggtcccagccagtggagtgaggagtctggcacagtctctgagagccgtctccactccttctgtctccagacatcaacttcaacgtgtcaggcctcttctcagctgttaccctccaggacacggtcagtgacaggctggcctctgaggaactttcacccactgctgtgcccaccccaaccaccaccccggcttcggctccagctccagttccagccccagccttggcctcagcagctaccaaggaaaggacagagtctgaggtaccccccagaccagccttccccaaggtcaccaggagccccccggag

SEQ ID NO: 253259 - DNA, 289 bp, Gossypium hirsutum
cggacgcgtgggaaaaaatcaaattccaaatttttatttcatttgctcactaaaccgaatacacttaccatgttcacaaacactcttcaacgatttcttttctttagtcaaacacataattttccatctcaaaatttattttcctactaatttaacttactccgaggttgaatgttactttagcattaagcttatattctcttcgttattaagtaattgttcatagctcaactagcatccattttcgatttaacacaaaaattcataaccaaatgttatttatcttaag

SEQ ID NO: 253260 - DNA, 138 bp, Gossypium hirsutum
atcaaactttctgagcacctttctttttttcaggcgactgctcgctcgctcacctccctccttgggaccatgaccacctgcagtcggcagttcaccttctccagcttcatgaagggcttctgcggcatcgggggcggt

SEQ ID NO: 253261 - DNA, 348 bp, Gossypium hirsutum
cccacgcgtgcgcccacgcgtccgctcgaaactccgatttcaggcacagggcattttccttcttgtttgcagaaggtgaaaatgaggaaataaatgcttctcaaacagtggattcacattctttcccacagcattttatcaagtcaaaagatgaattcgggcttgccccagctgctgttgttgtaactcggaaggaactatatgattcttcatcagctttaaaatcactggattacaacaggcagataaggccagagtctcctattatagctgctaggaaaatgaaaggtagcattttgaaggaaaatgaaaacccagattttgttacaaacccataccaggccattg

SEQ ID NO: 253262 - DNA, 390 bp, Gossypium hirsutum
atatgagttcccgcctgatctacacactccgctgcggggtctttgccaccttccccattgtgctggggatcctggtgtacgggctgagcctgttatgcttttctgcccttcggccctttggggagccacggcgggaagtggagatccaccggcgatatgtggcccagtcgatccagctctttatcctctacttcttcaacctggccgtgctttccacttacctgccccaggacaccctcaaactgctccctctgctcactggtctctttgccatctcccgtctgatctactggctgaccttcgccgtgggccgctccttccgcggcttcggctatggcctgacgtttctgccgctgctgtcaatgctgatgtggaacctctactacatgt

SEQ ID NO: 253263 - DNA, 318 bp, Gossypium hirsutum
atcgaggggaagaaagccggaggcggccgattgggggccggggtaggggacccatacctagcccccgctctacttgatcctatctttcttactctttcatcctacttcttaactatcctatcagttctccttacatcctattactcacatttgtactacaacccctggactattaataccctgttgaaccccacttacaagtgccatgctacatccctctttccttccgttcacttataaatacagtacccgcatttattgatgcctctaatcattattgtcctaacatgacatataatggcctggaatatttattaa

SEQ ID NO: 253264 - DNA, 121 bp, Gossypium hirsutum
atgcacgctgctggagaccctcctgtgtcacagtctgtacacagcgcttgatatggtcattgctggggaatcataatacaggcgctccaagcagctgggtatcattctattcattgtggcg

SEQ ID NO: 253265 - DNA, 403 bp, Gossypium hirsutum
atcatttacatgcatgcaatcagacaggccactaaggtaaaagagtctgctctatcatagtgttgagagcgtgtgtagtgctgcatcttatgacaaggggacagacaagctgggacgtcagggaaatgaacaaaagggacgcagattatttggggtgagtgggtggtgggagcccagaacaaggtggagggtgcagaggggctggggtaggtcatgtaggagggaggtgggtgggtcaggtgagcggaaggggtgttgtatattgtgttgatgacgtacgttatttccatggaagatagccactgtggcagctgtcacatccccacagcccccagggtctgccgagaaggcaggcaatctttgggttctgttctttgtcacgtcccctacgagtaaattttgt

SEQ ID NO: 253266 - DNA, 347 bp, Gossypium hirsutum
atgactgatgcaaatttgcactctgctccccctctgtaaggatactgatagcacaacctcttcttccccccaccggcccgccttctggtccttcaacccagtccctttctgtccctcttcctgtagcccagtctcaggctttcctcctcctgaagccctacagaggtagggaatggagcccaggcaccaggggtctgaagtgtgagccacccagaagagagacgccaactgcacccttgccacttccaaagcaatagaggcagaggggtcccctctgccacctagcccagctttgaccctggcattaactagccgtcttaaaaaaaacaaggtcctggtaggggggg

SEQ ID NO: 253267 - DNA, 380 bp, Gossypium hirsutum
ttcttctagaagagttttaacaatctttttagattgtggagattatcttcaaattttttcttgccaatgtttctatcttggaggggaaattagagccgtttgaagagggttgtagattcttcatgtttccaaggcttcttaggacttccacacgccatgttctatctttccatttatcttctttattcgcttccttaatttttgatttattattttattttagttatttattttaattgttttatctgacttagattcaatttcgtttcaggttgtgtcaaaatctaagtttctttccgaacgattagagccctaagtcaaattcgcgactttgacaaactttacgatccgcttttgcgttcatccttctcatcctttat

SEQ ID NO: 253268 - DNA, 357 bp, Gossypium hirsutum
ggcctgcaatcttgcaaccaaaggagtggtaaattaaggacaagcaagcctgtcttctatgatttcctgaccaaagacagggctgacttaaacctagccccttctttctcgtcatccgtctccagtgggatcacccaagtttcaaataatgacacggatgaccactaggaaagcagttgttgcaatagttttccttatttcagaagaaaaccctaaaaagtcacaggtcacaccctttttttttctctctcttttcctgcctgtaccagtagctcggattctgattagccaatcagtgtaacatcttcaaagaaaagaaaaagataagaaaaactagtctagtggttggtaaattat

SEQ ID NO: 253269 - DNA, 406 bp, Gossypium hirsutum
atggcaagagtacctgggcccatgggcccaaactcaggtcctggctctcggggaattggccttccagggccaaatccatctcccatgtcaagggctcctggccccataggccctaattcagctcatttctcaaggccaggtggccccatgggggtaaatgccaattcctttcccaggggagcaggttcatctgccttttctcagtcttctggcacattggcatcaaacccagctaccttccaaaggtctgctggcctccagggctcaaatccaaccattttcccaagagcctctgggccacttggccccaacccagctaacttcccaagggccactggcctgcagggtccaagtccaactaccttcccaaggtctactggcccattaggccctggtcaagttactt

SEQ ID NO: 253270 - DNA, 382 bp, Gossypium hirsutum
cggacgcgtgggcgaaaatggggggaaattgttggaatattttcaaatatttatagtgttccaataactatatatgaaagggtgtaatatcttttggttattgatcaagagttatatcatctgatttttgacaaataattataactatacaagcaatattacttgaatagttatgagatatttgttgaataattatgtcttttaaatatgccattattcaaaaaagacatttatcgaaagttatgtctttatgaagagacatgagaattcctattaataggagtgatattttattcggaagatatacaaaaaatttttaaaagttctttctatccttcctctatactatactattataaaattgttctattaaaaattactg

SEQ ID NO: 253271 - DNA, 176 bp, Gossypium hirsutum
cggacgcgtgggtggaaatttagaatctctgattgtgtatttgattggtggttaaataagtgattatcgagttaatttgtcttttataaaagacctttcaattttcaatgttgtttaggttcgcaaacaagatgctgtatttggacttgctgttactaaaagacttgttgtatttt

SEQ ID NO: 253272 - DNA, 396 bp, Gossypium hirsutum
atgcagtgtgtggctttaaaaacttttagagatttttcagtcttagtgtgcaaactggcatttccgattttccaacataaaaatccacctgtgtctgctgaatgtgtatgtatgtgctcaatgtggctttagattctgtccctggggcttaacattgttggccctgacaggaagggaggaagcctggtgaatttagtgagcagctggcctgggtcacagtgacctgacctcaaaccagcttaaggctttaagtcctctctctgaacttgcatttccagcttcttcctttccaggtgagagaagaagcggggaagggttcagtgtagccactctgggttcatagggacacttggtcactccagagtttttaatagctcccaggaggtgatattattt

SEQ ID NO: 253273 - DNA, 375 bp, Gossypium hirsutum
attcaagcctcatttggccaagggagatgtaggagtattaaagggctgcacattcatgaactatggcttttcgtctaggctaagtatgcatgaatgcatcaagtgaagcaacatgatggttcggccaattcatgcaccatcttcaagcatgaaccaaattttaatgattttgtgtgaacatgttaaatataaatgtgaacagaatttaagttagtgtgaacatcatagatgccgaatatcaataggcatcttaggcttataaatagtttgttcatttcatgtaagagggactttttaccaatttgttaatgaacattgttcttgtgaggttgcttcctctcatatctcgtacaagtttcaaaagacttatctagt

SEQ ID NO: 253274 - DNA, 382 bp, Gossypium hirsutum
cggacgcgtgggtttttagactttatgatttaattcctatgtaaaaattcaacccaagcagcctattaaaagccttggccgaatttcccttttgaagttaataattaggtttttttttagtttcctaataggattaggaaaatagttagatggccaataataaggcttggccggccaccttatgaaaattacattgaattgtatattgaaatcagattttgttgagtgaaaattctctttgagttttctccaagaattttctcttgagttttctttggaagtagttttaacaatctttttgattgtgggagccatcttcagccttcttcttgccattgtcctacattggaggggagattagagccgtttgaagggagttgtg

SEQ ID NO: 253275 - DNA, 387 bp, Gossypium hirsutum
aaacaatcctaaaagaaccgtaaagaaagcaatttcagaacaaaactctcttcatgtttagcaatattaaaaattaggatttttctagtttaatggatctgctatggtatgccaatattggtagtttacagagagttaactagagaggtttaatattaattgaaattacacttcaattgaaaatagctggccagtcgatcctagtgtcctaaagacactaaactgccacagattatgcctcccttaggcagcataagcttactagctccgcaagtagcttcccttcaccatatggtcgacttgcgttaatttgggtcacatattaattttgaataagaaattaaaattatcgattaaataattttcaaagattctattttaacccat

SEQ ID NO: 253276 - DNA, 378 bp, Gossypium hirsutum
tgccgtccagccaaaataaagtttgggtctaattgccttttaaatcctctctcattagacacttaagctatttaatcatctcatccacttttacaccttttacaatttagtccttttcatttaattaactatccaaacatcaaaatttcctaacacaattttaataccacattacaaacatttcataaatgtttaaaaaattattttcgactaggtcttacgagatagaggtccttgtactttattttacccaatttcttcaatagatttcttgttctcactaaccattaaatcaataaaaactttttatcaatattttcatacgatgttgctattatatcaattttcatgcaaaaatattgaaatagatctctcttt

SEQ ID NO: 253277 - DNA, 371 bp, Gossypium hirsutum
cggacgcgtggggcctggccgtgtggttcaatttatttgctgatgtcataaacagaaagttacacggcctaaggacacgagcatgcccctgtgtccacacgggcttgtgaccctgtttcacgagaaaaatttctaaatttttcccagagctttccaaagtttttggtttagtcccaaaccctttctaaagtatgttttgggcttcgtaaacccaaataaaggactatgtccatgtgattgaaatgttttaaaatatgaatgaaattttatggcccgatttgcatgattgtttgcgtttaagtccgctaatgcctcgtatcctgtcccggcgttagacacaggtagggggtgttacaacaacatacccacac

SEQ ID NO: 253278 - DNA, 381 bp, Gossypium hirsutum
aattgtttgtgatgcttaaaacttactaagctttgaaagcttactctgttctttatttctctattttatagattgttgattttggccaccgactcggggatcgtcagtagttcatcacactatcgatctttttggtacagttatattttggactcgatatggcatgtataggttaggctgatgataacgatgttttgaaattgtaaatattttgggccatacgaaaatggcgtataacttaaatatcagtatgtatttcagttcgatctctgtttatgcttattgacaatgtgaatgagataattaaatgtttagttaggtaatacctcttagccttaatccggcaatgggattcgggttaggggtgttacattttattgg

SEQ ID NO: 253279 - DNA, 395 bp, Gossypium hirsutum
atgcccagcttaccaggttgaagggtacaaacttctcaaatcttcaaaacattttagtcaaagtgcaatatacttaaatttcacctaaaatatctttggcgtgcttgttagaaattcctgattcctgttactaatcactaaagaaatgggatgctgccactgtaggatttaagcagtggtgcttctgtactcttagacttctgctgcctgcaccttcgtcagctttgacgcctcttttctgatttaaagacaccaaggaaaactacaactctctttagctttgaagcagttttcatgtaatcaatgccacctcttccctacatgaactattgataccagcatacaagtgtatagcactttacacacaagaggtttattgatgtaaaattgtcagc

SEQ ID NO: 253280 - DNA, 293 bp, Gossypium hirsutum
ttacgatagaacgtatagctctactgcagcaccacggcataagctatttagtgaactgtgcaggagaacaccttgcccctcgcggcctgggggcctctgatcacttggacctctaggatttgagactggtaagatgggaaaaccaaccatatgcattactgaccttgcctgaccactgctacccatctgtactgacagtataaggtgctccaactgaaggtgttagtatcattgcaatacaagatactgcacctgctgctttgctaagatatgaataagacacttgagctgct

SEQ ID NO: 253281 - DNA, 389 bp, Gossypium hirsutum
aaagaatttttcagaaaatattaaaatttttcaaaggtgcaaggaaaacacgcccgtgtagtcaggccgggtggctcacacggtcaagagacacgcccatttctcaggccgtgtggacattcgaatagggacacacgggcatgtcctagcccgtgcccaaacttatatgctctttgactttggtcacacggccaagccacacacccgtgtgctagactgtgtgagcatactgacttgcattaataagatgcaggggtcacatggccaagccacatgctcgtgtgctatgccgtgtgagcattctgttttgcactaattaaaagatacaagggacacacgaccgtgacacctagccgtgtgttttacacggctaagacatacacccgtgt

SEQ ID NO: 253282 - DNA, 390 bp, Gossypium hirsutum
gtaactttaggttcgagattgaacgcttctataatcttacgactcctgatacaccattgacatcgacaccaccaccagcaacatccccgccatcaaacaacaccaaaaatacaacaggaaaaaagagtaattcgtctcgaactattatcatcgcatctgtctcagctgttgctttggtggtacttgtagtttccagctgcatcttcatctttttaagggtgaggaagtcaaaggtgaaagctgaaaaaggtggtgaggcagctgaagcagtggatgaaataaaaaatgcagaggctttgcaatatgatttcagcaccattagtgctgcaacaaaccacttttctaattcaaatatgcttggacaaggtggatttggtgcagtttataagg

SEQ ID NO: 253283 - DNA, 426 bp, Gossypium hirsutum
acaagagggaacgcagaagcacgctggtgccccgccgcaatatccggggtgggacaccaacctccgctggcggctgacgatcaccgggctggtgctgcaggtagctatggtgatgcttttatgaggggtcgggcgctacaacttgaatgcctgctcccactggcggacagagagaaagcacaagaactagaacgaggcggaaaacgaatcactactatgactccccaagctaacatgacgtgcacgtcatggtcttaacgggcttaagattgctcatgaccttactgcatcgattcggattaagagctatcggttttaactttctgatcacaggctctagaatgcaatgcacgctgctcatgcaagactatgatcacctattagaaagtccctgcatcttcaagggagcggagaatctcatcaagg

SEQ ID NO: 253284 - DNA, 385 bp, Gossypium hirsutum
gtttgctacagttttatgcctatcgcacatagtttcaccatctcgatggaacggatgctcttgttcatgattgtgctaaaaagaagaaaggaagtgcttatttcccatcattaattacttcactttgcttaagggctcgtgttagaacacaagcaaatctgaaggggcagtatgttcaatgatgcattacaaattatgatcttgaaagattagtagagagggtgcatgaattgaatcaaggcgagcaagaagagccaactgagtcggatacagaggagtcaacagatggaactgaaactgaagctaattcagtcacagacactgaagaggaacaatctgataaggaactgaacattcttgaaccaagggttgtgccagaagaaga

SEQ ID NO: 253285 - DNA, 385 bp, Gossypium hirsutum
ctctttgaaaataaaatgccgccattaacgtctctgcaactccgtcggctgcttcaccgttgcgtctcttcgccttctccctttcagccccatgctttgctttctccgaaacctcaatttacgcccacccatttccccaaattgccatttgtgatctctaaacccttctccacccagaaccctaaccctcaaaccccagatccggttgctttatctatttcggctgaactcctcaaggacccttctttagaccctctcactatcacccctagactccagcttcacttttctcacatcaaaccaacccctttgttaatctcccagaccctcaatctctcccctgaagctggccgaaccgttttagggtttaacgattgggttttat

SEQ ID NO: 253286 - DNA, 401 bp, Gossypium hirsutum
atcccattataggttgtctccggatgctttcatccaacagagttgaatagttataacacagactgtgtggcccaaaacctataaagtatttactgtctggtttcctggcttaatctgttgttgaaaccttgagttttagaagaagtcttcatgtttactaaattctttttcttgtttttgggcaggcagagaacatttataatgatgaagaccctgaaggaagcgtggatccagaaggacaagggtcctagatatgtctttacttcttgtgattttagactccccttttttcttctcaaccctgagagtgatttaacactggttttgagacagactttgttcagctatccctctatataataggtaccaccaataatgctattagcccaaacagtgggtgt

SEQ ID NO: 253287 - DNA, 304 bp, Gossypium hirsutum
gcgcgcacgcgttacgtgaaaaaaaaaaagcctttggtctatgaaactatggtcccttacttgaggctaggatgcattggggtgggcagactagagttgaaaggtgtcaaacccagatcacagggctgaacatgtaaagaggcgtggaacgaaggagactcgaggaagagtgacaaggttgtagacagacatggataatagccgcggggtacagtgcgatgttagggatggacagagacctgtgatagacaaatttacagcaattgaagccgagatgctatgcatttaagagagaaactagatt

SEQ ID NO: 253288 - DNA, 384 bp, Gossypium hirsutum
cggacgcgtgggcaccttggctctgatgatcgggtcaggcatggggtgttacataatatattaataaatgtaaaagaagaagaagaataagctattgcctccttccttcttcctgctatacttgattttttctattacttcaacaggttcttcgcaggtaaatgttttccttgattttattttttccctagctacaagattgatttagcacttgtatttgtatgaaatacttaatttatttttgtaggaaatggatcaaattgttccatttaagttgtgtaggaattgtatgttagagaaagcctatggtttttcattgatatgatttaattatttgtaattttgctaagagtagtacttggaatcaactatttttcttatatt

SEQ ID NO: 253289 - DNA, 376 bp, Gossypium hirsutum
gcgggattccccgctgggtgtaagcatatcaataagcgggggaaaaccaacccttccggggatttggaagtttagggtaaaacggaagtgctgctcccggttgtaattgagtcctctactgcttcttttgagggagtagccggggcctcggcctcggcggttttaaagctcccaccttttgaaactaataaaatttaaccctttttttttggaatcttggttagttagtctcagattcattgtagggatgccggccctggcttgctgcgtagatgctgctgccgtagcgcctcctggttacgcggctttctttgctggggacagctccctttcctcggcggtcccttttttcgccttcaccgccgacgccgctgat

SEQ ID NO: 253290 - DNA, 383 bp, Gossypium hirsutum
caagtcctaaagctcaagctacattagtattgagtgttggcagtgtgagaaactgtaacaccctaaacctatatccgtcaccggaacaaagttacggagtattaccagaactttcagaatattttcaaataatttgcaacaatcactagtcacttttcgaaattatttgtaacgtctcttaaatagaccctcgaggccctgtaacacccgtaacccgtattcgtcgccagaatagggttacaaggcattatcgaaatatgcacatcattctcatgcatttgtgcattcataatcaaaatccattcaaaacattcaggaatacttaaggtacaaatatcacgacattcgggttaatgaaatcccgtataagactatatctggga

SEQ ID NO: 253291 - DNA, 403 bp, Gossypium hirsutum
atcctggaccaaggcccacatgtctttttgatcactcacctacccaaagtatccagtccaaaggcccttgtaaatatgtgtcaagtgagtgaacggataacaatccttgtctccctctacctgtcacgtgcatgcccgctgggctgtttttctgtgtgaacatatacctgctctatgtgcctgcacgccactgtcttcaggtcacagtttccttagttcatggacatcccttgctccagtgtcttggctaacactgggtccagggcttctgctgtttggaggatgtaatcctgaccttaaacctatgaggccatggctgtcagcacctaagctcacaggtaatggagcgacacagcttaggagacttctgtgagagtccacaggccgtccgtctggaagatga

SEQ ID NO: 253292 - DNA, 123 bp, Gossypium hirsutum
cgccacccccgtgtctcggagcggccagtctcgtcgtccctttgcccgtcgggtggggtgagatgccgggatcaacctcttcgaggcaaagcgaacaaacccccggcgcgaatcgcgccaagg

SEQ ID NO: 253293 - DNA, 404 bp, Gossypium hirsutum
atgggagactgacttattgtcttcttccttggtatttctgtgtacatttgtgctgtccttttatttatggtatgttgatttttagaatgagttgtgaaattttttgggacagtgtaaaaatctcttgttgactgtggaagaactcttttctccagagccatttgggtctggttccctttaaaaaagttatcttttcaattttctgtattattattgatttatttagttttataagatgaaaagtaaattgcgatcatttaagttttcctagaaaaattattctttatgttcagatttccacattgatacagagttaagcagtgccatagcttctttgttggtgttgttgttttgttttgagacggagtcttgctctatctcccaggcaggctggagtgtaatag

SEQ ID NO: 253294 - DNA, 429 bp, Gossypium hirsutum
cacattccatcctttgtttttgttttgttttcttttctcttaaaagaagataaaaaaaataaaaggaaaaagggaaaatttaaaggaaatgaaagattcttgaaggcatggcttcggattcttcgttgattgattaagtttattttattttttaaagttatgatcttttattaaaggagggctttgtttggattcgaaggggcaatcttgataaacagatgggtggtgttactgttgatgtcatgtggtctcttttcttttctgctgtttggcaaaacgaaaggcgagctctctttcttcttttcttcttcttcttcttctttttgctgtttaaatttgggttggactcgattttactgtcatttccagagtttatggattggttttctaggtaaatttagtctcttttggtttttttttaatttttaa

SEQ ID NO: 253295 - DNA, 237 bp, Gossypium hirsutum
ctcttatttgttattcttttatcccaatcaatccctattgatattattcaaacccggtgcgtgtctaaacctaagacttcatgccgatcgatcttctctgagtttaatattatctaagacttcttctggaggaaagcacgctattttcttcttaagaactcttcagtgctttattgacacctctgttcctttccttccctcacaagctctcaaaatctcccttccatcattcaattc

SEQ ID NO: 253296 - DNA, 430 bp, Gossypium hirsutum
  unsure (1)..(430): unsure at all n locations
cggacgcgtgggcggngttccccttgatccacgttagaatgtagtcggtgcgggtcagatccgtttttccgccattgttatcgagctttgacaagcttaaacccaagcattccacatctgctatttttcatctcatctcgtccctccttttttttttttttggttcttagccaaatctgttcttaattttgaacgctcaagattaccgtacaaatccatttataaaaagcagtggataacatgtttttgaacgccgggaaaaaagataaagcaatggaagatccaagccaccgaaaagagcggagaatcatcaatacgattcgtcttttataatttcctataaattaatctcatttccccccctaaaattcaatctccattctcatctctggttactttctcaatcatctcagcaaaaagatatggatac

SEQ ID NO: 253297 - DNA, 268 bp, Gossypium hirsutum
  unsure (1)..(268): unsure at all n locations
tgnttgattacacgtccaataccaaactttgggatagtatcttacccaaatgttgtcttctacaatattttagattctaatgacaaacactagcctttgtgtttctcattgattttcactgcacatctccaaatcttattcctacattctttttttccacatccaaattccaatatcaatttcgtcatttttaacatattggaaaaagattgaggcatngcctgacgactcaacctgaatttgactatttgattaagttgttactaat

SEQ ID NO: 253298 - DNA, 378 bp, Gossypium hirsutum
ttttgaaggagaatccctacctacacttgagtttcatttcctagccttctctttttctaaggtttatatataaacagatgacaaaaccaggtttgggttttgttggtatacatggagcgctaccctcatcagttcatatatgataaagtgttgccttgcctattgcagtttgtggtatagggacaatgaatcttgggtggtggtggaggctttttgcaggtgccttagctggatttctcttctttcatggctttgctgccactgaaacaagctcgaactactcgttcatgtacgatgcaacatcagcttcaacattatcatattacgactacatcattgtcggtggtggcacccgccgatgtccattagctgccacat

SEQ ID NO: 253299 - DNA, 388 bp, Gossypium hirsutum
aaaaagcaaaaaaaaccctctgaaatttcccagacctctgagctccggccctgggccgatccgcttcgttcatcggacctccgtgttcagccccatgcgcatcaccaactccgccacacacggtggtcgggatccgaaaagcttcgctttttgcgacgaatctaaaggcgaatcgcaaggatttcgttcgagcaccaatgactgcgcgctgatggggccagtgttggattgtagcgcatgacaattctggcgtgattcgggcgccgatggtggcgcgatgcatggtggcgaagtcgaggagtcacagcgcactgatgaaggcgacgattgggccattggacctgaaaagtcgtgacatttggaacctcaaagcatctagaatccccct

SEQ ID NO: 253300 - DNA, 374 bp, Gossypium hirsutum
gaaacctcacccttccaaaaaatggcgttccttaacaagcggtttaaccaccattcccaacttaaccaccaccaccaccggtaaaaaggtttaaggaccatgtccccattcaaccttaaggtttggccacaactggttaataccaatccgcttaattaccaggattcttttaagaatcctccatatatccttcctttcaatgtggggggtttgacccgggtccggttccgtgacagatgggagtgatggggagctgagatcaatgaacaatggggtgagctaaagggagaagtaaggacagatttttgagacattacaatattttgtgctttttagccagcagctgcaggtagttgactgcatacatatatgat

SEQ ID NO: 253301 - DNA, 341 bp, Gossypium hirsutum
attgacccttctgcttaataatcgaagaaaatggcgatggtttcgatgaaattttttgtcccttccttaaattctcctaatctacgccccaccaagcgttactcaggcatggctgttgcagcttcaaaccaggatgctgttgctttgggggtcacagtaacacaaggggaaggcaatttacccaagcttctcctcacttctgatcatggcagtgaagctgagatttatctatttggtggttgcattacatcttggaaagttccaagtgggagagaccttctatttgtacggcctgatgctgtatttgacaagaagaagccaatcagtggaggtattccaca

SEQ ID NO: 253302 - DNA, 327 bp, Gossypium hirsutum
ccacattcccaaaaataattatcatatcccgatgagaccattcaatgcttccaaagacagaccccagctcacagcatcctctccatcggttatgttcctcccaatccctcagtcaggctccctctctctttgtctggtaaggtccgtagaatccaccgcataatgaggcactagtctttccaggtacaattcttctccacgttttaaactctcttttgcgattaaatgtgtcgtctgattcgctgatctttggatatacttgaatcgtatggtttgagaatttgttgcgaactgcttgatatctctgatgtatgcccccgatttcta

SEQ ID NO: 253303 - DNA, 334 bp, Gossypium hirsutum
cagagaatcagactatcaaattattatcaaaattcataggcatagtttaaactatttcataatcttgagcatagaataaaaccctctttgtttctaaagccttaacaaaagttaaagaaaaaaaaattcagatcaagacagcaatgtgcacgcaaactgcaatggcaattcctttcccctctactcctacagctgcaaagatgaaaaataaaaaataaaaagagaaatggagatcctttgaagagcacttttgcggcgctttatctataccagattgaccttacagctcatcatgtacgtttttttcaacactgtctttgcttgcgtctgattt

SEQ ID NO: 253304 - DNA, 356 bp, Gossypium hirsutum
  unsure (1)..(356): unsure at all n locations
ttccgccgccagttgaatccactgccatcagtccaccgccgcagctgattcttcagttctcttatctccctgctgcctctaataaaaataaaaaagcttgtccattttgaaacagtgttgttatttttaacgattttttgaaaaagcggcaacgagatggatattaatggcaagggtgattccgtggatgagctcaagggcctccgaattactaaccttgacgatgatgacgacgatgacgatgacgaaaacatcgctgntgacgaggatgataatggtgaagacgaagacgatgatgaagaacaggaatctgtaattcttgggtttgtagaaaagcctgaacacaactggtcact

SEQ ID NO: 253305 - DNA, 410 bp, Gossypium hirsutum
tcgccctaccaaattcacgtcccatctgaggcgccacaccgaagtcaccaactgcatctttgttaggtgacggcgaataaccattagcacaaccagactgccgccacttagccacagaaatggaccttcaaaatcgcagttgtagcaataaaaatagtgttgagctatgtgcccaaaccgaccgcaaatttgacactggattcgagagcgaaacccacgatcgcgcccaccatgtaaacgaccacctcgagctgagtctaccaccaccggtgacggtacagatttcgtaaggttagcctgaattgaaacttcttgaatcatccacgattgtcgatttttatactctagaagcacgttcacaagacattgaagaggcaatggtttagctagaaatgacaccaaaagtacca

SEQ ID NO: 253306 - DNA, 383 bp, Gossypium hirsutum
cgtctcgaaactattattccttgtggcttggtgcctgggtattggctcggatcacattgcagtaatggaaattcttaaaacaataagagcttccaatggattttctgttgctataattttaaagcctttcacctttgaggggcaaagacgtcttgatgaggtcaaggatttggcaggaaaacttcaagagcttacaaatttttgtattgaaattgacactgactccttgctaaaaaacgaattggtgactctagacgaggctttgaaaactgccaataatgctgttttccttgccataaatgctatatcagttgtcataagtgaggtgcaaataaaacttattgatgcagttcatgataatatgaaagaactaggagtttcag

SEQ ID NO: 253307 - DNA, 326 bp, Gossypium hirsutum
tcgagatagataaaaagtaaagggcgagagaaactgctgcgcctaactcttcttcttatcattagaaagtgacgaccctttttgttttcgattataattttgataaaattaggtttttggtgagcaacaataagaaacaatgaatgaaaaactgatcggttagggctttcgaattgtgatgaattagggtcttggaacggattaattggctatggttctgttattgaaacattagtttttttattcaaccaggttaagattaaggtttatttaaggtggatacaccgtttggccttgaagtagataaaggttgtcttgggtgagtt

SEQ ID NO: 253308 - DNA, 324 bp, Gossypium hirsutum
gaggcattaagggcacagatggaagtacagagtaaattacatttgcaacttgaggctgaaaagcacttgcagattcgccaggatgcagaacgaaaatatatggccatgcttgagagagcttgtaagatgcttgccgatcattttattggaagtggtgcagttaccgaaacagataacctggaatttggttgtaagatgctgagaaattattctgttgatccactgggattttactcctcccaatccgctgaggtggagaatgcatgcgaccaggaagaagaaatgccatccggtctgcattcacagaggggcgatggttctact

SEQ ID NO: 253309 - DNA, 287 bp, Gossypium hirsutum
ccatgaaaatgttcctttcctgtctgttaccatttaatgacaaagtacaacagttgatcctttttctcttagaataaaacaagcaattaataaaagtcccatcaaaaatttttcaaccgcttaaaattttgttattactggaaaaaaaggtccttttttttgaactattttctggccaactaacaacaatggggcattgcctggacattcctggctattttggagatgctggtagtagagaggtccttcacaaagttggtgctgaaagagcttgtactgacaaaata

SEQ ID NO: 253310 - DNA, 324 bp, Gossypium hirsutum
gaagcataaggtatcgatctgagtgtgccaaagagggaaaagtatgggactgctttctaacagaatcgataagaagagcctgaatccaggggatcacgtttattcatggaggactgcttatatttatgcccatcacggcatctatgttggaaacaataccgtcatccattttacaagacgtggccaacaagttggtacaggaactgtgcttgatcttatcctggtaagctctggaccagctcaatctcaactgcattgccctacctgcactacacctgaagaaaggaatggagttgcttcctcgagctaggactgcttacttgc

SEQ ID NO: 253311 - DNA, 271 bp, Gossypium hirsutum
tcgctgagccaaatggttccatcagagagcacatagacagtggtcgtgtggaaggtcctacttcatctgctgggcatccaaaagaggttcaagtagaaaagagggaaaagcaaagtgttgaatatggaatgtcaccaactcttagagagatagctagagagtctctagaggatcattctagattaacaggtggcattttgggtcctactgcagcaagcagaaaggataaaaagggaccaaaaggccacaaagcttcagaaattgccaaaac

SEQ ID NO: 253312 - DNA, 203 bp, Gossypium hirsutum
  unsure (1)..(203): unsure at all n locations
tcgctttttagagttgtcaagccttttttctttaactgcaatgtaacaagcttttcttttcttaaaggtacttgaaaaaggtgaagatttttctgttctttttttctgaggggtgggggagggggcttttgtgtagtttagactttagaatttntgggttttngagtagtttgattggatgagagtggaggaaaattggagtg

SEQ ID NO: 253313 - DNA, 181 bp, Gossypium hirsutum
ctgagccaaatggttacatcagcgagcacatcgacagtggtcgtgtggaaggtcctacttcatctgctgggcatccaaaagaggctcaagctcaaaagatggaaaagcaacgtgctgaatatggaatgtgaccaactcttcgagagatagctagcgcgtctctagaggagcatgctagatt

SEQ ID NO: 253314 - DNA, 427 bp, Gossypium hirsutum
  unsure (1)..(427): unsure at all n locations
tcgcccacgcgtccggccgtatacgtgaatagtaccgtaaacggtcgtattccccaagtacgaacctggctctggtaccaattgttgcgcggaagcgtgtgaaagagtaaaattattgtactgaaaaatcacactaagttcaattcccaggaaagggaggtggatcacgaggatcgcttacataccagatctttcctagccagaatatccctctatcgtaatttaatagcacaataaatcactacaatgacacttgcaaaatatgcagaacaaaaataaagaacacttgaattttaacgaggttcagcaaattttgcctacgtncttaggcactaccaaatatatttcactccaaaaatacaagtgaaagtttacaaatagggagagagaacaattgccttaagtagagaatggcaagtgtgggatg

SEQ ID NO: 253315 - DNA, 224 bp, Gossypium hirsutum
tcgcggacgcgtgggttcaaagaaaaaaaaagagctttatttttttttcctcttctatttttttggtgggttttttttttgtttggcttcgatcaaaccctaggttcctgccgattatacgcatgtggacgggcctaggctatgcgggtttccgcatctaaattatggatttagaagattcataccttgctcaagagattgcaattgccctttaaacaagatac

SEQ ID NO: 253316 - DNA, 331 bp, Gossypium hirsutum
tttattttacttgggatcaggagattccaaagcgtggtaaaataatctttctttgttgatttggtctgggacataatcctgtagttgtagagtcttagtcattagccatttaaagccactttgaactgtgtactcgcctgatttgtccccttaccatattataacatccggttgagtcctgcttaccaatgggatagacaagattacctcagcttgatccctatccagggtgggtagctaagaatcattccagatgtttcttgaattcaccgtctctatcctacagtctgttttttcttctaataagctttcgtgcgttttaaatgctgct

SEQ ID NO: 253317 - DNA, 228 bp, Gossypium hirsutum
acgatatgacggacctacagagaattcagaggatttatcgaaacagattggacattctctcagcagattgacttgattttaattttaacaagatttagacgcgagagaggtgcatgtggttaatacacaagataaagctaaatgcgtcacgcttgaagaatgtaagctggttgagaagcatatggcgaactatataatgaaactggctaaaaaaggtcaagagaggca

SEQ ID NO: 253318 - DNA, 111 bp, Gossypium hirsutum
  unsure (1)..(111): unsure at all n locations
ctatagggggaaaggctggggtacgcctggcaggtactcggtcttcggaattctctcgggttgacctcacgtcgtcttcggtcgnnaaatccgcttaagggagggtgtgta

SEQ ID NO: 253319 - DNA, 368 bp, Gossypium hirsutum
  unsure (1)..(368): unsure at all n locations
cttgatcataagtgtcaagctgaagaatctcttagtagggacgtagtactttttgggttcaatagaagataaagtccattccaagcgcatgccatcaaaatcatccttgatcctgcaatcaacagggatgctacgttttggtggtgtggtgggatcactggactcatcgaaacctacgagaaggctatcgctggagggtccaattatggtgggcaagtagatctccgcagctcgaaacaattggttatcgccagcgtgccatcggttttcgattatgaaggtaaagtcngatgagaagtaagcagaagtaaagtcgtaaatcatagagaagatgtagtttgtcatcctttcanggagcatttcattta

SEQ ID NO: 253320 - DNA, 344 bp, Gossypium hirsutum
cccacgcgtccggctcgatgtcctggaataggagaacggaaggtaaaacgtttgcgcgatacttttcatgaacccttcaagcgcatagtttccagtaacccttctgttccggaaactcctgtatgcaaagatgctgaaccaagctcagcaagtgaaatcatagaagcagacaaggatactgaagatacgagcaaacgtaggaagaaagaaaatgaaattaacattaaatcggctctaactgctgcatttgccaagtatgctggtaaaaatagtaaaatgaacaataaatccgagggtaataagggaggaggaacccttgctgctgcagtaccagaaccagcaac

SEQ ID NO: 253321 - DNA, 388 bp, Gossypium hirsutum
  unsure (1)..(388): unsure at all n locations
cggacgcgtgggctggaattacattacaaaaggtttttatctttttcttgcgttttcttttttgtccttattatgtttatatagtggagggttttagaggctagaacactgtaataccatatagtatatacaaaatatgaaacagaccatgccattatttattgaacaggtaaaaaaccaattattttttccctttttcttaaataaaagaccatgccattaangtanatgccattaaatatatttgttggtgagataggcttgcctcaataaaagtattgttttattcgattacttttatttacctcatgcttttcatcaacagtctaggacataatatgccttaccactgatttcctcaccaatttatctttaagtagctcatcat

SEQ ID NO: 253322 - DNA, 391 bp, Gossypium hirsutum
tagttatcagctttgtcccccttttttttctcaggaaaatgggtaattgattattcattcggttgaatgctggtgaggaaatgggatttttggtgaagttggattaatgaaatatgagatttagatttagtttgagcttttaagctttttgtgtatggtgggattggatgagtataaaaatattggaaaagtaaaaatttcttgaacgaatgaaggggtagtgattgattgtaagaacagaagaaggttttatcgaggtgtggattatcatgggttgcatttgttgtaagccatctgctattgaagatagtaagcagagtcctacgagtaaggtctcattagatgttagggtatcaatggcaacttcttcaggagggaggattcacagaga

SEQ ID NO: 253323 - DNA, 381 bp, Gossypium hirsutum
attttcaaatcgttgacaaggttttttactcttttttgattcctcaaattgtgatttcaggtatttacgttaatcctcaatttccataatttttttccctgttttatattttaattattaaccaatcggcccatcgaaaataatgatcaaatctccaattttcgatccctgccgttacttctagagttcctttcccccaattctcccgagatgcacaactacatccaccaaataatcacaaacgcttcaattcctcagccttccacctctgaaatcaacggccaagacggtcaaaacgatcggcaatgccatgggttctggtacgacgccgttctggtggttcccgcgtttctgttctttgtgtacctggcggtgaacgct

SEQ ID NO: 253324 - DNA, 425 bp, Gossypium hirsutum
  unsure (1)..(425): unsure at all n locations
atttccttcgccctttcttgttagtgttgggcatctccctctcgtcctatggtggtaagttcaccgtcaagtcttggaagttaaggttttgctcaaatcagaacagtggtttcgaaactataaatatgaagtagaaatatttattttatttctatttttaaggtttacaacatgatagaataattgtgtgaaaattttgttaataaattttattgattgagtgctcaatttgactagaaggactaaattgtaataggtgtcaaacttgatttctataagttaaggtgtctaattgctatgaaattttaaattggaagtccttaaatgataattagaccattatacattaggatggacaaaaatagacatggntagatgtcttctcaatgttttaactaaataaaatattcatctttctaatttca

SEQ ID NO: 253325 - DNA, 411 bp, Gossypium hirsutum
gtcccagaatttagtttctatttttgtagtgttttgttgattttgttggtgaatgatggatgttgtgactggggctcctccattcatgttggtcacgagataagccttgcggtgccattggaatatagtgatgggttcactgggagagctttcttgatggatgatggtaatggtcaggtggaaccaaaatttagagttgcattgagtgctgaagctaacaaagggggatattcatgctccttggaagtttttttaggggatgtcaaagtatggaattctggacatcactcccagttttacaccatggatacatgcgtacttgagcttactgaagatggggatttactgttgaagggtgccgaagttcaagtcggatggcggaccggcacttctggccaaggtgtggagaga

SEQ ID NO: 253326 - DNA, 394 bp, Gossypium hirsutum
gagttctccctttctctctggaaaaatcccagatcccggccaggaggagttgccggaccaccgcagggtcaccgctggccaccgcgcggtgctggagttctgaagtcttagactgtccacattgattttttcttgtgtgttatttgccttttttttcgatttttgtttctttttattctttcttgtgttttgaatttttttgtatttttattttttttttaatttttgactttttttaatatttcttttttttattttttcttttttttgtatatttttttatgttttttttttttatttattttattgtttttttattttattctattatttttttttcttttatcgttttttctatgtttagttatgtattctattcatctttttttttttt

SEQ ID NO: 253327 - DNA, 265 bp, Gossypium hirsutum
agaaaatgggttggatggggaagttgaagcgaagggccttcgatcaagttaccgccgacttttccgttttttggttttcgtggccggccaccagaattggccggtgggaggctgattggcccccattaatgggggagaactccttcctgtgaattacaaaaagggccttggtctcttttacccaaacccactttttctttatgacacacactcccttgtgtttccctccttttaccctctccttctctttgagtctcacctcctc

SEQ ID NO: 253328 - DNA, 366 bp, Gossypium hirsutum
ttcaaagtgaagaactgtctatcagactattgccatgcgttagggatacatactggagggatccctaatttttgagggagttttatttcatttaatgaaggcattccagtgtggttttcttgatgctctggaatttcttatttaatgtttttggctgacttatttttgtttgttcggttcaaatccaatttatgaccacttccatgatgataaatagggagttacttttcatgatgacaagaaattggttaagttgcttggactttcgggtgcattattctgaacttacatgggcgtgctatcttaagccacaaagcaaatgtttaaggaagttttcatggattttgatacatgcctcttttttta

SEQ ID NO: 253329 - DNA, 432 bp, Gossypium hirsutum
gttattatattagtgcctttattttgttatttttggttctaatgtccacttcttgccttagctgtctttatagttttatgatctattagttcctctattttttatatgataagagttgccacgtgatttgctatcttgcttctatgggatttcaagaaaaatatgttgttgaatgtacttgctcttttaggttcgtactttattattatggttatgctttttattccgacactttatgatttaagtaccagtgtccggaacccatggatgtgggagaacttggaaaaaaaattgaacatactcatctcagacatgccttcatacccatatctgacatgtctttatactgacacctaacactcatacctaagtccgggtaacatgggttttttctttttcaagttctaaattgtttacaatagtttttttgtt

SEQ ID NO: 253330 - DNA, 142 bp, Gossypium hirsutum
tcataaaagctagcgcttgaatatggctgagagacccattaaaatggctgtgggggattctatcaaactacctgtttattactttctccctctagtaaagcaacttattgataaataatacctacatcgtccatatgcacaa

SEQ ID NO: 253331 - DNA, 164 bp, Gossypium hirsutum
ttaaaactatgcagctttcttcagcacaaatccacgggctgtttcagaccagtggtggctattaccgtcctttattgagcggctgcttcctgtacttcgagtcactattttggatattacgcgtctacctttattgcaaaagacttggctcagatcttcaataa

SEQ ID NO: 253332 - DNA, 313 bp, Gossypium hirsutum
  unsure (1)..(313): unsure at all n locations
ggggacgcggcgcngcngaccggccgaatcccggtcaccacgcgtccgactagagatccaaattaccaaaacggctccgcgctctgtgttgatcgcgctagactgatttcagcctatcttatcgagtctcaaagcgccaaaaggcggagcgtgtacttgatatagaaagctctggtccagaggaatccaatcgagaggacaaagactaataaacttgttgcgagccatcatccttatgacaagaagacactagcctacattctgaaagagcatcacaattgactgagcatggatcttaacactgatctatgtt

SEQ ID NO: 253333 - DNA, 211 bp, Gossypium hirsutum
tgtttataaaaaaccggctcttttcatgcggtgggtaaacataggggcgggagcgactagctaatcttcattttctaacgcacataaagtaaccttaggcatatcatcatatccaccttaatttttctatttgccggttcagcatcaggcattgatatgaatacttttatacacttgttctgcaacatcaattcactgttattatttgccc

SEQ ID NO: 253334 - DNA, 292 bp, Gossypium hirsutum
agctgtttattaaggaaactgggaagaccaagtacagaaaaaaaagggaagatgagcgagattgaagctaggtatccaatttcaaccatgcgtttgcccatgatacatatcgctggtgttaaatatctgcaaagtacgaaatggttcgagagcgaatgacttaaatgcggatgggaaagagttggagtatcattaatccagctgtgactccgctattatatcatttgatgacattttgctctacttgtacaatccatggtgcggatactgataacgtcttgtcacccagtta

SEQ ID NO: 253335 - DNA, 449 bp, Gossypium hirsutum
aaaagaaaaagaagaaaaaataagtcaaaaatgattacagtggacagaaaagaagcataaggactataacaaaagtaaaagggaggagaaaacatgtgtcataagaaaaaaagaaataaaagattatcgaaaaaaaaagcaaaaatataaaaatataaaacatatggcaaaaatattcaaagaaggataaccatttaacaaggatcagagaaggttagaaataacaaagaaatgaaaacaaaaagaatagaaataacaaagggaactaacgaaaactgaagaaaaatagtacaagaacgcatatagttacccagagagaagaaagagaggaataagaacccattgaaaacttaaaaaaatcgtaagaaacaaaagggaaaaaaagttgtactaaagaaaaaaaaaatttaaaggcgaaaaaccagaatgaaaattaacaagaagacaaa

SEQ ID NO: 253336 - DNA, 358 bp, Gossypium hirsutum
aatacattctacttctttcttcatgcgggtcttcaattataactgacggggtgcaagaaccttaattaaatatatattctatgaaagggaaatgcctatcacttcttttttgaatcaatgacctcaaggcacttatgttatcattattcttatgtgaatacatctatcattcaagctcatattaaatacccattattcatatttccgtttatttaacaaattatctacttttcaacttacactgcttaagacatgtatttccatattcatttttatctatcactctcactttagacacccacctttttatgctatgcttcttaaatccttattatctaatattattctcaacttattt

SEQ ID NO: 253337 - DNA, 236 bp, Gossypium hirsutum
tcttatatctctgacaccttataacattgggggggggttataactggaggggtgtgggcctcatcctccacctttaaatacttctccaaattatatcataatagacgatttacaaagactttatcttcattaccttaataaattcttttatcattacctaaaccttcattataacctctcccgacatttaaattatttatataatattctttttaatcttcaacccatttttcata

SEQ ID NO: 253338 - DNA, 237 bp, Gossypium hirsutum
  unsure (1)..(237): unsure at all n locations
ggccggccggaatcccgntcgacccaccgtccgtttattcctcctacggtacaatctgaggggcttttatagctgcgcgtcttcanattctataatcacaaggagacagtacatcaaccttgtgccattgcctgccactcttcaagtcaccactactgtcattcatctacaactggtgtattacaagctgcattgaaggctcaaagcagctctcaatgaacaaaagtcatcaatctc

SEQ ID NO: 253339 - DNA, 345 bp, Gossypium hirsutum
gatatccctatttgctagggttttggtgcaggggaggggccccattgagctgtgagtgcaccctcataatcggtgatccctatctccataaagtcaaggctcgaggcttattctcacttaaaggtccccatcttaaactccgatttcaacggaggagacaaagaccccgatggtgcatccccgaaagtaaacctctctcctatctctttttattctcatacgaaaagatttggtgcaaaagcgacaataaaaataaatcaaaacatgagaaaatgaaagctgcaatcaccttctatttttatggttgcttttggattcttgatttcagatgcctatcgtaatttt

SEQ ID NO: 253340 - DNA, 156 bp, Gossypium hirsutum
gttctggctcatgtacagaagagttgtgtatcgttgtgatctgcagaccaacgcgattcaattccaaatggctttatatggaaatttttatgtaaaatgaattgttaacatttaaaaatatatcaggatcctgggagatgatctggtccttgttcc

SEQ ID NO: 253341 - DNA, 430 bp, Gossypium hirsutum
tgtactcgtggggttataaccctataacgtgtgtaacatgaacagactctggagagtactatacttaatacatgggcagtacgtacaacgaaacctgatgctacaaaaattgatagagtttcagggctggttactgggctccgagtacttaatgctctatctgactgggcacttgttgagatgcttcctaataaagaggcttttgcctcttgccaaactgaggatagtcaggcaactgctccctcctcgacttttgatggggaagaaatgtctactcaaaactggtttgggaatttataatatgaactgttaattgatcctcgtcattagatcctgtgcataacaatgaagaaacacatgatcaagtgctgaaaaccagattggaagaaaaagttgaacaccttgaggaaggacctatgatagaaaaact

SEQ ID NO: 253342 - DNA, 336 bp, Gossypium hirsutum
atgcggggactgcgcgcggactgactgggccaggagctggtcgccggcgcgtgactgcccgaagacgcggacggggcgctactgacgattggcgccgcgctggccaaacatcatctgttgatgtggattacaatgcttgttgtcgatgagatctatcttcaaatatttattgatctgtcacaatggcctttatatagaggtctcactgatttatgtattactgctctactactaaaacatatattgcaacggactttcttgtgtgacatctatggctacacaatagtactgtacatctatgctttggtaatttcatagaaacacacaggagctgta

SEQ ID NO: 253343 - DNA, 202 bp, Gossypium hirsutum
tcgttttttttgaaccataccctactctcgggtggggttcaatttgtcaagggggacgtgtaccatacttcatactccgccactccactcaaataatcttattccgatacatcttgcttgatatacccttattctaactgtacaacctatccttgattctatattccccacggttcttccctttaaatctcccataattgaa

SEQ ID NO: 253344 - DNA, 165 bp, Gossypium hirsutum
aaaatacgtttcctactatttaaatctgatggtaaaaataagttgaaaagggtcatgaggctagtttgtggggatttctagtgcaagctcttatacaaaaagtttagcctaagcttttacccatttaatgtaacaagtcattacaaaatgaaatattatattatt

SEQ ID NO: 253345 - DNA, 456 bp, Gossypium hirsutum
attcgtggtgagaagctgtcaaggagtagaaattggtatgcctagaagcagatgttaaaagcagtttctcttcagaacatcttttttcataccacttgataagcatcttgaaacaccatggctgtagctgcagtaaaatgggtgatgtcaaagagaactatcttgaaacatttatttccaatccaaaatggagctttatattgtgtttgtcataaatctacgtattctcctctaccagatgactataattgcaacgtagagcttgctctgacttctgatggcaggacaatagtatgctaccacccttctgtggacattccatatgaacacacaaaacctgtccctcggccagatcctgtgcataacaatgaagaaacacatgatcaagtgctgaaaaccagattggaagaaaaagttgaacaccttgaggaaggacctatgatagaaaaacttagc

SEQ ID NO: 253346 - DNA, 182 bp, Gossypium hirsutum
atcataatgaacacaaggtaccggactcaacgggcctcctttttctagaaaagcgcggacacacattccggcctcatactccctcaccaaatgcaaaattctacagctccatctcaatgtaccaatctatatacatcagatgtaacttacctgcacaaggctcttgctcactcccacaggga

SEQ ID NO: 253347 - DNA, 279 bp, Gossypium hirsutum
atctgttctctaacacacactaattatctttcactgcgttcaacttatacaggccgtcgaggcctattaaaatttttcctagattatgtcttgattctcttctccttgagcgtctctcttataactatatacataaatccaaccttagtttcacatgtctttccttcacctcaagtttttacgtcttgttgtagatccttttcatcattgttctttcccacactttaactcctttatcacactgattttcctgtacttctcgacaattaatcaatttat

SEQ ID NO: 253348 - DNA, 400 bp, Gossypium hirsutum
cgtactttgcctaagcagaataaaaaggggggtctcacggggtggggggggggggtcctacactcttcaaaatcttaaaccctgccccaagactctcttccttcaaataccccccccccaaaacaaaaaaaaatggcgactgtagctacaaccaccacatcgacggcggcgacaactgaaactttcaagccctacactcttgcccaaaccctagccgtgcataaaaacgccctctcatccgtcaaattcttcttcgacgggaggcttcttgccttcttcttcggcgacaaaacccttcgtacctattctttcttccccaccgctttcactctgactcctatccatgaatactccgggcacgaccaaagcgtcttcgacgtgggcttctcctcccactccc

SEQ ID NO: 253349 - DNA, 220 bp, Gossypium hirsutum
  unsure (1)..(220): unsure at all n locations
tcttcttcatctcttcatattggttntttgggggancactccacggcggcgagggccggtgaatttagttaatccctcacacaaattctctctctaaatcttaaccaataatgtctccaaaaaagactaccctttttgcccatttactctccttattcaacaaatacggcatcacattccaaaatatattcgctttttttatattcttgcttttttcatt

SEQ ID NO: 253350 - DNA, 181 bp, Gossypium hirsutum
gagaaagggacgtcactctggatatggtgggcgcaagggtacaggggaggggtggttgcccacatagatcttgtggatgagaaggattcgtgttcttagactcctactcctcaagtacagggaatcaaataatattgacaagctcatgttcctttacatgtacatgattgtcatgggttat

SEQ ID NO: 253351 - DNA, 145 bp, Gossypium hirsutum
cccacgcgtccggctatatgttatttatagtagaaactccttgatttacttttattcttgtggttattacaaaggagatttttacacaaggatggtaatggaacggagcgagagcaattgcatgaattgtctcatccatttattt

SEQ ID NO: 253352 - DNA, 336 bp, Gossypium hirsutum
gttaattccataagccccattctgccaggggggggatacaatcgctgtgggggggcaagaaagtcggatcagcctcgatcataggaggttatttttaccggtccaacaccgatccttgtatgtatggaaggtacttgaacgcatattagtatgccggtgcaatatgggcagcaaccgaagaccctgaaaacagtggctacttatcaactaacactattccttttggttgtgcaagagactcccctctagaatgcatcaccgagccatcaagcactattgcagcattgggttacattgactcattcagtcatgacaatagcaaagatactatacttg

SEQ ID NO: 253353 - DNA, 391 bp, Gossypium hirsutum
  unsure (1)..(391): unsure at all n locations
agagaagtcagataaagaggatgatgtagaagatgccaaagagaaggagaagaagaagaagaagaaagataataaggataaggagaaaaagaaagaccagaagtgtgataaagaggatgaggaagaataaggacgaagagtgtaaaaatgatgtagcggaaaagctcgaggttagtgaagttggtgagacaacgaataaagaagagaaaaagaaaaacaaggatccagaggtggtagaagaaggtgacaatgttgagacggaagagaagaaaaacaaaaagaaggataagaaaaaagatgaggtagaaaaatttgaaaagaagaagaaaaagaaagacaaggaaaaggaaaaggagcacgaggttgaagaagatgaanggacgggaaagaa

SEQ ID NO: 253354 - DNA, 363 bp, Gossypium hirsutum
atagatgtcagattatgaggaggaagatggagagaccaaagctagggtatggggactagacatcatgttgcttacggttatgcgatcaagaaagaccagtttcgtttaacattggtctacgttgaataaggtcatatcgatataaaagcggattcggcttggcactcggcctgtgactcctgatactcatcttaataggctgagagttggatactcatactgccaatactgcgacaccaaagcatctcatgttgctctgtgcttatgagaaccacatctagtgcataccttcggccgtgtgccaatgcatgaaagcctttctgctaaacatggctgtgaactggtcactgacccccctgaaca

SEQ ID NO: 253355 - DNA, 100 bp, Gossypium hirsutum
  unsure (1)..(100): unsure at all n locations
gcggattcctctggtgatgtttcacaatctgtcatactttccactgtagagtccagaatgaggcanaaacaagaagcacagcagtctcatggaaggaata

SEQ ID NO: 253356 - DNA, 144 bp, Gossypium hirsutum
tcttcaaatgaggcctttcctgatgacgtcggaaaagctaaaaatggaaggggggcgccattgaatgatattgaaaagtttatgaggcaattcgctgcttaacctgcactttcccaaccacaagctcattttgacaatatattg

SEQ ID NO: 253357 - DNA, 456 bp, Gossypium hirsutum
atattccttgaaagaaaataaaataatctgagattaaaaaaaaaaactgaagaagcttacggcctttctggtggtagtacagttgaaagacactttcctcttctctagcttcccaaaccttttttctgatcctcagtctttgggtttcttttatcctttgacttctccccatctttttgatgattcgctctgttgttgttggttttggacattgatttatagtaatcatcatatctattgttcatcttcctctgttagatatggaggctatcaagaagcaggctaccaagctcatagagcaagtttccaaacaacagcaagcagtacttaggcatcttgggcattttagtatgaagacgttactgttgatgaagctgatcttcaatgtcatcaaaagctttaagacctgtacagatctacaaaggcagctaaacatttgcagcggaacattgttcg

SEQ ID NO: 253358 - DNA, 357 bp, Gossypium hirsutum
  unsure (1)..(357): unsure at all n locations
tgattttatccgttttcttggtcgtgaaatttgaataccatagtccatgggattaaaattctgtcatccttatcgtgattcatgaatcttggttataaatggagaagggtgatcaaggaaaagaggattctaaggatcggattagtgaattaactgatgaaattctatttataattctttcctttttgacccttaaagaggcagcaaacatatgctttctttccaggaggttgaaaattttgtggccacacattgttgctttgaactttgatgcttcaaatacattangcgagcttcggaggaatgggcgattaaggaaaaaaaagagaacttggtacataaactgggttaaccacg

SEQ ID NO: 253359 - DNA, 279 bp, Gossypium hirsutum
gtctttgaggggacaggtcccatgtgaacaggccgtgcacatgtcatagtcaacactaggagacaaagtaagccggtacgacagcggatgcagctcaagctggtaaaggaaatctggttacaatgcctaagccgactcccactttcttaccaaagcgttacggatcgcggattacgtagcaggcacctctaaaatagtcacaaggttcaccaaacacgatgccaaccctgaatacaactcaaccatgaggcagggagcaccgttctgaaaagcagaatg

SEQ ID NO: 253360 - DNA, 147 bp, Gossypium hirsutum
gtatttgttcactaccgcatagataagaggaggcaaacaaagttgaactgggcttgcagtataagcgactacgaaaagaaatatgcaagagtgcatgacagcccaaattggtctggcctgaattgccgcgggtaactcaacatgaaa

SEQ ID NO: 253361 - DNA, 393 bp, Gossypium hirsutum
caacccgccacacttgcggtcaacatcactaatcctttcctttcatttgtttgtctctccgaacttaatttttcaaaaccttcgaaaattaataaaatttcaaaaaaaaaaaaaaaacagaggacgaattggagtcaatactcgactgacatggctgcacttcggcctcctagatcggtctcctcccgagacagttctgatggtagcgagaggttggacggtgctggtagctgggacgcccttgaatggaccaaaattgagccggttacaagatctgtttcccatgttaattcggagtttctgcttgaagctgagcgagttatagaggagggccatggagttgttcttggtaatagaaatgaggccggaaacttgttcgttaccaactttcga

SEQ ID NO: 253362 - DNA, 194 bp, Gossypium hirsutum
cgcttaatagggaaatactttgaggagatcagtcaagatactgtgaaggacggttcaagcacaacttaaaccatcactgccgaataaacgcttctctttactacagtcgtcaacaccatgcggtggccgggggtgaaaagtgtggggttgttggtggtttctattacaatactggcggtagactatttacacat

SEQ ID NO: 253363 - DNA, 355 bp, Gossypium hirsutum
gactcacgcgttcgttttaaaaagggaaaagaaaatcaaagtgattgggtctttcaattgagcccttcatttctctctcattttctttcttcccatacaacaattactgatgtaactgccacttcaccgatgaccatctgtttaccgtggacgtgggcgaagtggctgttgatgacgtcacttcctctgcttatttaattagattctgatcctgtgatccaacttctgcctactctcaatctacattctctactgctattcctgttgataacggaaatggtaccaatggattttatcttggatacaatggcatatccactttttgatttgtaccggtgctttcttccttctactg

SEQ ID NO: 253364 - DNA, 290 bp, Gossypium hirsutum
ttctgtctcatccgcatacccgtggatatggttgggcctttccaggggtgtggaggctgttccctcttattcagttcttttattcttttattctcataattattattctaaaatattcctttccgtatttttttactttcttttcatacccatacactgctttttttttttatggttgctttcttcttcacaactactattcttttctatgctctactaaacacgtttgcttttaattgcttatttcaatttctctttttcatccttttttgccatttcctctctatctt

SEQ ID NO: 253365 - DNA, 326 bp, Gossypium hirsutum
aaaaataaaaaaaaaaaaaaaaaaaaaaaaaaaaaggaaaaaaaaaaaaaagaggaagaaaaaaaaaaaaaaaaaaaaaaaaaaaaaaaaaaaaaaaaaaaaaaaaaaaaaaataaaaaaaaaaaaaaaaggggggggccgttttaaggaatcaaattttaataccgcgtgcttggaactttataatttttttttagggtacctaaatttaatttaacgggccttttttttaaaacgtgtggattggaaaaaccttgggtttaccaaattaattcgctttgaaaaaaatccccttttggcaaggttgggttaaaaccaaaaaggcc

SEQ ID NO: 253366 - DNA, 378 bp, Gossypium hirsutum
gagcttctaccggctcctgtcatgatttctgcaaatatggaaagaagcatgaatctgaagagatcgctagacatcctttccggaagaggattgtggaaaagctgtgtgatgagccaaatttatttcggagcttagacttagtgcagaggaagcagacatccacaagtgaatccaaatcttttcccaatttccgatctcatacccctgatatgcctgacactatcaagcttcagttgcccacttgctctcctgatggaaataattctaggatacatggtgttcagttgaagaaagaaaagacatcagctgcaaagcttaagtccaaacatccacccaattctcgtagtcgtcacaaaagctctgatgttgtcacgcctg

SEQ ID NO: 253367 - DNA, 241 bp, Gossypium hirsutum
gcgctactggcaaccctttgagcacgccttttgggacttctactatgcgcctgacagcgacttatacctccccactgatgacgacagacgcgggcagctgctacaaaaaagcatcgacatggcatccatgcacgcgcaactcgttaaaaacgaccgtgacgtgatgtatcataagactgatttcggaccatccactctgccattggcatgagggaaatggcacaatgacccaaccaacact

SEQ ID NO: 253368 - DNA, 240 bp, Gossypium hirsutum
agcaaaattaaaaaaattggctaagcctgcaggtgtgattgccctagcattggtggtgggtgttcacgtgagtgaatcagaagacggggtaaattctaatacaaaccatcggttgcgtctgtctgttgtcatgcacctgatccgtgtgaatctatggattggaaacataggggacgctgcacatgttcttcaaaatggcagctcgtagatcacgcacattctatcagttgtgagctctgc

SEQ ID NO: 253369 - DNA, 278 bp, Gossypium hirsutum
ttcacatcgtccgcacttactccctccgttcaggccatctttcaatgtgatggaggcaccgccctcttctttctgctacctttttcttaacacctcataagtctctattagtctttacaacatgactctctaatctatccaattcctaccctataactacaattaccgtaaggccatttaaagctgaacgcgccaccaaatcgaattttgccaagaggatatatattgcaaatgattaaccatgcatgagcttcgatttcggtcaaagagctcatcta

SEQ ID NO: 253370 - DNA, 254 bp, Gossypium hirsutum
  unsure (1)..(254): unsure at all n locations
nacggaatggcacangcacaaggagaagacgagccggagagacgggggaagcccgggcgagagcgcaaccagcgcgagcaccgaaagggaaacgggacaaaacacccgaaccgggacgcggcggcagacggcaaacgaagggagcccggagacgncggcgggggccaaaggaagagacaacgaacaaggacaacggacagcccacccgggaaacggcgcaaccggagggaggggacaacgggcggaagagcacc

SEQ ID NO: 253371 - DNA, 294 bp, Gossypium hirsutum
cccacgcgtccgcaacaatacaccaatatactactcatgattttcaggtgagcaattcaaaattcgccacgtcatcacatagtccctgtttttcaaagtatcgtccttggataaatttatccaaaaagaaaagacttattttatataaaaaagtagaaattaataaaaaaaaaccaaccggctagcacttgctataataaagaaaccagagggagattcaaacagaggaagatgaagatgatgaagagagaaaaaaaaatgaagtctcagatctgtttagctctttggaactct

SEQ ID NO: 253372 - DNA, 212 bp, Gossypium hirsutum
caacccccataataattctgggaaatatcgcttacgaggcgggggacttccaatccccaaaaaatggcagatcttatccacattactccaagaagcaatcgtactcatatagactgactatttctcattaagatccatcactgttataattacttatatccaaatatcaaggactactatcattatccttctaccataatctccatattaaa

SEQ ID NO: 253373 - DNA, 449 bp, Gossypium hirsutum
cggacgcgtgggaaatatggatcaacgttttctcatgttaatttgctatgaaatagcctgtagttttgtgttaggctcgaggttaggacctttcatttctctgtagcttctagtcaggctggcttgggcttttgagatgttgagcagttaaataggtgacaatcaaagataatgtgttgccctttctgttaacactagctgatatctgatatttgatcaacattaagtgaaacgtgataacaaaataacaaatgttttaattagaaaagcatgaaaatcttcagctatgattatagtgtttgtttgcaaaactataatctgaggttgaaagttttagctttttaaccttttagtttgatttctatttgcaaatgttaatttatgttattgttttctgtatgaatcatgcattcacctcgtcagttgcatgcgagaatgagctagtttta

SEQ ID NO: 253374 - DNA, 354 bp, Gossypium hirsutum
ctacgcttttttttttggatacaaaatttcctccttccgagaaagggccacctttattttgcgggggaatacaagccagccttcttatgaatattgggatattaacttgccttatatttcctatatcatctcttcttattataagcgctactatacactttataccaaaatctttcaaaagctgtttagatagatcctgtttaaccgcttcgccttttcttcatgctgaatataaaaaactccttttccgcttagcttatttattaatgcctagattattatcctatttaccactacttcactttttatcaaagcattatggtttacactttctctatgctatttttatttttt

SEQ ID NO: 253375 - DNA, 240 bp, Gossypium hirsutum
aaactatcaccattttcaactattacttatatcaaaatctaccaaatccttcttcttattatttcattccatctatctataaaattcttttactattcctatcatcaaccaacttcctttatacctaaatcaatttatcaacataaatactacatctttttattcatacttatcatttcttattcacattaatcacaattattatcctctataacatatcattatattcttctaactata

SEQ ID NO: 253376 - DNA, 270 bp, Gossypium hirsutum
gcccgcacctacccctccggaattactctatcgacccacttctacattttgttatctattcccctccgtgaggaaagggacacacttttttggtgtttaggaggacacaatttttttcttacacacacaacaaaaatccactacatacccttcatttctctaaatttttgcttaccaaaatactttatacttattaaccaatacatcatatttctatccaatttaattttgaaccatactacaaccttgattagtctaacttaattgacg

SEQ ID NO: 253377 - DNA, 154 bp, Gossypium hirsutum
tattcgtccttttaaaatatgtctctattgagtgaaaatatgcaaaggcggcgcgggggaaatggtaccattgatattacatatttcaagatatattaaagtttctgctggaggaaatgggcatgcccattggacttttgccccttaaatacat

SEQ ID NO: 253378 - DNA, 140 bp, Gossypium hirsutum
aatggaggtagagaatgcataaaaagtaagggtggaacagaaaaagaagcatggagggaaacactataagccaaagccatgggacgaagacccaaacatagaccgttggaagattgaaaagtttgacccttcttggaacc

SEQ ID NO: 253379 - DNA, 176 bp, Gossypium hirsutum
ttacttctatacaacactgatcgggaaccagttactaagcgaacgtggccatcaccttttaaacatgattttgaaaatttatgatgtcatttttacatcgaactactgaagaataatcaatctcctgcataaacattaaggttacagttcattaattgaacaaggatcctcactat

SEQ ID NO: 253380 - DNA, 404 bp, Gossypium hirsutum
  unsure (1)..(404): unsure at all n locations
tttaagctgaacaaacacatctggatccgggggatccgaattgggggtagaaggattantttcctcattgctcgcaagagaaattattattaatattcaaaggaagagctctactctctagtaactgttgctgaaatcccatctgaaggattgaagggtttttgcactaatgtcattgactattattattagtaatttattgatgtttagttctatgaaaaacttgcatttatttaccaagaaatttacccatagttttggctagttttatatttgtgacctgtgagacatcatttctactaatatttttgttaattgttgtcaagactatttaagctttgttcttgtgcaattgaaatttttctcatattttatagttttatttttattatttatattatttt

SEQ ID NO: 253381 - DNA, 400 bp, Gossypium hirsutum
  unsure (1)..(400): unsure at all n locations
gatttcattgcctgtaaatgcttcctcaatgtacggacaatctcagccaatgaacattccacctcagatcgccggctccggcgctgacatcgacgacgatgtttcagcctccgtatccgtcgataaccaccacatcgttacttacgaggctccctccctcgacgacggtggtggagtagacgacgtagccacccaatcctttctacgccactgccgccgctacttccgcctctggcttggatgttgttccacgaggcgatggtgccagccaactcactctatcgtttcgtggtcaggtctatgtgtttgatgctattactcctgagaagtttcatgcagtggtgttactggtgggtggatgtgaactgacttcangcccccatggtgttgaaatgtcatc

SEQ ID NO: 253382 - DNA, 237 bp, Gossypium hirsutum
actttcacgcgtttgtgtttcttccgcattctggatacagggagttttgaagagggaactgttgattgtcaatacattgtgccgtagaaaggtggaaaggtggctgtgcccgcctagatgaaacaagagaaggttgtcaatcctttatttgagaagcgttcaatgcatctttgcatttggtaggggctttacctcctaagtaaggattagcatcgacttgtgaagtggcctatggtt

SEQ ID NO: 253383 - DNA, 410 bp, Gossypium hirsutum
cggacgcgtgggcggacgcgtgggcggacgcgtgggcagggatatacagagggctcttctctgtcactaagagatacaacaaaaaaaaaaaatatagccaaaaaaaaaacacacacatagattctctctttcaaaaaaagaagaagaaggaaattagggttttttcttttgtggggttttgattttttgggggaattttgggggtttttttgggtgggggaagagagatgtatataggttccatgcgaaagtctttcaaggactctcttaaagtacttgaagctgatattcaacatgccaatactctggcttctgattttccaagggaatatgacggtgaatgccttcaaatgagaatgtcatacagtccgggtgcacaccttttcctatttttgggcaagggactgact

SEQ ID NO: 253384 - DNA, 233 bp, Gossypium hirsutum
aaaaaactcaattgaatgaatgtataaatcaactttctacctattaaagaaaaaagctcttttactctctccttctcttgatcaagcaaaatctggattcaacaaggacttcccttcaactaaaacccttttgattcgagaacaaaactccgggtctttttttttctttgcgttcttgaccagtgtttaatcgaaaatttgtagcttttttttttggggggggggtggtgagt

SEQ ID NO: 253385 - DNA, 365 bp, Gossypium hirsutum
tctatctaatcactaagacaatatcctattatcacgactccatcttccaaaaaagaaggatgtaaacttacaccacatatatgaaatgaactattcttctcttcaaatatcatactttcgtaatactgatctaactgttaaagctctcagtcctaaaagtataaactacacaacctcagacctatacttccttactacacaacaaacatgtctaccttccactaaaatactcgacataatcctcaaaatgctccattataccctgatactgactatacacttttaacaccaatgcagacataaccctctgcttaacaagttcctgcttatgatccaaatttacatgctaaaccatcctatgtatc

SEQ ID NO: 253386 - DNA, 229 bp, Gossypium hirsutum
ctctcatattgatcagatcacaacccttctggctaaggagcagaatattatatcagaaggggaacatgatcttgcaaacagcaagtcggaactcaccgagaaagataaaacccaaaacgatattttgcagcaagaggcaaatttaaagtcagacattgagaagcagaagaagcttgttgctcaatttaagaggagagctgagagtctcgcaaaggaaaaggagcaattg

SEQ ID NO: 253387 - DNA, 209 bp, Gossypium hirsutum
gataaaattcctcttttcctgccgtcaacgggcttaatctttgtttggggcccgagaatatcaacaatgactcgcggcaaccagagagaaaaagatagagttagggctcattccaagtcacgcaacaaatgaaaagctgattccaaggaccatggattgaccgctttactactccgtgaaagagatgcaaaggccttacatgaaaaggc

SEQ ID NO: 253388 - DNA, 447 bp, Gossypium hirsutum
cggacgcgtgggtttcatttcatagaagtcagctattccgaatcaaattgctatactgaaagaaaaggagcgaaaggcggcgataccgtccaagctgtttttcagtttttggcccttggaaaagactttggaggagaggagtggatccgctggtccgtcttgggctggctttgttcatctaacaacggctctaaggagagaaccttgtgaaaaaattagaaggggcaaagagtgtatgcaggcttttcctaaattcttgattgcatccccttcatttcacggtggtcgtggtgccctaccttcagctggtgggcatcccgcggatcttacttaccttgctggtggtgggtgctgatacaagcatctgtaagctgtgaatggagctatagtgttttattgttggtttaggaattaggactacttttatacagatggttactgtgaaat

SEQ ID NO: 253389 - DNA, 351 bp, Gossypium hirsutum
ggtgaagcgggtgcgcgtgccggtaccgaattgcaatttcggcccagacctacgcttctttgttgatcaagtgcgcatacctataggatacagatatggagaggcaaagaagcaagcacgtttgtttgttgatgtgggttttggatgctgacctttttctcccacaatacggatattgcaaagacctccactggccttggtgagcacaaaaactactattcagcttctgaccctcatgctggaactcccacttaaagttcacatggcacaccaccatcttcaggaggtggatcaccttcctcttattggaacccgtcacatgtaggtgggttccaccctttagcaacacca

SEQ ID NO: 253390 - DNA, 252 bp, Gossypium hirsutum
  unsure (1)..(252): unsure at all n locations
ttcttttatatgatacttccccctaaaaccagaggtgctcttctattatcagaaaatgcgnccccacccatacaattactccaatcttacacaatttaacttatttataccctaccccccactctttattaaacataaaaaaaacacctcttattatctttcctaataaattcccatccaacactagatatttcaaatccaatctaatttctttacacattaattatacattacatcaaatcctactttttt

SEQ ID NO: 253391 - DNA, 348 bp, Gossypium hirsutum
ggtctatccatctatatcttatttatccaacccatatttcatctcgtctttttttatttttttttgggaaccaaatctatctttagggttttaattcaatcattcattgttatttcacaaaggaatgacgactgctaaaaaaaacatgttacctcctggtttggttaacaatctccaggaagttcttcttagcagaaaaggcggaaactccaacaccaataacgatgaacaacaacaaaaacccgacgccattactgattctactgagacatctacttctgcttctgatgaaaacgacaactccaagcctgtcgttttggttaccaacggtgaagggattgattcact

SEQ ID NO: 253392 - DNA, 360 bp, Gossypium hirsutum
  unsure (1)..(360): unsure at all n locations
cttttatttttctatattttattttacaatgcggttgctttttctacatgggagatgagtttttnaatccacatctaaaccttgaaatatcattcaatcattcatttttatttcacatatgaatcgacaactcctaaaaaaaacattttaactcctgtgttgacttacaatctccagcaagttcctcttatcataaaaagcagaaacttctacaccaataacgatgaacaacaacacaaaaacacccaccattataccttcttctcctacttatactgtatgatatgattaaaacaccaccttcacacctattgatacagttaccaactttcccacaatacattcacatggtcctgttta

SEQ ID NO: 253393 - DNA, 423 bp, Gossypium hirsutum
  unsure (1)..(423): unsure at all n locations
ggaaagcggccgcctgcatgtcctttcctaatttccggtcaacccacccgttctctttattcttccaagcatcactcctttgggggggttgttcacatggtggggttaaacaatttaaaatattcanctctncccttttctaatgctatgatttaaacttcaccttacccaaatttgaacaaatccttaaattgttctttttcttcattgctttcccaaaatttagtattcatgtacgctccatattattgcctcttcttatacttttttccgaacaatttctttttatttctaaggcttcagacttttcttccacccaccatatcccgaaaaaacaaattttataaccctttccaccattttttttcccttctttcctttttaggaatcaattaaagtttttctttttgggaaaaatttttt

SEQ ID NO: 253394 - DNA, 408 bp, Gossypium hirsutum
cttaaaccttcgtctgtaaacttccatttttgactctgaaaaaaaaaaaaaaaaactgcgtttagtctccatttctgtctttgaagcttaaattttggaccaattaggctttttttttccttgatttgagatttgggtttcttctcctttcttcttttttggttcagcagcagcatgcggtggtggttcagtcaatcggttgatgtggttcgaaaagtcatctctttgaacttggatcgcagagtgattctgtaattccccccataatcagcaaacaaagccctttttttagccattgactctttagtcttacactattgtatatatatcttccatgggatccactttcttcattgacgatccttgttatggtcgtcagattagccgattagtgaatcatcttcaaaa

SEQ ID NO: 253395 - DNA, 304 bp, Gossypium hirsutum
ccatatgtcatatgatcgtgatttggcactagatcgttggtgggtttactctcttttttcgctttattttatcggatctgaaggttttcttatggctgttttgtattgaaacaaaaattctatctgttcttttataattcatcaaaatattgccggtgatatgccccttatttgtttattcctaaaagggtatgattttctttctgggaaacttaattttttgaagtgaggggtttaccatgatttggtttgctatctcttaacaataatgatggtggcaggtgggaccactgtgattgggggg

SEQ ID NO: 253396 - DNA, 228 bp, Gossypium hirsutum
agttgctctaactacctccgcctgtctttcaacgagaggtgaacaagaaaagagactaagaaatgtcacgcaagaaaatcacagagtacgactccaagagattgcattatcatcactcaatttatctgaacagctactattggaggagggttctgagcactggatctagttagaccatttctttcatctctgcctgaaggtgacagggcttacatgaaaattactttt

SEQ ID NO: 253397 - DNA, 168 bp, Gossypium hirsutum
ctgcatttgtttgctatctgctctattatgaatataaatgtataactggaaaaaggatagacttttttcacttaaccaaacctcagcctcatcaattcaccatattggtacgcagtatacctgtttctgctggaagtaatgttagtgagagtgttgaaagatttttca

SEQ ID NO: 253398 - DNA, 346 bp, Gossypium hirsutum
cttggtttggccaccttgatgggcaataggaaagaagaagcatcaacttagagacgttgattcacaccgaaagggtgatggaactgagcattcataaaatataatcctcgattacgctaaacatcgatatggtgatgaccactacaactgggataattgaggaggattatcaagcagatgtcatcgtctacgatcaaaagaaagctgatttcaaggatgagcgagctcttgatggattgctgtatatcactatattggctgctgcttactatctacttcaactatgatgcacttcattctcagcttgttacaaacgaacctgactaccatcgtacgcatatctggc

SEQ ID NO: 253399 - DNA, 450 bp, Gossypium hirsutum
atcgttcagttgatgacctcttgtcatttatgaatggagatgatggagattctaaagggattaaaacttcaaagagtaaaaagaagaaccgaagaagaaaagatttgcagaagagcacgtctgctcatgaggccactaaaaaccataataaggagtcaaatggtcttaactctgtatgccgtagtgctgaagttcgtcagattctgcccagtgttggtgctaccacaaacttacaggatgtcgaagatgatatttttcccaataagaacgagtttgacgatggtgatattgatgatgagattgatccgacattgaaggaaaaaattgatagggaggtggaagattttgcccgtagattgaattcagattggccggaaagaatgcaagaaattctctctttaggccaagaaaagaaaccagtgcatttgtcacttaatggcaagggttcat

SEQ ID NO: 253400 - DNA, 407 bp, Gossypium hirsutum
aattccctcccctaactctctgccctctcactgggactcaatcacttcatgcagaacaaaaaccgaaaacaacaaaaggaaaaggagaaataaataaataaataaatgagctccagcaattaaataaaaaaaaacaattaaaaaatttctatcattttagctttcgttcatacttcataaggcctttctctttccctctcttggctgcgactttgagctttttgttacctgaaaagctaaaaaagaattgggatttgttgctttaaagctctttttttaacgaggagattcgtcattgctctaagcgtttaatgattttatctctctctctttttcacctctgatcctctgttatttcgttaagtttcttcgtatttcactgttcaatgtgctgccgaacgaggttc

SEQ ID NO: 253401 - DNA, 446 bp, Gossypium hirsutum
cggacgcgtggggtactggacatgtccagcactgacacactgttacttctatggtcaaaatggctgaagaaacagttaagcgagtgactggccttaaccccgttcttctatctaggcccagtgtacctagtgtacccgtgccttttgttagcagcccattggaatcatccacaggttccatgccattgccgccgaacactagtaagctatttcaccaaccagttcctgacattgctgctcccatccatcacccgagactagacaacagtttcacaggcaacaacctggttactcctatcgtgaatccacaaaccgaaataggagtggaaaatgttaacaaaacatctgcattgcagcatacgccgagaggcgtgcaaaagcagattggcccttgtgtgagtccatgcgtgcccatgcctggctgggaacccggactaccccatggg

SEQ ID NO: 253402 - DNA, 337 bp, Gossypium hirsutum
ccaatttccacccacacccacgcattcttttttttatcctacaaatcacaaacaaggcgaggatttcacaaagatcaagaagggggccttcttccaataataaaatacatttatttataacacaaccatatacttcttctaaaaacaccattttttacaatctcatattagtataaataattaccacaaaaacaaccactatttttaatatttttacataggaatacaaaaacatcatcttttctattttttattctattctccaaaacaatattttaccattagcaaatacttttatttcaaaacacacaaaaaactcatttttattatttaatat

SEQ ID NO: 253403 - DNA, 404 bp, Gossypium hirsutum
ctctttttcccctaattgggtcatccttcttttatatatctgtcttggggataaatggttgatatatttggtgtttatgttattacttattaggtcataacatagaggaaatgcttatggtttgaaagttgctgcattttgataagagaaaaggaatggcttcttcaatcggttttattataatttttcctatatagtttctgttcagaatgaggcattgttaccacctcaatatggaatttcattgaccatttgtaggctaattaatatatgaattcaatggcaagagtaaaatgtaaattcagaattcagatgatgaactgcaatggtgtgtatatggatttcatgacagttctgctatctatttatatgatagttcaatcattgaaaataaagttctcttg

SEQ ID NO: 253404 - DNA, 381 bp, Gossypium hirsutum
ggaaatgccttgggaaacaatggaactaattggggttcttctgccatttccggtcaaggtggaagggataacatttctggcaatagtgtgaattttggcaatggaaatggtgataacaactttgggttaggaacagcagggtatgagagaaacattgggaccaatgtggtaccagcatcatcatatacagcatcgaacggtggttatgatatatcctttgcaaaccttcctgcaagtgcttccatttatggggataccacttggcaatcatcaacatctgtgcgagacagttctggtactttcggctatggacttgatagtgccacttctgatgttacgcgtaaaagttctcctggttttgtggtggttataatgttaata

SEQ ID NO: 253405 - DNA, 389 bp, Gossypium hirsutum
  unsure (1)..(389): unsure at all n locations
gaaaagtctgtattcgtcttgtcatttcatctggcattgctttggaaagacggttgcagatttccaaggaaaggattntgctccatgcctattgatcttttttctttttcctttcctttttccttccttgcttcattctgttctcaatctgattttcgctcttcttttccattttaaaagattttgtaaaatcatgtatgtttcctgatgtagagatcgccttctccttctttagcattgcagatggtgatgattctatttccagatgtttcatctccattcccgatctattttcgcttcagtaataccctttccaacgtatacaggagcaacggatgtatttttgtctattttaacccttctgatgcccgattgtgtggctgctacat

SEQ ID NO: 253406 - DNA, 206 bp, Gossypium hirsutum
  unsure (1)..(206): unsure at all n locations
ggtaaaactcgtacgcctgccgtaccaatccccactttccacccacacccacgcattctattctctaaaagaattaaattntttttcagaaattttccattaattatctaggaatccccacatatatttcctttaatcttttctcaattaacttaaaaccctctttcttcaaccaaaaaaaaaatctatcatatgatcggacttcc

SEQ ID NO: 253407 - DNA, 457 bp, Gossypium hirsutum
  unsure (1)..(457): unsure at all n locations
cccacgcgtccgctttcttttacaaattccaagctcccaattagggttcttcatttctcaaaggtttaacgtggttaatttttaagatactttgtggtggacaaaaagttgatagaaagctatgttactaaacctaagcattatctaataagaatgccgggcattcctttagtggctcgtgaaacctcctcttattttagaagcacagatcagatgtgccgagaagattcccgcctgcatttatctgcagaagaggaaattgctgctgaagagagtttatctatttattgcaagcctgtagaactctataacattcttcaaagacgtgctgtaagaaatccttcgtttcttcaaagatgtttgcgatacaaaattcaggcgaaacacanaatgagaatacaaatgtcagtgtccatatcaaggattgtgaatgagggtgtactgactcaaagtcttt

SEQ ID NO: 253408 - DNA, 259 bp, Gossypium hirsutum
cccacgcgtccgcccacgcgtccggcaaaaccatgcagataagactaagaaaggggcatatttgtttagatgatgcatttgaatttggaaactgtgtttgtcattcttcaccagtggggtataaaaactactatgcttttgtttatttcttcaggcttgtttcatgacgagcccatgttgatgttgccattgttgttcatctaggctttgtaatatatacatatttggattaaaaaaaattagggcctgttagtttccc

SEQ ID NO: 253409 - DNA, 318 bp, Gossypium hirsutum
  unsure (1)..(318): unsure at all n locations
cttccttttacaaattcccagggcagaaatacttttctatagataagtaaaacctttaccttttctttttttaaaaaactttctntttgaccaaaattttattaaaaactttttttcttaaccccaaccttaatctaataaaattacatacccttcctttatacttcataaacctccacttaattttataatacatctcatattctcccataaaattcccacctacctttattcttcataaaaaaaaatatctccttcataaaattatctatttatttcaaacctgtaaaactctattacattcttcaaaaaccttct

SEQ ID NO: 253410 - DNA, 304 bp, Gossypium hirsutum
  unsure (1)..(304): unsure at all n locations
acctcccattttcttttctacccaaacttgtttccttcaagagccattccttccttcgactaagatttcccanccttcttcatttcctgctccggcagctcttccttctctaaaactccgccccatttctttccaatgctccctgtcttcctccccctctgttgcggtgacagcctccaaagagtgcaaaagtgaaatctgtcaaagctagtcagatcattgacaccatgtgtaatcccacgttccaagtttatatgatcaccgaccgtctttatcgatcaaccgttccttaattcgcatctac

SEQ ID NO: 253411 - DNA, 307 bp, Gossypium hirsutum
ccacaatgctggacagagccttctccgctcgccgcactcaacctcactccctcttcgacgtccccacctcctccgccgtttccgatgtctctcccgacgccgaatccgctgacttactcgctgacgagtccaaaaccaagaaaccacacctctacgtcttggcctccaattatatgtcgggcttgggactcgtcaaatcgccgtgcctctgcctctcactctgtcttcttttgatcgttttcatacttttctctttgatgcttaactctcgctccttcgtttgcctttcgtcctatgacccgatatc

SEQ ID NO: 253412 - DNA, 222 bp, Gossypium hirsutum
  unsure (1)..(222): unsure at all n locations
gaatgatccaacttatgttgtttgtaggtcttaagagactagaagaatacagggaattccgaccctattgcaataaatgagtgtttttaatttgtttattttatgttattctgactcaagtatgaatgtcgaatatgcgaatatattcaattttttaaaagttattttatttaanaaaaaanaaaaaaaaaaaaaaaaaaaaaaaaaaaataaaaattaaaa

SEQ ID NO: 253413 - DNA, 422 bp, Gossypium hirsutum
  unsure (1)..(422): unsure at all n locations
accctcctctgtgcgccgctctgcgttctgagagcattcgaacggtcttcgatgtcagccccttctccgatgatgacggagagaaccaggatcgcgccatcaggtaactcctttctctaattttactttcacttttattttacactagctataaacaaaagaataaaaggaaaatagaaaaaaaaacgaagagaaacttaaaaaaaaaactttgcgaaacttagttttctttgaatcttttttccttgtttctgtattcaatctgtgtaaaaaaggaagaaaaggcccctgttacagaaaatgaatcggctntttatagccaaagccaaaagaaaagaaaaatacataataaaaaaacaaaaatcccttctcctctctattcttttttttttctttttgctctttttttttgttttcttttt

SEQ ID NO: 253414 - DNA, 326 bp, Gossypium hirsutum
cagcactcgactgactgtctctgggactcccttctccagagtgattgcttgtaatcctgcatgagcctccgctgtgaatgaatcttcgatgttggagtggagaactgctaaatacgcaaggatttccccttccccattccaaactattaaccccgatgccgatctgaacgtctgactatcaaacgctgcatcaaaatgaactgttgcccatccccttttgaaaacttgttgataacagtcagaagtacggaagatataccatagtccacagcagaatagtcgcaactgctcctcgtttccttgaccaaagattccagtgagccatc

SEQ ID NO: 253415 - DNA, 399 bp, Gossypium hirsutum
gagattttgaggggaaatccaagtggagattatagatgaggtagatttactaacgattgctaacaaattaaaaaaagtttagatgtggattttcagtgtattaaatgttgaatgtatgaaccttttttcttctttttatcttttgttgatgtacagggtgggttgttttttaagtgtattgtgtgagttgtaatggttgttgctccctttagaggaaagaaactgatggaaatggaaaatgggggtcatcattgctagaaaatgaatgattgaatttgtgggtttttttggcaaaatctagtgaaaaaatttggtagaaaaaagatatttttgtagctaaaaatatagttaggggggggaattataaagtacttcggatgcttaaaaccctaaacttga

SEQ ID NO: 253416 - DNA, 292 bp, Gossypium hirsutum
agcaattccaatcttgtgatcagagtaacagttttcacagacaaggtgaatggggcgaatttgacgctgctcaaagtgctctactgttaaatgaatcagaattgcatggtcatcagttgaaggtacatttgattctgtaggtacaactaaattgcaagatgttggcaaagctggtttggtcacaattcaaggcaagaattcagccgagcttggaactgcacacatttgttagcgattcaatagccataaaaaacttcccgtgaagggctttatctcttttagtctaacctca

SEQ ID NO: 253417 - DNA, 366 bp, Gossypium hirsutum
ttcaggatatggctgagagaaagagaaggaagcttaagttgttagccgaaacgggaaatttggatgaaaaaattgcaaccgaggaggaggagagttttaagctacaaacgtggtctgatcttcctgtggatcttttgtatattattctttgcctcctaacactattgttcattgtgtccagcgttttcttcataaagtattgtggcttaagttttttagtttacttttttttttggacttttttttctttatattttttttttttaaatttttttttcttaatttttttttctcactattatttttttttctaatttttttttcattaaaattatttttcttacattttttatttttgtcaacctt

SEQ ID NO: 253418 - DNA, 317 bp, Gossypium hirsutum
agtccccaaatggattctccgtgtccgttcaaatggcgaccccgcccctttcatcccctacttatcttaccaccaatataggcgtcggctacgccatcgtcgtcgccctcggctttctcctactcctctccactctcctcctcgcttcctacatttgctctacagttttctcaccccttccacctcgggccatttacccaaaccccattttaacacccaccggcgccaacttcgacagtattcgccttcccatgattgtttttatcggcgaagaagaccatgaaaaccacgaggaaaaccgtcgcgtcttttggctt

SEQ ID NO: 253419 - DNA, 210 bp, Gossypium hirsutum
cgctctttctctcaattttctctatcttttgatggtttctctttcatttctctgggaattattattatttccttcagatctctcaatctcttattctattctttccttaaatacccttttaatcggattaccatttacctaatctgttcttctgggctgtggtcctaaaaatattattgaccaacctggtccaggtattgtaacaccccc

SEQ ID NO: 253420 - DNA, 193 bp, Gossypium hirsutum
attttatttacttagagctacagagtgagagaggtggtcaaatccgtgaccaggatgaataagtctggttccatactcaaaacctaacatacataatcaaaatccctgcctgctactgcttaatgtaatagaaagtaaagagattgtattttggggggggttttttttctcatttgtttagaaaaaaattatt

SEQ ID NO: 253421 - DNA, 257 bp, Gossypium hirsutum
tgttaagctttctttcttcctttctttccctggaacatattcccccactctcggggatggaccctcgaggcggtgatgccatccccgacggcgaaaccaacgattttagatccttcgaccatcccgatgatgacaagtcttacccttacaccggggatggagctagtccttgctaaaattttgtatgatgtttatcgagtgagacaagatctgtactatttcttgagcattttggttaatatggtgatattacggat

SEQ ID NO: 253422 - DNA, 247 bp, Gossypium hirsutum
ttcttcttctgtttaacaacgctcctacttgggccatctccactcaatttttggcaacaaaatccactcatggtaccgccaattctttcccttccttttctcactttcacgttagcttcccttcatcagggcaaaaagtaagttttagaagaagggccagagtccgtacttatgggatcaagtgttcggcaaaagtagattattgttctgcacctgtgaatgaaaaaagcgtttcattcattctttt

SEQ ID NO: 253423 - DNA, 346 bp, Gossypium hirsutum
ctttctaggaattgctacgaggattcgatgaagagactgcagctgttgtaatggcaagagtaacttccctgaaaatggagactgaggtaaattaaagtcttcttttcagttatctcccatttgtatttctttttgaatgtatgcaccatctgatttggatgataccttctgctagttcattatgctatcatttatggaataatttccattctcattctgtttccttattatagaatatggatcagagctctctcttagtgctttgccctagtttttagcgcttctctctgcttgctttcctcttagccctgacaattttggtcctgctctcttttatctattatct

SEQ ID NO: 253424 - DNA, 228 bp, Gossypium hirsutum
ttttctagggtttttttgatcgatctgagagaggaaggaatatgggtgcgggaggcgattcaagtgagtcacgactcggtggaaatggaggaggtgaagaaggagtgacggttaatatacgctgctcgaacggtacgaaatttacggtgaggaccaatctcgaatccaccgttggatctttcaaagctcttttggctcaaaattgcgatatcccagctgatcagcaac

SEQ ID NO: 253425 - DNA, 236 bp, Gossypium hirsutum
attctaagaaccccgaataaattgagggaaagagagatttaaaaaggatataagagtggtgccttaaactttttatagatctgtgttttatctaacattttgcataaacaagaattcctgttttttcctgtttttcttttcgtatcctattagaagttaacgaagtcatctaaatgggatactgcaagcttatttcttgttgcttcattgcttgcattttgttcctcggcgtttat

SEQ ID NO: 253426 - DNA, 313 bp, Gossypium hirsutum
attttaatggcggggagatgggccacggcggctttccggtgggtattttcagacttaatatcagttcggcggtggccgatgcgatggggtcacgtggagtggcctcaacttagtggtttcagcttttcgatcgtggacgacgtcgtttggagtctgatcacggcgtttgagtctgtcgctttggtttctatgctctgcttcttttttcttgtttgcggctgtactttctgagaaggagaaaaaagaaaatactaggattgtggattgccggaatgtttgtcgaatttgacgtcagctgtgaggttcttatgtc

SEQ ID NO: 253427 - DNA, 364 bp, Gossypium hirsutum
  unsure (1)..(364): unsure at all n locations
attcatatctttcgtcaaatcaaataaactgtgcatatctcancgtattctgggtcttctccctttttcattccaactttttatccgcgaatatttggtttccgcgcttattttaacctatttctgttatattttttgccgtcataacttttaacattctttttttttctttttttttgtgcgcttttttttttttttcctttatttttgtcaatttttttcttaatttttttattttttatttttttttggtaaaattttttatttttttttatattttttggttttttttatttatttttcttttttttatttttttttatttttttattttattttttttttcctttttttttattttttt

SEQ ID NO: 253428 - DNA, 357 bp, Gossypium hirsutum
tttccctgttttacaagaattaacactgaagacgaatgatatgataaaggggatatgtgatggacaactctcattgcagtgtttcccaaacctcaaacttcttaacctccaattctttcctgagacatctactactcttccatattccttcattcagtcactaccaaagcttgagaagcttgttataaacaatgcctccatttctgaaatagtccggtttgaaggactcatcaacgaggaaaggcacacatgggcatgctatcagttagaggccttaaagttgtctcaacttccagagctaacattaaagactttagagccatttttgttgtctgtcaaaaatctattaagtatgga

SEQ ID NO: 253429 - DNA, 235 bp, Gossypium hirsutum
gttaattgcaatactttttgctgaaattaaagggggtggaattctttatgggacggggctttgtttcctatatatttactgctttccaacaagctggttttgtatgatttggaaaatcataccattggattgactgagtacatttgtgactatagtgttacttttcatttcaccaatggtgtatataagttcgactacatggtttaaatcttactgtattatcatttggttcttt

SEQ ID NO: 253430 - DNA, 316 bp, Gossypium hirsutum
ctaatgtatgtttgctacgaagattggaataataatttgattcttgctgagatacaattattgaaaagatttatatgagatataaagaatatctagattttcttataaagaattttgtgaaagaccaatttcatacccgtggtattcaggctcgatgcttagcgaatgtagtgccagtgaattaattcagactttaagtctagcaggctacgtgccggtgatctgaatcagattataaacctatcaagctacgtgccggtgatctgaatcaggcaataagcctaacaggctaaatgccggggaatatgttaaaata

SEQ ID NO: 253431 - DNA, 194 bp, Gossypium hirsutum
tttaaaaagtgattccaaaatactctactaagcatttactctgcaaagacatgggaccaaaatacccactcaaaagattaaattttatcactatacacactcttcctacccatcactcatcaaaagatatagcaaaaccaatacttattacaaccattttataaacaacttactactttcatactattattgaa

SEQ ID NO: 253432 - DNA, 365 bp, Gossypium hirsutum
gtcgaatttcactcttctttagaagcaagcaaaattttcagaaacgtgtaaggggtggtatttcaggctttggggtttccggagtttctatcaatccagcgctatcggtattatcttttaagttctcagagaggtgatttaaagccacctttgaagaaagaaggagtagaaggaatgacgattaaaccggcggttaggatctccgagaggaaattagtggtaaaggagcggacaatcctgaccggagttcccgaaaatgtgatcgcaacttccggtacagcagcccggtcggtggaggagggttttcctttggtgcgggttttgatgaaaaaaacagcaaggcatttggtgcccattcgggactt

SEQ ID NO: 253433 - DNA, 367 bp, Gossypium hirsutum
gaaagatacgagaaactgctatagataattttgagcccatgaaatccaaaggtggggagactagtgagcacattctatcaatgctcaaggcggagaaggaagaactagaatcatcattcaataatgagaaattgctgtctctccagctaaagcaagaactagcagatgctgaagctcgaaacacagacctatacaaggagctccaatctgtacgtggtcaacttgcgttcgagcagtcaagatgtttcaaattatagggtgatgtatcagaactacgacagaaactacagacaatggaaacactacaaagggaacttgaactcttgctgcgacaaaaagccacatctcgaacaagttggcattaaat

SEQ ID NO: 253434 - DNA, 245 bp, Gossypium hirsutum
aacttattatccacctgggaggtgcaaccaagagtcaacaatatgccgtggtctgggcgtttatcggaatcaatactttattagataacagatcatacagtatctcatttggggagaatttccatgacctgagtaataatgacgatattcaatccattcaacacatcgacctttgatatcaataatatttccattggagaaccgtgtaaatgaacattggcagataccataaagagatatatatc

SEQ ID NO: 253435 - DNA, 219 bp, Gossypium hirsutum
ggcgtttgaagttggtatgggaaggactggggcttggagaaagaattgcagtgggaaactggagcagggtcgggctggaccggctgaaataagaaaatctctatgggatggaaaacaaaaggacctagtagaagaagtcaaagaactagaaaaattggaaagtgttttcattccacctaaattttgcattagtttaatttcgattaaccacatactctg

SEQ ID NO: 253436 - DNA, 388 bp, Gossypium hirsutum
  unsure (1)..(388): unsure at all n locations
cttattccacaaccaaataaatacaactcttgtgttctgtttcacctaaagcacaagaagctttgctttttcctttcttctttcattaagagtttttaattttttttccctactttgtggggtttcagtattctttcttttcaacaggttctgatgcattcaagctttcaaggactatacttggtctgcgtttttctagcgttttctattgttgggttttgcgttttggggttaaaggcttttgagaaacgtttttttctttcaagttcaatcatgcctgctcttgttaattacagtggtgatgatgatttctataatggagggtccttttatacaaattctactgactngggtagattgtgttcaatcagtttccaagttgatgtgt

SEQ ID NO: 253437 - DNA, 360 bp, Gossypium hirsutum
gtcaaggaaaaaaacacaacgggaacataaatgagagccgccatttacagactggaccactgagcccatatctgaagtcaagctaccctcggcattaccgcctgatcataggtatttcctccactctcccttctctttcacttttctatatctccgttttcttttccccttcttttccggtgatttaatatcgttgaaatcattggtaaaatgttttttttttttcaagttttgggtagttttactagggttaacgttatatgaagatttggggtgtttgagcaatttgggtaatgataatataacatgaattctgggtttgaactccggatagtatatagcttggtggaattttcatga

SEQ ID NO: 253438 - DNA, 218 bp, Gossypium hirsutum
tttctagagcatttgaaaatgggaattattactggcctacttttctctcttttaggggcgccatacaaatacattgtacttaaaaagggatgtaacgtaaccattgatttcaattttcttgactcgaaaacattgtcagattaataatacaaattataattattcatttcaaaataaaaaaaaaactaatttttctaaaaatattttttaaatattat

SEQ ID NO: 253439 - DNA, 431 bp, Gossypium hirsutum
  unsure (1)..(431): unsure at all n locations
cttactctttgtaatagtcttttatgctttggtttcttttcgtttctctccgggatggtcttttcattcacaactggaaaaaagtcagcgccgccgtcctttcctcctctcgtgcctgtgcgtttccttttccgatcgtttgctcaacaaaataaacagctgtattcggtgtttggtaactttctacgttgattttgggagtaactgaaaatggctgcaggggactgggatctatatgcggtggtgaggagttgtacgtncgccaccaacacatncacctncgccgtatcaggcaactatttctcgaatgggaataatgatagttggcgggaagaccctttagcttgcttagcttcgttgacgtttgaggaagaagatgatcccgttacatttcctaatcttaaaaaaagtggttctttacaagattctta

SEQ ID NO: 253440 - DNA, 434 bp, Gossypium hirsutum
cctgcaaatacacaaccataattccctattctacccactcttttcttttttctctcgttcatcttattaggtaatagtttatatacattagcggaaacttattaaaaacatttttttcatatttttaatctcactttttattaacattctttttttttataacttaaaccaattaatctataattacatcatcatcatcaatatactataccttttattttttttctaaatttttctcatcttcactactatactcataatattatactcaaaaaatctaatttttttctcatactatttatatctcatttattattacattaacttaacctatatttaatttctttttttcctatattttcctaacctttatttaattattttctactctttttatttacttaatttattataccactttctatcataattta

SEQ ID NO: 253441 - DNA, 203 bp, Gossypium hirsutum
atactttcttggtcttcatatgttttcctgctgaacgaacatcagagatgatgagttcatccctcaacgaataaacttgaagtgaaacaattaagagaagatgtcgtggccagcacatgtcgatgatcactttatgcgcgatatccacgtcaaccatctatatcgcgccgctatcattgaccacaacggcatcgtttggtgcc

SEQ ID NO: 253442 - DNA, 430 bp, Gossypium hirsutum
  unsure (1)..(430): unsure at all n locations
aagaaaccaaatttgggttttcagttnttattgacgtgcantgcatggagctgcgactgggactcnctcttccacctccttttaattcccatcgaaaccttcgacctaaacagctatggtaattacgagactagagaggctttgggttccaatgctttgagttggcctctgctaaaactaggaccagctgacaatgacattaacaacatccaccaccacaacagcagcagcagcagcagcagcagctctagcggcggcggagctggctgcaaaaaaacgcagctttgatgaagcaccattcttcgatgagaagagaaatgttcccaaaacgctgcatcttttgctttggactaaccaaccaaatgatgaagacgacgaccctaacaatgtccttcacgaaaattcttcttctggcattttcaagaatgat

SEQ ID NO: 253443 - DNA, 313 bp, Gossypium hirsutum
catccccattcccatcccccaccccccccttatttttttttactccaagaattactgcgtaaatcacatcacagaagaggtgcatatcaaaataacaaccctactttttcctttcattcatataatttcctccctttaaaccaaaacctcctgccccctcacatccctcttctaatctactccctctaacataatcaatcacagccactttctcttccttccttatatccccaattatatatctttcacaaattaaacctctcattctccccatttttaataaattttactcaacatctttacacattatttt

SEQ ID NO: 253444 - DNA, 401 bp, Gossypium hirsutum
  unsure (1)..(401): unsure at all n locations
caaacaggacagatgaacanaattggagaacgagttacttggattgcggagtggagaaatctattgtatgttgattcttcanaaatgcctacaaagctctattcttcaatcttcccatctatcttctttctttccctcattttcctcttcctttactccactttccttcctctttataccaataacgactcctcttcattgcccactaataagttccttccttcatcctctcctccttgtaaccttttcaagggccattgggttttaaactccaccaaaggcaagcctttctacgatgacacttgcccctttcatcgaaacgcctggaattgtcttaagaacaagagggacaacatggggatcatcaattcctggaaatgggtacccaaagattgcaaatt

SEQ ID NO: 253445 - DNA, 442 bp, Gossypium hirsutum
cggacgcgtgggaagaaaaagagggtgtttagctttttttttaaaggggtctggagaaaatataagagttgagttggagagaagaagaagaagaagaagagaaaaagatggggttgatgatggatcaagtttgaaggcttggggggttagtataaaaataaaaatcacccctttcaaaaacctggaaaccccaccaaatggaacttacagatttgcaaagcaataagcaaaccaaaaacaacagcagcagcagcaacaataacaacaacaattctgcagaaccccaccatcagtctctccagcagcaccatctgcaacaccaaaaacagtcggcttctccccagcttgtggtcccttttgatggcaccagatcttcaagtgcttctttcggcaacccttttaatatgggctccatttctcaactccatccccaccacccttt

SEQ ID NO: 253446 - DNA, 230 bp, Gossypium hirsutum
ggccggtgtgcttggcagcctcaaaaaaaggtggaggagagtctcggtaatcagagattggtgtgcttatcctcctcgtcatcttctatgtcatcggctgtgccgctttccgaaacaataaaaagattggtaacgatgaaccgtacggcgaggcaaggatgacgaaagcgcaaccaagtcggatccatttatagaagaccaagacatgttatgggagctttatttttctt

SEQ ID NO: 253447 - DNA, 402 bp, Gossypium hirsutum
  unsure (1)..(402): unsure at all n locations
cggacgcgtggggtcctatttaaaactacacaaatcttgaagttcatacttcgtgacagggcaaggcacanctgtttagacatagacaaagagtcggtgacaaaattcattattggtttcatctttttttagtttccgcgtttgagcaaatacaagtccttttccttgtattcaaatccgaagaaaggattttctttgaagtatagaaaatcaatccatggttttccggaaatgcttacctgtagtccaccacactataaataaaactcatcaaccctatctttctttacttgtcacttacatttctcaattcaacaaaaaatatggctcagcctcactttctttgcatgttattggtccttggcttggcttcagctactgcttgtgatcgatgtgtgcacc

SEQ ID NO: 253448 - DNA, 435 bp, Gossypium hirsutum
  unsure (1)..(435): unsure at all n locations
gtgattttttatctgtgctttatcgcatcctggatttctgtttgtagttattgggcatttccgtatcctaacttcgtttattccagtgaaatgggtgcaggcctttttacatctgcattaggtgtttgatagttgcttcgtgactggaaactaataatataaaatatcatatgactatattgcacatttagtgatccattcatattgttactggaaccaaagccacatcatgtctaacaagttgtttcttcagctttggcaattcatgatagttctttttccaggtatagtcttatagggcatgtagtttaatttcaagcttgtttaaatgagttttatttctaaaatgactgaatagaatatcaaattttctgcatttctgatggactaataagngctgntctttggtctcttttcaatctgttcaactacttt

SEQ ID NO: 253449 - DNA, 164 bp, Gossypium hirsutum
  unsure (1)..(164): unsure at all n locations
attaccctctaagtttaagcgtatcatttttctgaggaaaatgaacttaccaaaatttccctaataacatctacctaacctttaaaaacccaccttgataatctntctccatcggcgtccgaattgtagtctttataatcgtcctcagctacagaccaatccca

SEQ ID NO: 253450 - DNA, 149 bp, Gossypium hirsutum
ctgacgcgtgggtttgcagttcattggaataagaaacacacaataaggcggtgggctacaaagatgatctattacttctcagacggagctctttctactgtgctaactatcatgttttccacagtgcaataaaaatatgtttatagtct

SEQ ID NO: 253451 - DNA, 408 bp, Gossypium hirsutum
gtttcgcttgtggtattggtggaaggggtgtgagagagaagttgctgatgctgccaagggtagttcggaggaacagaagagcgaaagcattatgcgactttcatgggcgcttgttcactctaggcaagctgaagatgtgcagcgtgggatagctatgcttgaagcatcattggccaatagcagctctccgttgcagcagagggagaaaatttaccttctagccgttggatattacagaactggtgaattctcaaggagtcgacaacttgtggggcagtgtctggagattgcacctgattggaggcaagctctagtccttaagaaagcagttgaggagcgcattgctaaagatggtgttattggaattggtatcactgctactgctctggggcttatcgccggtggaat

SEQ ID NO: 253452 - DNA, 309 bp, Gossypium hirsutum
gaaaaatggcgactgtacttgttcatgaacgaagagattctaatataggtgtgaagcggattctacaagctgttcatggcgagctctttaaggtactaccggtataaaatctgaagacatacgctacctttgacgtcataataaggaattacagcaacgtaaagggtactcaaagctcgagtttactgatctgacacatgctctatacatggcttgtaaatgctcagaaaaaagcaacgcaaggctttcttgcatatcagtgcaacaaatatggtgaaaacataccatgctctggagctagtaagaatc

SEQ ID NO: 253453 - DNA, 209 bp, Gossypium hirsutum
tctttttacacctggaaaaaaaaccaaccactggtgaatttatttaagttggatggggttatttaaacattacatacaataaaagatttatttgcaaatacacaatactaataatcccgatgattttcaagacatcctccctaacaataatattcatttccatctcaccagctcatatttaattatcatccacctttcctattttttta

SEQ ID NO: 253454 - DNA, 418 bp, Gossypium hirsutum
tctttttcaatttgttttcgtttgttttatgggtggcaacagaaatgaaaattgggagggaagaaatttgttatttatgttcattttaatctttgtctgattatttccttttttaaacatgaaaccaaacatcatggcaaagcaaatttaaccaaaaattcccctccaaaacaatttcttttacctcattatgcaagtcttttaacattacaacatacaaatcccacacatttaatctaactgccattgtcaggctcatttaccgtaccagcaatacaaggccactagtagctgcaatcacctgactgagttacaacatagagccaatacagcattcccgtcccaacaaagtgaagaaaaaacttaatacaggccgggttgtgcccgggcttggcatgtatatttctgggtgggttta

SEQ ID NO: 253455 - DNA, 412 bp, Gossypium hirsutum
aatataatactgcagtgtttcagccaatgactgcttttccacagtcatcaaggtcagtaaacccatttgatcttggtggcgaaggacctcctgttcaaactcaaacattcccttcaatggcatccttacagggtgctctaccaattatgccacgtcctggtctagtgcacacttctaacctcagtcctccatcgtcagcatggatgccacctcagtctttaccctatgcatcacggccaccttacccaggagcacaattacctagcaacttgccaccttccagccatcaaaatgggggcattggcaatgaggcatcgtttggttttgtaaataccgatcaacagatgggtggtagattctcagcagcacctaccccacagcctttcccttctgttggttggggcaacccgtt

SEQ ID NO: 253456 - DNA, 403 bp, Gossypium hirsutum
cggacgcgtgggctcagcagtggataaatatttaaattattgaacaacaatggattaatttacacaaacatccatgaaaagtaatgaaaaaatgaggtaagtaggaatttttccacatgttccccggttctgtcgtgttcgaattttcttagagctgaaaatcatgtacaacacaagacaatttttgtagcgagtatgcagggcataatatgtgcctaaagatctatttttccagcggtttcctcatcctccgaggcagcatattcatcttcacttagttttttgtcacttgacttcacttcttctgctcctacaacatcttcaggcttgacatatttccccacgcgtccgaaatacgtgtcctttttcctaccttgctcctttacatacgccttgtttgttt

SEQ ID NO: 253457 - DNA, 413 bp, Gossypium hirsutum
cccacgcgtccgcaaagcagaaaaacttttgatttgagttaaaatcttcagatctgtgaaagatgacgaattggtcttgtctcagaggccatagggatatcgttacgacaccaacacctggagcgccaaatggggctgatggacaacgatcggccgatcattatcaggtgaattcctcgagctcaatgatgaccggaggaaagaaaagaaatcagaaagataaaggaaaaggaagaggcatcaagaagcagtgcctggcccgggtaaccggtgaagaagagagtgtgggagagcttactgtacagcatagtgggaaaatctacactgaccaaatcaacagaaggatatgtaaagtgaaggaaaaacttttggattggctaaggaactgtccagaagttatatccatcatcaat

SEQ ID NO: 253458 - DNA, 349 bp, Gossypium hirsutum
  unsure (1)..(349): unsure at all n locations
gacaaaaggctggaagagtctaccgtagcggactaaatacttttcccaggacatggggattattccgatattattaccgtatattcataaatatacgggtaatcttgccttttgaggccaaagctttgtggttgaacataagcgagcaactcggaggtatgaattagtttgttttcgtttttggtgcaacagaataaaagaaactacgttaagggatgtcaatgttgtgagatggtggtgattgtttttgttttttggcaaagagaaaaatgatgtgctcatgtgtcatgctcanggacattaaagaaggggaaaatattatattggtgatcttacatggtattttggt

SEQ ID NO: 253459 - DNA, 389 bp, Gossypium hirsutum
  unsure (1)..(389): unsure at all n locations
aattaattaatacttaaaaataattaatttaatagtttgaaatttataaaatggcttctcaggataaaaaaatattttttgaaaaaaaaaagaaacagaaattagattagtttggggctaagtaagtgttgtcatctgcatttactgtaaaattcagatctgaagctgaaccgagtgggtccaccattatctcaacgggtatgatttcggacaaacttttttagttgtttgtttgttgccaaagttgtaatgaagcatatactttcgtacttagaagagccatttgaattcatttcaaaaaattttgaatttttttggttaaagtaacagcaaagtttctgtggtatggcagattgtattctggtatttttattagtagnctttatact

SEQ ID NO: 253460 - DNA, 457 bp, Gossypium hirsutum
aagcggtccgccgctctaccgtcctaattcccgtcacccaccgtctttttattacccacaaatcttttgtggattattatgggtgcaccgaatcatcttttttgattattccttaaaggacatatctacttattattttcctctatgtttatgataaatctaccatcgttattttattatatatctatatcttctaattcctttctcttattctctccacgtttatttctccaaacattctccttctttctttccttctcatcaatccttcctctagaccttttacaaatattttcttatcttcgccttataaaagttcattaccttcttgtttattctattttctatttctttcactttttatctttcactccagtttattacacttattttttttcctcttctatttctttcttaataattttcttccttattttttttcttccaaaattttttt

SEQ ID NO: 253461 - DNA, 283 bp, Gossypium hirsutum
ccgtttaagggcctataaaccctctggtgctctttatccttatggtttttaaatttctatcaaatgaagagtgcattcgatccacatcgtcagccgttccaggtcgataccttgctggacttctgctcagctgaatcacctgtggtcaatccagtgacaactgtcgagagtgtatctttaacaccttttcaggactgtgctgggaagcacgtcctggcctcttctggatctgacccactgtattgatgaatggaacgggctaccgcagctcttcacccaaaca

SEQ ID NO: 253462 - DNA, 287 bp, Gossypium hirsutum
ctaacccttatccatctgaaaacactgggtatccttcggaagagaaatgaggattaatattcaaatgaggatctttactctctagatacttttgccgaaattctatccaaaagactcatatggttgggcactaatgtcatatattactatgatgagttatctccaaactctattttaagaaaagcattgcatttattttattgaaaagtttaaatccaagatttatttatttttactatttttttcataaaatgttttttcttaaaaatttatgttaatacttgttt

SEQ ID NO: 253463 - DNA, 432 bp, Gossypium hirsutum
gcatgtctcactgactgtctgggttttgctggtgtgatggtataattttgaggtggaattattggttttgtatgaaatattatacatattcagtgagatttattggtgaattgacaattgtgttcccccaatttcttagttttgaactgctcttgtagcagcagacctcttcactctctctttcaaaattcagcaaattaatgtgagcaattaacaacaattaatactatttttgtcgatggttgattattttaattgatataataacaaatttagcccttgatgtttacatatgttgttaattcagtcttgattttaaaaaatttaacaactttactctcaacatttacgtatttacaaaaatattatgcaataagtttgttaatatcatgaccacattgataggatgtgtaaattatggaagctaaaatt

SEQ ID NO: 253464 - DNA, 340 bp, Gossypium hirsutum
  unsure (1)..(340): unsure at all n locations
tgaaaaaatatgggtttccaaaaaaccatatggggtttccttttctggatatgggcttaactaacaagccttttttttagccttcctagtgaatactccataggggaacatgaaattgacccatttctttcgaaggaaagggtgttggagatctttccacagtgggaaagaaaagcatcggaaaagtgtaccggcccccccgaggaggctgaaaaaaaggtttgaaaaatttcaagggggattntgaagtatatccctagagaggaaggcaaagagaaaagcaaacaaatgggaacatcatgtgggattgaacaagtttgctgatatgagccatgaggag

SEQ ID NO: 253465 - DNA, 385 bp, Gossypium hirsutum
cggtctcgtgggatttgaataaaccaaaggcgggactacagtggaaatattaggggttttgcaatgcatatattttgcttatataagattgttataaggtaaggtcaaaggtgcggctgaagagtgaggatccttaacctaaatcgaaggctgaaacgccaatgaaaactagaaagccaacaacatcagcagcaaggggatcctcttcttcttcacctccttcccaaactctttcctttattttccaatatgccccgaaaatcttctcttttcaaacacacccttattgctaccgtcttcttcctcctcgccatctatgccttcttctccactttcttccacactcctcttcccccctccgattccaactccgattcttcttctt

SEQ ID NO: 253466 - DNA, 253 bp, Gossypium hirsutum
  unsure (1)..(253): unsure at all n locations
cttgnttggggaggtgaggggggggcanctcacgtggcacatataactgcctgggctaagctgacctgcctgtttctacctcacgaagaggggagaggggggtggctcaaacnnnatctggagcacagataagacgacggagacctgtgcgggggnngagggaagtggggggggggcaatanaattaaacatattccacgggagtactttgccagatgcaccaaaatttgggaaggaccttggaggacagctt

SEQ ID NO: 253467 - DNA, 314 bp, Gossypium hirsutum
  unsure (1)..(314): unsure at all n locations
gtggtttgggagggattctggtggagatggaccgaattcttcgtccagaaggtgcggttatattccgtgatgaagtagggggtgtggtgaggggaanangntnggtggngaatgaggtgggacactaagatggtagacttttttttttggggttgggtgcgtggggagtattggntgctgttaatcaatattggaccgctgggggaaatacgacatcggcacagtatacagcagacggcaaccccngggggggatggcatgaactgagtttgtggattatatgagtttgacatgaattgatgaatttccagcct

SEQ ID NO: 253468 - DNA, 259 bp, Gossypium hirsutum
ctcttatttttgctcctgttagtttacgattgagatcttgcctcaagtgaaataggcagtgcatagcgcaggcggattcattgtcttgttccttggcgatgccatctctgacgccgagagcattatgttaccgcgccggatttcagcctattcgcgtgtcgtacggtttggccgctcctgaacggctatgaacactgcgagcctatgcctaatagagcgtggcggatgtatagctgctcgtccttgccgactagggcct

SEQ ID NO: 253469 - DNA, 329 bp, Gossypium hirsutum
  unsure (1)..(329): unsure at all n locations
atgcaattaaaatcnnnaatgggagacttttgaagtcggtgttcatataaaataagcatattataatccgtggaaaaaattagtgcttgtatcgtatcangcncatgtttcttctatttgtatacaaaatggtgactgatnggttaaccatgagggtggggtcaggggggatggtataattatattatactatatcagtcgaaaaattatatacaagtttttataattttgcataatgatgtatataactattaacagatgctcatctcacttcataaagtatcaagatcattactgtacattagcaacttgagcattatttatttgca

SEQ ID NO: 253470 - DNA, 254 bp, Gossypium hirsutum
  unsure (1)..(254): unsure at all n locations
atcattcttnancttgggggagtgtttgacagtttgaaggaactgtccttggttagtggaaaagctgcttggatggcatatttggacatgttgtgttgaggttgttggtggngnnnagggtgacactgcattactctcagctgttgctgggttgtggggtgtgtttgttggctatgttttgagctcggggatcgtcaaggatcatcgtcacactatcaactattatttggtacttttgaagtttgtnatttaga

SEQ ID NO: 253471 - DNA, 332 bp, Gossypium hirsutum
  unsure (1)..(332): unsure at all n locations
cttcttcatcttctttctcgagagagggnctgaaaatcactgcgaaaaaaacatacattgtccaagtgaaacatcaagataagccttctttttaaagtgatgatgattggcacagntggagtttacaatcactcaccgattccccacccgagtcactgcnaagtgtacatatactgaagcgtgttaatggcttcgctgcttctcttaatgaagaacaagctgagtctcttagcaaatcggaatcgattctgggtgtttatgannaggcggctacactctccatactactcgttcacctcaattcctcggccttgacgccgattttgggcttt

SEQ ID NO: 253472 - DNA, 222 bp, Gossypium hirsutum
  unsure (1)..(222): unsure at all n locations
ggaacctcttttgattctttgtggggctccgtgaaagctgctgttgtgctgatccaagttattttttattttgttnatnancnnntnnnnatttgattttttcaacaatagcttcattattgtttgtnctgttttttagatgttgttnanngctnaatgatnaatcaaatcgtgaaactccaacttttgtgtgctttgtggagagcagagatttattgttct

SEQ ID NO: 253473 - DNA, 144 bp, Gossypium hirsutum
  unsure (1)..(144): unsure at all n locations
cggacgcgtggggtttttgaaaagaaatctcgagaacctctcttcattctctggttcctccgtgaaagctgctgttgtgctgntccangtgatataccagtgttgagatgancnntgttggatttgattttggcacgagagctg

SEQ ID NO: 253474 - DNA, 246 bp, Gossypium hirsutum
  unsure (1)..(246): unsure at all n locations
actctctacacttgcactngggcctttctgtgacttcctcactctctctatacactttcccatctacctaagcctatctggtgtgggaggcagagctggtcccanatttctgcatattaaggcgagccgtgagcgtgaatttcggggggattttactatggagcaggggttcaatagatcaaaccaattggccagatacatagttacaagatctcaacttggggggactgggatccttgatgctac

SEQ ID NO: 253475 - DNA, 263 bp, Gossypium hirsutum
  unsure (1)..(263): unsure at all n locations
acttccnctttgtcacgagagaggggnggagcttntcttaaaccaaaagctggagaaattcaaatataaaaaagagattctttttccatatatgtgagagtgagacagtattaananacaattaagtggaaatcgagtgcattttatttctcttttaaggggcaaggaagaaggatgacagaagaangaaaactttcgatcgaaccatccaagcttttgatttttgttatataaaaccattatattgcaagtataaataatcc

SEQ ID NO: 253476 - DNA, 260 bp, Gossypium hirsutum
  unsure (1)..(260): unsure at all n locations
gtggtntagaanactgnccctggctggaantgggttggcttttggctcattctcggccccatcttgtggggtttgccttgcttgtgcctttggatgtggtggtgtggntcgttccnnntgcttgccgcggctgcttttcgcttcaggcttttgcgtgggtcaggtgtttgtgttggttggtganatcatgtgcaccaagaagccatatcatttttgactattcgcgcaataccattcctatcattcactttcacctgcaa

SEQ ID NO: 253477 - DNA, 356 bp, Gossypium hirsutum
  unsure (1)..(356): unsure at all n locations
cccacgcgtncgatttagggaaaagnnggccgcgtgcatcgaattgccgatctaggtgcccattaatattttctattttaaattctcgagggtgggggtgtggggggagtcatttcnaccatggcttccaattcggagaagcccgctactgcggatggggnggggggtgttgatggtcggggagcaaaagttcaaagcctgaaacatccaccactgagaagaaaacttcaacacctgagccttcaactgggggttcacagncnagacaaggaggggccttccctcccaacgctgtgcctgggcctgggtttgccccacccaatccattggattttgcaggcatgagtggccttctt

SEQ ID NO: 253478 - DNA, 344 bp, Gossypium hirsutum
  unsure (1)..(344): unsure at all n locations
cggacgcgtnggggagaacaaaagtnngataaagatacctacgtgaagccacgccgagggagtactgcaagtgagagccaagcaaattctagagacgagtgtagagntnatggcnncaaggatccaaaaaatacctacgtgaagccacgccgagggtgtncttgaagtgagagtgaaggaagattccacaaaggagcctagacgtcatggcagcaaggatccaaaaaataaattatctgcgaagttgagtgaagatgataaatatagtcaaatgagcaagtgcccctacaaataaatttgaagccgacgatgatgattttgatgatttcgatcccaggggagct

SEQ ID NO: 253479 - DNA, 298 bp, Gossypium hirsutum
  unsure (1)..(298): unsure at all n locations
aagctggcacgcctgcaagtacccggcccgacccacccgtccgacccacgccagccgctaaacaagaaagcntgtgggaacaataccaggaggcagaaggtgggaaactggccctcctcctagccaacgccgaagcacatgtgagggtgttgaaatnannctcggagctcaacataactgacacactctcaaccggtggtgttnnagagtatatgagagcttgggagattgcgagtgcccttccctccaaaaatcctgacccaccggcgctacttgatcgaatgctacgcctgttggc

SEQ ID NO: 253480 - DNA, 371 bp, Gossypium hirsutum
  unsure (1)..(371): unsure at all n locations
tctagatcgcgaggccgccctttttttttttgttttttttacttaaaactgaacactttttgttctctcatccaggatacaacttttatgcattacaagattgaagacaactcacngcttttctaactaatgaattggaatgatagatatatacatgnncactctgacattacaccaacggnngaaccactctatatggcagcacattcttcttatttctccttcatctctagtcttctttttctatataaacaagtntgntcacagattacggtcaaggtaagggatgctttagaaacttctatccacttcctataacaacctacaaggcctcgtatttataagtttgaggtgctatctncagctttttg

SEQ ID NO: 253481 - DNA, 261 bp, Gossypium hirsutum
  unsure (1)..(261): unsure at all n locations
cccacgcgtncgcccacgcgttggtagctcaaaaccctaaatctcagagtagttagttgacgaaagttcttttctttaaatttttggcgagaggggtagggggatggggaagatgannccgattttgatgaaaggtcatgaaaggccattgacgnttgtgggggngtgagggagttggagaggggtngnnntcatgcgctaaggaccatacccctaccgtttggttcgccgacaatggcgagcgtctcggcacttatcggg

SEQ ID NO: 253482 - DNA, 228 bp, Gossypium hirsutum
gccaagaaacaaaactgagttttattcttattgaagaaacatcttttttcccttgctttgccgtactccgtaacccttcccgctcgctattcggactctaccgagtattcaagagtttgattattactcaactctaactgccattaagaccagaggctggagccggagaagaaaaagataatctatgggggaagacgcatgaagaggttcataatgcccgaagcttat

SEQ ID NO: 253483 - DNA, 433 bp, Gossypium hirsutum
  unsure (1)..(433): unsure at all n locations
atcctggagccagctaccctgctgcaggaccacggtggacccacgggagaagctggaggtgctggagaggacatacggggaaattgagggcacggtgtcgcgggtgctgggccgggagtacaaactgcccatggacgacctgctgccgcttctcatctatgtggtgtcgcgcgcccggtgaagcagacaggctgggaactgggggtgcagggcaggggcagggttctacccccaccatgatatcctctgacacctctgaaccccagggttgtttatggatgcagcttctctcagtacagatggggaagctaaggcccagaaaagggagggtcccagccagggtgctggggtgctagaggcagagtgagaaccacgccccaggtgtccagccatcctggccagggctccttccccagctgcctgtncatgacag

SEQ ID NO: 253484 - DNA, 163 bp, Gossypium hirsutum
cactccttcatttctaccttcatacatttccacccaacgaaaatcagatagtgcatcccaacccacatcgttcaggccggtatccaattcaaccatgcctgctgggagctctactacctttaacataacatccatcctgatcgtcatataccaactctccaca

SEQ ID NO: 253485 - DNA, 319 bp, Gossypium hirsutum
  unsure (1)..(319): unsure at all n locations
ttacgcatttttttacacgtccggaaccagnggaagcnnngnggggtgcctttgaaaggagtggattcgaccgcttcaagctttggcggtatgtttgagaaattcagatcagatgcacccaactacaaagccaatttcatccttttcttggccgataaagacccctctacctctcttagttggtgtcctgactgtgtaagagctgaacctgtgatatacaagaaattggaagcgtcgccagaggatgtgacactgctgagagcatatgttggtgacatgcccacatggaagaatccacagcatccttggcggcttgact

SEQ ID NO: 253486 - DNA, 303 bp, Gossypium hirsutum
  unsure (1)..(303): unsure at all n locations
cggtcgcgtgggttctcttgtagctgctttcttgtggattgctagatttgagctccgaaagtattgcatttacagggtatttgcagtttcacgggatcttcatgtaatgggaaaatctcccggaaaatggattaagactgtgctttttggaaagaaaccttccaaatctagttatcctaaaggaagggagaaggttgacaatgacagccaggtattggttgcagccagngcatcagaaagtgatttggctgtggcttcctccttctcttcacagctcaatnctcatactactgagagagatga

SEQ ID NO: 253487 - DNA, 348 bp, Gossypium hirsutum
  unsure (1)..(348): unsure at all n locations
caaggcctgtaagggctggccccctggtgaattgtcccatgccctatgtatctgtgagtcctgcagagatgacaaatcangggacgggatcatgtctagtcaccgtctgggaaaatgctccaggagtgaacacatttcaggctcttgacgatgtacctncaaactcttcngatgggtggccagcccgcatgtctgtgccgcctctgccagtgagtcagagccagcacacagcagctgacttgtaaagtgagagcanactgctctgtcagctgcttcttggactctaagcacatctttatgttagcatgcgtcttgagatgtgtacatctgtgtgtatggtcagcttca

SEQ ID NO: 253488 - DNA, 389 bp, Gossypium hirsutum
  unsure (1)..(389): unsure at all n locations
gataagttgactctctccttcttattccttctgaagtaatgagatgtgcaaccttattagcatccctatttgtgaaaaggaaaacacaagtctggaaacccagacttagttttttagaatcatttatatacacagcaacctctgatctatcctcatgctccatttgcagcttacgaattaccgtccgggagtcaccctcgatctccacctctttcaagccaagatgtaaaccaagttgcagcgcataaagacacgccaccgcttctgcagcaaaggcggatgttgtttgttgaaagcggcatcgaaattaattttttgtctcgatccaaccggaccaacccaacttnctacacagagacgttcaacaggacattcgtagaacaagtgtt

SEQ ID NO: 253489 - DNA, 173 bp, Gossypium hirsutum
atggccgggccagaccaacgcgtttgttttaatcgaaggggcccactttaccctggcatccaaactctgatttgcctttcaatcctcaaagggcgggggaccaccagcctttatcggagaaaaaaaaaagaatgccaggttcgtgtgtcaaattgggtaaagagaggaaaaag

SEQ ID NO: 253490 - DNA, 341 bp, Gossypium hirsutum
gaacaactttcacttccttttgatgccattgggtgcgtgcatttgtttaagaggtcttgtaatggtctggtgccatgatttcatgaagaagttataatctgaatttatttataattatatatatgtatactttttaagaatagataaggtttctgattgtgttaaatttgaaatatggcctctgttatagaccaaaaggataaaagaaatgatctgtcaaagactaagagagttgcctgccagtgttatttgagaaatgtcaattttttttttttttcgctaataaggcgctaaagaaacggcatttaattgaagaaagagctcatgctactgcttatatt

SEQ ID NO: 253491 - DNA, 244 bp, Gossypium hirsutum
cttagggagacattccgggtgtctgttcttgttctcaaatttgtgtttcaaagaaaataagacaaatttccatgtgcagtggtccgaagaggaagccaactcaaacttgtttaacgatggagggtgagtctcgtaaagaagatgaggttcctcaaaagttctcggttttgctggagttgtcggcttcaaaatgatttgattggctttaaaattgctgttgaagaagggggtcatgatatggatg

SEQ ID NO: 253492 - DNA, 138 bp, Gossypium hirsutum
cccacgcgtccgggattttaacttgaatttgccgcctgaaagcagtggccaaaaagactctcacattgcggatatgaatgctgattttgttactgagctttgtagctctggtgcaagccccgtgccagtgaagcacat

SEQ ID NO: 253493 - DNA, 278 bp, Gossypium hirsutum
  unsure (1)..(278): unsure at all n locations
tcgcccacgcgtncgattgagacctcgggataccattcacatgatgcaacctggtcacagtccagagaaccagaggcaaatggtggtacctgagctccaactgcacattcaagagaacagccagggaattgctgccttcaatgggttgacttctgcttaccctaatcaatcaaccccatcacctgttcagtcatatccaggtcaaccccagaagtcccatgggctgaacaactctcttcagggttctaatgggtcacagcagcaagcatatgccatgc

SEQ ID NO: 253494 - DNA, 422 bp, Gossypium hirsutum
aaaaataaattacgcatattattataaaaaaggacatcagcataaaggggggggaaataaactggagcgggggcagcactactcatatcgaaacctgctctctctatccgaacacttcatttcagaccattgcggattgctttgacaattttgccaaaaagattttctatgatgaaaaagcagtgagcaagccacatgactgcaagcaacactgacatctttgtgcccactgctaaaccagaagcattggctatcacacctatttgcacatgagaaacatctcaccctatttgatattctaaacaataattcaatggcttcttattgttgaactggtaagagactatacgttactagtgatttgtggacaaactatctattatgtaatgcggacatatattattagttacattatgtttaaa

SEQ ID NO: 253495 - DNA, 274 bp, Gossypium hirsutum
  unsure (1)..(274): unsure at all n locations
gcaaactgggggtgctttgcttcatnnatccggtttntgattccttggacaaagtggattaatgaagcaaagcacactgggggtgctgatctcgaacctaacgccggaacgtctaaaccgattcaccaaggcgaccacccaaccaagatagaacatgctatgatagcgtcacatgaacatagtgatgacgtgtgtgaacatgttgaaaacccaaagtggatctccttcaaagcagtactgatgctcctagtaggcaccttgattgcagttgcat

SEQ ID NO: 253496 - DNA, 394 bp, Gossypium hirsutum
  unsure (1)..(394): unsure at all n locations
cagtattttctcattacacatttggcagatctttcgttgtgccgtcctttcgctggcctaagtgagctctcattnntcctctttgtcaagacaccganntttccaaatcttctcttctccttcccaatcgcttgtcttggtggtcttggcattctttcttcaacacacattacacttctttcttgtgtagtcgataattccagatcggtacccttcttaaactcgtaacttgcttcttttgtaagttcatgtgctaccccatcccaaatctaaacactttcttgaactgacattcttcaaatactctgcttaatgtttttatgtcatgtatatataagcataaaattattgatcctcatttgctgtttggacccgtctgataatactgagagca

SEQ ID NO: 253497 - DNA, 430 bp, Gossypium hirsutum
actaaagcaatatatgctcatttgtttgcagggagcggtttccaatcttgcttacgcatcttgagtgtgtttgcagattgtcaaactttcttagtgactatgcacattaatgttcacagcatttattagagtgtgagttcctcccatgcctttgcttttcttcttttaacctacttcataattgcaaattctctagttttgctccaatattgcactcatctaactgtatgtgtgtatatatatgcatgtagctatgtatttatgcttatgatatctgctaatatagctattaatgggatttttagaaaaaaatctattcttgaaagataatactatttacacatcatgttcaaattatggtaaaaaagtatggattagatattatataaatcttaaaatatatatttatatccaatactcctactcaaat

SEQ ID NO: 253498 - DNA, 406 bp, Gossypium hirsutum
gtttccttttacatccaaataccctttgcctttgaagtttgaagctttcaaactgttggcaatgttgaatcttttttttttttttcaaaatatttgacagccaacatccatgaattattgtctttcttcatcaatttctttcctttttgtaaaggttgatcctttttattctactcaattacataaatttctaccctttccttttaaagattttattttgtcctttttgttgacctttacttatctccctttgttcatgtaaaaagggtttttttttctttttgggtgtgtttatttgttgaagtttcaaacaatacccttttctttctatatatgaattaagtctttttttggttcatttcttcttcctttctgtcgataccctttctttatagtatctcccaat

SEQ ID NO: 253499 - DNA, 431 bp, Gossypium hirsutum
agaaagaaagcgcccggggccgtccggctcgcattccgacccaccctaccttctcttcgctttcgagccaacaacctcttggggagataaacccaatatcggtcgggactttcctcaccatctgaaacctacaaacgactataatgagagaacaaacactttagaacaaacctccaccatttacaaaacaaaaataaaatgaccttaaatccgctggttccaaaccaaacggtcattcaatgccgccatcctcacatattcatgcactccattaactcaactcccacaaatctttcttcttaagccttccaccaccagcttatgagacgcttcattcaccaaccgaggcacagcacgaatctccttccacaactagtcctctaaagcacatcatactcgcaaagattaaagccctctcacaagccatttct

SEQ ID NO: 253500 - DNA, 397 bp, Gossypium hirsutum
cggacgcgtgggtcttgagccaacaaccagctgtgcttcaataaacccaatatcagccaatactttcctcaccgtctgaaacctgaaacgagtataatgagagaacaaatactttgaacgaacctccaccattttcaaagcaaaaatgaaatgaccttagatccgctggttccaaaccaaacggtcattcaatgccgccatcctcacagattcaggcactccattaactcaactcccgcaaatctttcttcttcggccttccagcaccaggttgtgagacgcttcattaaccaatcgaggcacagcaagaatctccttccacaactagtcgtcgaaagcacatcatactcgcaaagattaaagccctttcacaagccattgcttttggcacaaacgc

SEQ ID NO: 253501 - DNA, 459 bp, Gossypium hirsutum
aaaaaaaagaaaaaaacccttagagaaaatgaaaaactgatattctccgaaaattgtctatttatgtagaaaaatataaggaaaataaaagtaaaaattttgcaactggactgaaaggatatgtcgtcgaaggggaagggaaaggagaaggaggtggtttatgggaaacggaaggtcagcgccggaagaagcggtggtggagcggaggagaaccgtcggaagcggaagaatcggggagttcttcagttctttgaagacgctgctgatgttgatgacaatgaagccagcgatgacagcgattttgatgattattttatggaagaagaaccagatcttaatgcaaataataatccttggaaaacccataaccttccatttgtccccaaggaagaggtgatcgaggaggagtttgataaaatgatggaggagaggtacaaggatggtgctaggtttatgtca

SEQ ID NO: 253502 - DNA, 166 bp, Gossypium hirsutum
tatttattccacccatccccaaaaatctgtgagtgtcttttccacattatatagtgccaaaccatttctcccctacccagattatatttatcttgcccccaatttccccaaattggcaaccctctacatctcctcaaagggttgtagcagaaggaagtctcgaact

SEQ ID NO: 253503 - DNA, 431 bp, Gossypium hirsutum
  unsure (1)..(431): unsure at all n locations
gtttattttcttcttgttttgaaatttcctctctttgggtcttcttctccttagactcgggtagtctggctcgcttaccgcatcatacctagtttgatcttcagcgtactcaggaactcccatttccaggtatgtntcttctcctctttttaacgtttctgttgcaagaatgtgtgcaaggccccccgtttttctgggtgtatgttgaaatctaatattactaagatcatttttttcctcttgtattttttcccccgattttcttataattattttcttttctctgtgttttattttgtttatttatcatgttttttttttttatatttaactgttttctattattattttttttaagttctttctgcaatttttttcgcaacttttcttccttcctttttactccaattttttctcctagtttttttttt

SEQ ID NO: 253504 - DNA, 328 bp, Gossypium hirsutum
gaaagctgcgcacgcgggcacgtaccggaactccattgtcgtcccaaacctccctttttattcttcgtcttctgaaaaaatttctttgaaagggcagcttttgactacaatgggaggaaagtgaaagggaggtaaggggctcggaaagggaggagccaagaggcatatgaaggtcttaagggacaacattcatggcattaccaatcttgcaattcgccgtctggctcgtaggggaggtgtgaaaagaattatgcggtttaatttatcaataaacccgttgcgtattgattaaattttttttataacaaaatttcgttgatgccgtgac

SEQ ID NO: 253505 - DNA, 275 bp, Gossypium hirsutum
gttccttatcggaagtcttatccggctataccggacagtcattatgatatttcgaacccgaaagcagttattgaagagttggataggattgaggagtttctcaattgggtcagctacattttccctgatggaagcttgtatgaaggcacggtttgggatgatttggctcatggcaaaggtgtttatgttgcagaacaggggctggtcaggtatgaatgttaatggttgcaaaacaatatggaaggtcatggggttgttgatgtcgttacatctgt

SEQ ID NO: 253506 - DNA, 251 bp, Gossypium hirsutum
tcctccatgttcgactcaaccctcccgtcctatttctcttgggccgatagcgaaccgggaaaaggccatcttgagaatcggtcgtgatctccatccgaatcgtattctagacaaactttctcagcgactgacccgacccatgttccctgctaaggggcgcaccacagcgtgagagcccattcgttcccggaccctgttgcaccaagaggcgctgtctacaattcctgttgtttgggaatgcagccctaatc

SEQ ID NO: 253507 - DNA, 429 bp, Gossypium hirsutum
  unsure (1)..(429): unsure at all n locations
ccgcaatgtgtaatgaacgtaaatgagttgcgaatataaatatatggaccgttggatatacatacttggggcacatcgatccaactaaaggaatgagcttggtcaatgttcatggctgccattttgatcacataaaacaattcagaaactgaagcattatccttgaggtatcatgttggggctcacatagattgactaatctgttatctgtatattttgtaggcgatggattntgtctagctctaaattagaacatttgcctacaagttcaatcattttttgattttaaactctgaattattgttgatttagactagaatatttgactttgtgaaattgaattttggacttttgaaacttgattgaaatttgggctaatttgctaaaaaaaaataaaataagttggtggatttgtcaccatttaagttt

SEQ ID NO: 253508 - DNA, 412 bp, Gossypium hirsutum
  unsure (1)..(412): unsure at all n locations
cggacgcgtgggctctctctaaaccagtaacagtgaaaccttctcttgagtcccgacaaatggcagaggaggcgcacggtaaccccgccgccgaaaaagaagccaagggagcggcggcggagatggacgatatcgagtcacgaattaccaccgccatgcgctctcgcgttggccacttcaaggaacaatccgactcattgactttcgagggagttcggagattgttagagaaagacttggggctagaaacgtttgcactggatgttcacaagagatttgtcaagcaatgcctgttaaagtggttagatgatggcaatgacaatgaaggctctagtggaacggtggagaaaaatgtaagtacaaccactgaaggaacagaatctnncaaaggacgacaacctaagaaagaaat

SEQ ID NO: 253509 - DNA, 442 bp, Gossypium hirsutum
taccaaaccctagctcttttccacccaaaatcccaaacccacccctcttcccactgggtgcttccattcatgtcgtcgattgcttcccttcacgctgctttcttcatcatctccatcaatagcttgcttcactttcacttagtggctagttattttctttttcaaagttaaagttttaaccgtaaagttctggtgattgtttgcttttccttaattgaacatgtcatcattaaggaatgctatcagcagacgtgctcacaaggaacgagctcaaccgtcatcgaggaaaaatattgggtttcttgagaaacaaggattatgtcgtccgtacgaaagcattccacaagaaggaagaaacgttacggacaagtttatttgtttagtgcattcaattcttgctggttatattaatatatgtgctcactaatttcttcctcttttt

SEQ ID NO: 253510 - DNA, 290 bp, Gossypium hirsutum
accctcgctttcttttattttactgaatttctttaaaaacttcgcggttatataactttgctgcagtgatttacttcttctataatttatacctaaatgatctctagtattcttttatttattcaacgatcccttctcacccatgctaaatataatccttatctcatccttattaccaacgcctacagtcattttaatcacgaacattggaaactcattatccaccagttccaaaatgaaacaacagcttcactctttttacatgaccaataattcgtattctcaatttt

SEQ ID NO: 253511 - DNA, 219 bp, Gossypium hirsutum
ctttccctactttctctcacttcaaggaacgactttagtctcatttccttaggcttcaagtgattgaatcagatctccagcagtgacacttttctgtgtttgccaagaaatggcaggctggggtggtctgtcttgagatctatcagttaaagagctgttttttggagcatttttagaggattcggaattctgggttttttagaataggtccgataaaat

SEQ ID NO: 253512 - DNA, 207 bp, Gossypium hirsutum
ctttgaacttccgcttcgccgattccacactggtactctcaacctcaagagcctgactcaaacataaaagaatcaaatcggatctatttattttaaaagcatacctttttttctttgaaatattaataataaattggtttctcaaatatttgattgaaatggagttgttagatggaaacttaaagctcaaagagattcaaaagcttc

SEQ ID NO: 253513 - DNA, 329 bp, Gossypium hirsutum
cggacgcgtgggcgcagtttatgcagacccgacgcttacaatcaacagcttgaaggagagaatttcactcaggtcagctgtcgttccctttttctcatgaatccaactcgctgcattcgctgattattagagaaaaaaaacccaatcttttgatagtaacaataaataaaagtaggagaagctgcctcctccatggcttcagctccttccaagctctatgcacatgatgttagccttgtggtagttttgctggaactaacccattttctggagctcctcctcactctctttttctcagtttctctcccatgttcttgcggttttgaatg

SEQ ID NO: 253514 - DNA, 202 bp, Gossypium hirsutum
agcagcttgagtttatcgaccccctcttggaatctccttaatgctagtcctcctgatcagccgaatacaagagttgggcttggtatgagaggagtaattagtgatgcgtttccatctaccttaagaagagcaaatccaggaaaccaacaaggacctttaccccatagtttatcatcaactggggttgccgggcattctagtt

SEQ ID NO: 253515 - DNA, 406 bp, Gossypium hirsutum
gcgaaaaacacacacgctatagtaggaagagagttttcgggggagagaaaccctaagttttctctggcgtttctggtttttgtgatttttgaaattcgctgcttcaacggagactcatttcaggtatcaatctcttttttagtttcagctccatgctttttcacttgtatttcagtgggttttttcttagtgtttttggttttcagctttagaaatcactgtttcattccgtctttcaaatctacagatgtcggtcttgctcttcatttttgtttgtttatcgtctagtacacgttcttctttatttttggattgattgtttccctctgtttaatattataacttttgggttattttctatttcttctaaatctttgcttagcacaatactaattgcctaaacaaa

SEQ ID NO: 253516 - DNA, 396 bp, Gossypium hirsutum
gcaactggaataaaaattcttataaatagatatccaatcaaaatttacatggtatactcaaatacttatgtagatacaacataactttttctcttgcacccaagtagccttttttacaaaaatattattacagaaaacatgcaagaattgttatatgatcagatacatggacttgagtctgcatctggttgaacattccattaacaggtggtcatgcctgaatcagtgttaaacttgagaggatttcatccatttgtccttaagaagactgatcttatatcatacagttctggagaaaagactgaatcagcctcgaactagagtatcatcatggtcaatgaagaagcgatgagaagataaactgcagcatattcattgtaaagtctgctttgagca

SEQ ID NO: 253517 - DNA, 364 bp, Gossypium hirsutum
cccacgcgtccgcggacgcgtgggtcaaatctcagtagcagcactgtacagctctaggcaattcatttcttgtgaaaataagggatacccatggagttttcccctggtatcagctatgatcaattgtggattcatttcttagtaggagttacgatgcctagaccatccttattctggttctaccatgaatttccattcgggtagaaaagatgcgcagaagcatgcagttgataaatcatgcatctattgcaacaaagtatttgacgactatctagctcttagtggccaccttaggattcatgaggaggagacattgagggccctgaattttcctggtcgttctagtaattccatcgacattact

SEQ ID NO: 253518 - DNA, 367 bp, Gossypium hirsutum
cttgtttttattgcccataaacacgcgagtgcgttctgctggaaacgcggtacccacctcagcatgcaggatcgtccatgaaaataagacttttccttgattgcttttagcaacaattcccgtttccgatctggaattcccctcatcaaaggccgcgtcaaaattgattttgattcttccttcgcttggcgtctccacagtgccacacagagaactcgtcttctaggagcggaacagccgttgaaagcccgggcagccacgaaagactggtcaacattctcgacatcaatactggatcttggacataatagatttgacacaagtcgtttataatacaaatttgaaaaaataggaatatagttctttg

SEQ ID NO: 253519 - DNA, 387 bp, Gossypium hirsutum
tgttgatgctggcattgcacccattgacatagcaaccagaaagatgaaagaagagatgaaattaaaagaggcacaggcaagagcagttgctgaccatggagaattggctctaatctctgtggagggtccccaaactgctacacaagaaagaataacattgagaccgcctatgttgcaggtggttcggttagcttctttccagcatgctccttctgttccacctttcttatcattgccgaaacaatataaagttgatggggatgatacagcaatgctaaaagagatggaagaaagaaaggttaatgagatagctgttggtgggggaggagtttcagtagcagttactcgttttccaactgagcaaaaacggcctgtggaccactaatt

SEQ ID NO: 253520 - DNA, 403 bp, Gossypium hirsutum
gttttctctgtttgccatttgccttaatcatcttcctctttctttaaaacctcttcctatttaatttccgactaaacttgcgctgaattccatggctactgcagaggttgtatcagctcagactgcaatccatgaggagaaacctgaagaagtggtcaaggttggagaaattgcaacagaagaggtaccggctgttgctcctgcagcagaacctgttgctgaagaaccaaaggaagcagtgcctgaagcagcatccggagaaccccaggctccagaaactgaagccacagttgaaactgaatcaaaggaggtggttaaagagcccaaggctgtgactgaggagccagaagttgagaaagcacagagtctacagaagcagcagcagcagcagcagcagcagcag

SEQ ID NO: 253521 - DNA, 404 bp, Gossypium hirsutum
  unsure (1)..(404): unsure at all n locations
aatttccccccttgaaacccccaactttacaaacataccgtcctttaaaatttttaactccatgcccattgctatcttttcttcctcaaccccaattcttaaacgcccaaaaatctctcttcctccatggaagctgcttcgaggaatttattgagcttcatttccatgctaccgacatgttttctctttctcaaatctcctttttctttttgttttctcttgcaatctgcttatgttcggatttgaattagcttattattattttttgttctctctagggttttagtggatccattatagatgttttagaaatttaatgaatacggtttcgctcttttccttttttcccttttggttctcattacggnttcattctttatcctatttatttttcctaaaacttt

SEQ ID NO: 253522 - DNA, 284 bp, Gossypium hirsutum
cggacgcgtgggaaaaaaaaaaaaaacataggggaaataaagacatagggagatacaaaaaaaacttaaaaacgcacatgtcgggcgatattagttattttaatcctaccaattgctgtttcctcatttgatgatgttatataatggcacgtccttcaaattccctggctatatctaaacaattctttttttggtgcaagatccttttgaccgtttggtttagttttaagacatttgtccctatccgcacttttgcattattcatagctttcatgacgggtggc

SEQ ID NO: 253523 - DNA, 357 bp, Gossypium hirsutum
  unsure (1)..(357): unsure at all n locations
cccacgcgtncgccctacccacagaatagccattcctcacgtttcagtttcaactttacccttctcccttcctcacgtctgaaacctcttcttttgttttttcgttctttttcccatttccttccagcctcttcactaattttacccttcctcacgtctgaagctccatcaacgcttcacccttgacgccttcgccctctcagcgattgggtaatatagagattgtacaatacaacaacatcaagtttcaagtatgggatttaggtggtcagacaagcatcaggtacttgtttttaagctatgtgttctcaaggaaacatcccaatacttttggtacagatgagattttcaattgat

SEQ ID NO: 253524 - DNA, 306 bp, Gossypium hirsutum
aaaatttgtctattaagcttaaaatatcagaagggattgaatatcggtgatgttgggcgctttaaggagaaaagttgcgattggaggctcgtcagcctcggtattaaggaaagcgattcggccaggtatttcagcatctagagtttctgtcaatgttggagaagagattctattacttcaacctagaggaattgcccatgtccggaacttttctcatctcattctcccaggttggtctggtggtttagcaaaaacaagggatgtcttttctagcattcagttagagactatcatgcaaaagtcatg

SEQ ID NO: 253525 - DNA, 421 bp, Gossypium hirsutum
aagagggggaatgcatattacggaagctttgcgcatgcagatggaagtacagaaacaattgcatgaacagctggagctacaaaggtcgcttcagttacgcatagaagaacatgcaagatatttgcagaagatgttggaggaacagcagaaagctggcaatgccttagttccgaacccaaactccgaactgccatcaaggattgcatcagaaaccgagccttgtgagtccaaaaccgagtcaccaacatctctaccatcaaagtataaagctcccaatgtggaggattgtaaactgaaatcaagtccgaaaaggcttcgtatggacgaagccgaggccgaggtagaaaatcctgagcagtaacaagtgggaattttgatttggttttgtagatccatccacagtagaaaggtagtgattgaa

SEQ ID NO: 253526 - DNA, 377 bp, Gossypium hirsutum
cttttccaaatcttttcagatggatcgttaccagagggtggagaagccgaaagcagagacacccattgacgagaatgagattcggattaccagtcaaggaaggatgcgtagttatatcacttatgccatgactctgctccaggagaagggatcgagtcaagtagtttttaaggcaatgggaagggccattaacaagactgtgaccattgtggagttaattaagagaagaatcgttggtttacatcagattacatcaattggatccatggatataacagatatgtgggagccgctggaggaaggacttcttccattggagaccaccaggcatgtgtcaatgatcactataaccctttcgaaaatagaattgaatacgt

SEQ ID NO: 253527 - DNA, 295 bp, Gossypium hirsutum
atgtgagccatcacacccagcggggagtttttaataagggtattggactaatagctccatcttttttgtgttgcatcagccaccttgagcaatatagcagtctcctgattgatctccttacatttcttaatataagtgataaattgtgacttgtagatctaacaaaaattaggtgccctcgttgcagctgccacggaaagctggtctaatatcaaagcaaactatccttcttctcgagcagagtttttaaggtaggagtgtgtgtatattgacattttcctagcagttgctgaag

SEQ ID NO: 253528 - DNA, 414 bp, Gossypium hirsutum
ctttaatttcttgttgttttagcatgttgtgtgtttgtcgatcagtccttaattataatcgtcaattgcctaagtgcatgcccactgttctgcttcattgaatgcatgttaagcatgttgttattttatgtatctcttgtttgcacgattgtaaagcaaaccactgttttgatcattgatcgcgtgatcatggcatgcttctatattatattggatctgattctactattctgatataatgacattactcactgcgtttggcttgattggagacaaaggagatctatggagttttggtggtcaattcgcaattaatggagttctggcggtaaatctacaattttagaattatgtttggagttctggtgatttgctcgcatattgttctggcgattgattcgcaacactgttctg

SEQ ID NO: 253529 - DNA, 424 bp, Gossypium hirsutum
ctccagtgagtttctttgaaagaaaatcagtgaaaacagagagtgacttactttgatgttcgaactttgaagacaaaaaaaaaaaatgcttctccaaactacaatctcatctcggcctttatatcaacggcatgcgtgcttctcagcaacccaccagcttcctctttattactctttcctcgcatctgcctctctcaacttcacccgcaaaaacctcttcttccaggccattgttccgtgctatcgtgaaccagctttgaaaaacacaggggcaggcaatggagtgaatgacactaaatttctcaacctacagatgtttcaaaagggaatggcagcaaaatcttttacgtcatcacgctttgatgaatccttgaagaatcatcgagctatggctgatgacttaaatgtgaagaagccattgagt

SEQ ID NO: 253530 - DNA, 423 bp, Gossypium hirsutum
cggacgcgtgggaaaagattaaaagaacacttcagacaaaatggactttcgaaggccagttgaatttattggtattattcttgaatattgcatcattgtacaacctccactccaactagtttactgagaaagtattttggaccgtaaaagagtatttatttttgacttgctatggatctaacctttacatccaagaatatgctgcatctacctcattatatgatctgctgcctggtgatcatggtgcatttactaaaagccctgataacttcatggtactctacatacatatatttatgagattcttcatctgattggttattaatgtggtggtattacgcttcagtactttgatttgggtagctgttaatgtattagcttagtttgatattatctagcatctttggttatgatgtttttatt

SEQ ID NO: 253531 - DNA, 243 bp, Gossypium hirsutum
ccgacgcttacgctttctcgtagggtataaagcacctttgcagtgcgctactctctacatttctagaatacagcacttctagtctacatgacggatatggttcgaatccttaaatgcctatctctcgctggatacgtagccacacggatctctcaacggatctatatcccaactctaagctatcaaacactcacaatgccaatggctgccttacaaattctacattcagaactgctggatgag

SEQ ID NO: 253532 - DNA, 324 bp, Gossypium hirsutum
cggacgcgtgggaaaaaaaaaagaaaaaaagggaaaaaaaaaaaaaaaaaaaaaaaaaaaaaaaaaaaaaaaaaaaaaaaaaaaaaaaaaaaaaaaccaaaaaaaaaaaaaggggggggccgttttaaaggatcaaagtttacttccccttccttgcaacttaatagtttttttttggggccaccaaaataaaattaattgcccgccgtttaaaaacgtcggaattggaaaaaccttggcgttcccaaattaaatggctttgaagaaaatccccttttcccaagttggcgtattaccaaaaaggccccaaccattcgcctttcc

SEQ ID NO: 253533 - DNA, 278 bp, Gossypium hirsutum
ctgaaatggagaaattacacgttgtggttatgcctaattcaggctagggtcttgttattacttatatggtaacatatgtctaaacttatctaacacgaggcttaaaaatcagctttgtttactcagagttgaataataggaaggaactgggtgcattaccaaagaacgaggacaaaaatggtttattttatctactgggaatagaccaatggagctaaaagatggggaagataggaataaaggctggaagttaactgatagttaatgcctgcattgtg

SEQ ID NO: 253534 - DNA, 376 bp, Gossypium hirsutum
cttgttattacttgtgatggtctctatgatcttagtaaggagctttctaatgtagatttcgtgttgacattattctataaattgattgatgtgagtggaaatgctgttccttgttcgctaacaaacccgttaatgctaaggctaatatatcagaaatgttgaatatgaacaagccgacattcttttataaagtaaattaacatgactaaagaaaactcgattcggatatgttgtttatgaatagtataacagaaatgctattgagacactgttttattgattctttcgagcatcttatacctgtcgacctttttcttcttttaatatcagtatgaaatgtcttgataaaataatgttgatgtgttcatatttcacg

SEQ ID NO: 253535 - DNA, 334 bp, Gossypium hirsutum
ctgacagaaaaattgctgatagatgtactagtataaaacagggtcatcagagaacatagtcatgcaagctgttaatatcttgatgactgatttttacatgtttaagtcgcaaaagtggtcttgaaatgaattatatagtttcgtattggagctataagctgccaaatactccaatgccaaaagctgtcaaagaaattctacattcagaactgatggaggagaaaagcacctctgtaaatgtaggaggtggtggtgtaaacgtcaatacaggaaaagggaagcctgggggtgacacccatgtgaacgttggaggcaaaggagttggagtgaacac

SEQ ID NO: 253536 - DNA, 287 bp, Gossypium hirsutum
  unsure (1)..(287): unsure at all n locations
cgcaacaacactgaaagccaatggcttcctgtctgaacagcgcctgactgtttgacggtggttcgnttcttcaactttgtcctcttgcttcgacgccgttagactattgtctgcgtccactacgctttctttctattcttgtatacaaatccctcggtttctctactctgtctcgccacaagaggggatcgggtgtgagtatgtcgagcaccggacgggttaactatgtagccagtcctaaatgcgctgctgcggatcctgatcagttgaagagtgcttgagaagat

SEQ ID NO: 253537 - DNA, 309 bp, Gossypium hirsutum
  unsure (1)..(309): unsure at all n locations
cccacgcgtccgtgaagatgtcacgaggtcccgctcaggctcttcgtgtttcattggtgttctctctctgcctatatcccttgcactccctatgatgaagagttgaaatttttgccatgtatgattgcatatgtagattttcattttatttattaagtacggagggaatatagattatgaaaaaaaaaacaaaaaaagaaaaaacaaatcaataaaaaaataaaaaataaacaaacaaactncgctggcttttggggggtctgaccctgatcgcctttcggatcgaggcgacccacgtactgtatccca

SEQ ID NO: 253538 - DNA, 193 bp, Gossypium hirsutum
tacttggggtaattggctttaacggggcccaatggttaatggtaaaggcattcttggtattgacaacatacttgaaaaaaattaacccggaataacaccattagaattaatccgatgggaactggttccgtgaagccttgggaacgtccgcccggaatattgggaattaaaacaaggttttccttaccttaac

SEQ ID NO: 253539 - DNA, 429 bp, Gossypium hirsutum
  unsure (1)..(429): unsure at all n locations
gcaaagtccactctttgccctcttttactggcttttcttccctatcattttcttctctctctctctttctcccttgaagtgaaggcttctattttatctttggggggatttagagtttcagcacttcagcttggtgtttaaaaaaacaaaagaaagaaaaaaagaaagaaagagaaattgggttctccatggattcatatgaagcaacgaggatagtgttttcgaggatccaaaacttagaccctgaaaatgcttcgaaaatcatgggttatcttcttattcaagaccatggagagaagggaatgatacgtttagccctttggccctgaagctcacatccactctttaatcctcaaagccaaatcccatttgggactntccattttaaacccaccaacgccttctactccctcttntccttctcctttc

SEQ ID NO: 253540 - DNA, 195 bp, Gossypium hirsutum
cgaatttccgggttgaaccaacccgtccgttcttttaattttccttaaaaatccatttccattcgttattcgtaattcgctatttcgcccatgcctaaaactaaaagggttctttgaaagttctttgttaatggaccatgcttcaaaggggaaaatggtaagttttttcatgattggaaggatcccccaaataat

SEQ ID NO: 253541 - DNA, 175 bp, Gossypium hirsutum
attcacttcagctactaattttcaagttttctggaacatccaagacacctgggattggtagaacctaacctaaccaaggtgtaccaagcctttgcattgtttgcttaaggaacaatgaataatggggctggaagacagatcaatggttcttccggagaagatgatgatgaaaata

SEQ ID NO: 253542 - DNA, 443 bp, Gossypium hirsutum
gaatgaggttgagaacgaggaccttgtttttactctggggaccatagttgacaagtttggggaggaaatggcgccatatgctcttggattgtgtcagaatctggcagctgcattttggaggtgtatgaacaccacagaagctgatgatgaagctgatgatcccggtgcccttgctgcagtcggctgtttgcgtgccataagcacaatacttgaatcagttagcaggcttcctcacttgtttgttcaggttgagccaactttgcttccaatcatgcaaagaatgctgacaactgatggacaagaggtttttgaagaagtctttggagattgtttcatatatgacattcttttctccggctatatccttggaaatgtggagcctttggcctttgatgattgaagcattagctgattgggcaattgacttctttccaaatattttg

SEQ ID NO: 253543 - DNA, 175 bp, Gossypium hirsutum
aaaaaataagtggttggtggttatttggaaccggaacgaaaaccttaatgggggtttccggaagtcattcccgagtttttaaggggaatcgttaaagttggtgagaaccttccgcctttattggctttgaaaaactggcctctaatattgcttgcttaaccggggaccaatcccg

SEQ ID NO: 253544 - DNA, 410 bp, Gossypium hirsutum
  unsure (1)..(410): unsure at all n locations
cggacgcgtgggcaagcagaagcttttggaattagaagctatttcaaaatagcactttcaaatgcataataagaaagaagcgtgcagaaactttcagcgcggcagctgtcaatatggtgaaaggtgcaagcagtggtgccccttcattgcggcagcctgacaatcagcctcaggcaacaaaccatagatgcaatgatcctgagtcctgcaaacgtattattgctgaagattttgagcacgagagacccttgtggaagcttacatgctacagccattggaaaaattccccttgcgatattgtcggtgatgtcagctatgaagaattgcgggcagcagcttatgatgatgcaaaacgtgggttaagcttgcaatctattattgagcgagagaggaanttactgaattcaaag

SEQ ID NO: 253545 - DNA, 379 bp, Gossypium hirsutum
acccactcgtcccaagaaaccagagacgggaaaaaaaacaaaagcttacagaaaaggagaggagacacgaacccagaattaaagaaaaactacagcaaagaaaggttctgtgtctcctgttattgcggttcgaagagatgatggcaatggaatacgagagtaacaattggatttgggacggggtgtattactgcccacgtctctttggtggcctaatgctaacggctgccttgcttggtttgtctaccacttatttcggtggaattggactgttcccattgtcatatgtttggtcagattcagggatcttccacaagaagaagtgtgagaagaagcgcattcgagtttacatggatgggtgctttgatctcatgcatta

SEQ ID NO: 253546 - DNA, 206 bp, Gossypium hirsutum
cggacgcgtgggcttggaggaaaggaggattaaggaccttgtgaagaagcactctgaattcattagctatccgatatacctctggaccgagaagacaaccgagaaagaaattaatgacgatgaggaagatgaacccaaaaaagatgaggaaggaaatgtctaggatgttgaagaggatgagtcgaaatccgagaagaagaagaaga

SEQ ID NO: 253547 - DNA, 158 bp, Gossypium hirsutum
acgcatgttttagttcaccaactcaccctaggtgagtttagatacgctcatgcaggaattgacgtagaatggaaggcggaggatcaccatatgctgcagactccttggaggcctaggctgatcctttactaccttatcaatattcagttcgggaaact

SEQ ID NO: 253548 - DNA, 208 bp, Gossypium hirsutum
aaagaatcaaatggaatgaaatgaacgtcgactgagtggatttcagcaatgaaaagggtcttctcggcgcccggagattacatctacttcaagtcccaagtccctttttacaagatccccattggcaccaaacaatggcgggattattattttggtcccaaagggggtacttcaattatttttcttccttgaacctgaaggaccggaa

SEQ ID NO: 253549 - DNA, 408 bp, Gossypium hirsutum
ggggtcatgacgaaatcaaagttaaacacttcaactacgataaagcatttccatgttttgcttatcagcgtctaaaaactcgccaccatatctttcattgaggtctacactattcttgttaccaaacaaccccgctaatcggcggttatccccgccactgatcgctccgccggttctttgcttgcggtgacgcctcggaagcggttctctctatctgttggtcgtcgaatttcgaaacttcttcaccatggctggcgctgaggattttgttaaaggaaatgtctatcccaacggcgtcgcaatcattactctcgaccgtcccaaagccctcaacgccatgaatttagatatggatgtcaagtacaaacaaattcttgaagaatgggaatcggatccaaaggtcaaatg

SEQ ID NO: 253550 - DNA, 378 bp, Gossypium hirsutum
aaagtaggtaattggagagtagtgcataggctcaggcaatcatggccatctcaagtgtttgtccaactgaggatgctgttcaagcatttttggagcacttggttgatcctttgctaccttctaaatattcagttcgggaaactccatcgttagctactcaggaattagtagccaaacaggtacatgctgttgtgttactatacaactatttcctaaggaaaagacatccggacttaaggtatctagattttgagaatttttgcaagtgggctttagttttgaagccaaatttgaagtcacatatgaagctcatggtaaggactgatgatactgagttgagtgaagttgaaagtcagttttcactccttgagaaagcca

SEQ ID NO: 253551 - DNA, 143 bp, Gossypium hirsutum
ctttaacattcaccatataagcataggtaaaccaaaggtggaagacataggaggtggggagaattaaacagcacttattctggacatgagagccggatcatcagacactattgaaaaagattgatctctgataccttaagact

SEQ ID NO: 253552 - DNA, 407 bp, Gossypium hirsutum
tactcattaggtcgctcatgcttaataacaataagggtggttccagttcaaaggatgtgaaagctgcagctgagggtcctagaaagaggaaataagcttttggggatcagtatacaacacatattatgcatatgggcacttaaagaagagcaaagggaagatcatagtcatagcatctacaacttgatcctaaaatgcgtgacgttgaaatcaattggaatcagcctctgagtgtgggaaggcaatagtagaaggggcctgccgttgatacgagtggaccaaactgtggaaggtgttttgccttggcatcatggatcggtggattggcttcctattaatgccttgtaattcccacaatgaagtacccaccaagaagttaacgcattttgttaatggactaacccaat

SEQ ID NO: 253553 - DNA, 312 bp, Gossypium hirsutum
gaactctcctgctccagttcctcctgcggtaaaagatgattccaagtcacccaatgaatcctaatgcgatagcttaaggaaattcggcatctaaagccagtaattcaagcctcctctaattgctattttcatagactacccttatatttgtaactcatccttttgttgaatgttgaaaaccatcagcaacatgcatcttattctttaaacagaactttaaggccatgattaggctttttaatctatgcatatttgaatactgtaatagctatgtctgacatgaatattcacgggtcacggatttctgaagca

SEQ ID NO: 253554 - DNA, 408 bp, Gossypium hirsutum
cccacgcgtccggtgatagttcaaaaggagacagagtgggatttgcttcccagttgcatcttttggttaatgcattggggatgtcatttgaagctccatttatagaggattttgtgtcagttgaaaatcctggttcagacaatttggagtctactatggttataccaccacctaccgtccttgaccgtgtgcttaaagatctctttcttgaggatccccagttacctgattttgctaaagatgaacataagagttctcgagctattaaaggagcacctgttgagtctctttttgcgcagttttgtttacactcactatggtttggcaattgtaacatacgtgccattgctgtgctctggatagagtttgttcaagaaattcgctggcattgggaagagtcacagccat

SEQ ID NO: 253555 - DNA, 268 bp, Gossypium hirsutum
aaaaaaatggttgggctgtttaggggggtgagtgggtgtccgggaccaagtggctttggttcagcctccaccgcccaagaggttaccgaagggattgatggaaccaacttgactgctctagttaccggtcatcgcctctctcttcttcatttctttgcaattttcacatcatctcctctctagcttccatgcttttacttttttgtttttttttcccttcttaattaccactttttctcacacacatatagactgtcattttgctaaa

SEQ ID NO: 253556 - DNA, 408 bp, Gossypium hirsutum
tccatcgtataaaggagttgcaattcgtgaacataggcgtctttgtgctttcatccctcaaaacttttagatgagaagaaaggagaaagaaatacagaaacagcttaaatgccatttttaacgatcataacttaatggcctatgcataaagtgtttattagagcagcatgccattagtttctacctccccgaataagtgagtgcctgaagttgaataaaagagatgctggttttatagtgccgtaatttgtctagaaaacctttgtagtcagccgcaagcagcatatcatacacacacacacatatatatattttccttaccatgaatctgcagtaaatgggatgtggttacacttattttcagttcatgtatatgtgcaattgttggtggtggatttgcttttgttt

SEQ ID NO: 253557 - DNA, 398 bp, Gossypium hirsutum
aaaaaaactaagctttctcctctcaactccgcgccgtttcgacgaatcgtcgtccaagatccaccacacttctctgcaactccgatgactacggagtgagcaaaggttcggccaccaggtacagtcgtacggaggtcagagacgtagcacgtacgaaggccagctgtacgggggcgtgcgtggtgtgggagaacggcgctggaggttgctgttgcagcgctctagggttttctgttaactgtcttgaggtgctgggccattgggccattgggtgtttaggctagttgggctaggggtttttggattttggatgtaaatggacattaagtggacattttatttattttatatattattattatttttttaaaaaaaaaaaaaaaaaaaaaaaataaaaa

SEQ ID NO: 253558 - DNA, 395 bp, Gossypium hirsutum
  unsure (1)..(395): unsure at all n locations
cctaatcttccggcgcgcgtctccccaatcccctaccccgccactcggtcctttttcacttcgtccaacaatgttgaagaatctatccttccggttcgtgcaatcgtatcattgcttgatggttaccataatctcactggcttcccttggtggataactattgtaacttccaccatggctatgagatttgcattgtttcccgtagtagttattcatcttcaaaagctgaaaaagattggagagttagctcctaaattgccttctccattgccaccacctatgtcaggaagaagttataaagaccattttatacattttgagaaggaaagaaaggcaaatggatgcccctcatatttttgggtctttagcttcttcttactcangtcccatgcctt

SEQ ID NO: 253559 - DNA, 408 bp, Gossypium hirsutum
aaatggatccttccatagctttcctttgatacatcctcctcctccttcttcaaacccacacttcgtttcttctttacacttcatattttccattatttttgacccttttgaatcctttctttgttttccccatttatttaaagctttagttatggcgctggatcttaacttgactgttatttccgatggtgatgacaattcaatggccggaggtttttccggttataataacaaccaaatggatagttccggcgggagctttggttcctccgtcgtcaacgccgacacagcgacaaccgccggcgacgatgactcctttttcaacgccgctgccaccgacactttcggttactccttcgacatcctcaaagccagccgagaagaagaacaggataaatacaacaaccg

SEQ ID NO: 253560 - DNA, 408 bp, Gossypium hirsutum
ccatgtcttccaagatcaacggccacgtttcgcctcagccgtgtcctcacctcctcgtcttccgttcccgcaacggccccaagccctttcgcgccctacaggattgtatccgcgtcaagccgcccggcggtcgcgccgccataaggagggaacctactgaggtcccacgatgcggcacgtgcgaggaatcttcccgttcgagactctacgcgtgccgtcgcatgtgccgcagtgttctgccacgcgcctcttcttcactcccacgcgtctgatcactcgctttccatccccggtcatgagatcgccgttgacgtcgacagagctgagctattttgcttggcgtgcggtgaccaggtatacgatcgcgacttcgacgctgccgtcgtccttgcacagactgtcaacgct

SEQ ID NO: 253561 - DNA, 395 bp, Gossypium hirsutum
caaatcatctttttacaaccttcaatcctttgtggaattgatagaagggttaatcgtaaaacttcaattgatttgggcaaaccgaaggagttgtgaaaaggttgaaaggtatgatttagacttaagttaacacaattaaggagttgtgaaaaggttgaaaggtatgatttagacttaagttaacactatttgttaagggttctttcatagttaatatatatgtagaatctaatgtatgtaacttttggcaggttgtgggttcttgaaattttatattgagaaggtagaacacacctttttaagagggaagtttctttgtttgactcgagattattagtctggtgacaaaaagccaaaaaaatgtaccatttgctttgaagttatttatgaatatg

SEQ ID NO: 253562 - DNA, 298 bp, Gossypium hirsutum
caccccaccaataacatgcaattgaaacctctcaacaccttcaccattacgctcatgttgttcttcactttcttgatcctcttcttttctggtttccttgaattcccttctgtttcctcctctatccaacaaccctttaccactccatccctcaccctttcttccaaccctaacccttttactgatctgctctctgctttcaagacatgggattctcaaatgggttgttcccagttcaagctaaaacgccacgatttgatccgtttgctttctaacagctctgggtctttgcaggaac

SEQ ID NO: 253563 - DNA, 377 bp, Gossypium hirsutum
aagaagtgttattggccttgtccttggatacgtaacaagcttagtagtagatcttgcaatattaatagaggcaaaggaagaggcagaattgccagagtacatattgggcactgtccgactgaaccgagtgaagcctgaatctgctgtaccactgaacgcttgaagttaaccactgtggctaagccggtccttaaccatcttgtactggttggtatgaatatgagtaggctccaagtttaaaagttttatttgataatagtattaaatgatggatgagttaggttggatttgcacccagcttttcaattgtttcagtttacgatttgagaagactagcgttgggttcatagttgatcttcgaattgggggttgatctt

SEQ ID NO: 253564 - DNA, 258 bp, Gossypium hirsutum
aggaaatggattgggaaatttaatatcaaaatgttggcccttgattttaaaccgttaatgaccaaggggtgtttttacttggcctatttttttttaaaaaaaaaatgcttacaaaaaccccccctttgtccctaccgaccccctttttacaagctttatttggaatatttttggtcataaaacctcaacttccaaagtggattaaacccttttttaatatgaatgggggacttgccccaacttataaaaaaacccttc

SEQ ID NO: 253565 - DNA, 423 bp, Gossypium hirsutum
actttggtgtagttttcattcatggagagggggacagatcacactcccggagtggcacgcactaagatcatagagttcgatttcaagtgattgttgtaagtacatttcaagatgctttccggctgaaatttggctttccaaccttcacgaattaccctttcaacttgttcttatcaactagtagagaaggatccatggctttcgtcacacaaaccggttgtttaaccctgtatgttgttcggtgaccatgctgatgagtggataggttggcgttaatattagctagcttggagaggacgatccactcatacagaacgtgaccagactctctgcattattgaatgtcccctggtataccactggaggttctaaacatgatggattccgttgctttctacatcatgtcaaactaccccatgggag

SEQ ID NO: 253566 - DNA, 265 bp, Gossypium hirsutum
gagacacccgtacaactccgtccacgtgcgatgcgtgagctcaacgctcaaatgatcttcgctatgttcgatgcgcacaccttcttcatatatatgtcccttgtccatattctaaacaaaggcactttgagcttcagattccatacacctatgataggcatgagttctatgtatgtaaatccgatggaaagacagcggatcacgtgacgcgtccaaagattgtcagcttctaccagagtgagtcaaataagacacggttggaatg

SEQ ID NO: 253567 - DNA, 237 bp, Gossypium hirsutum
cggacgcgtgggctagcgttgagctgaagcaaataacaaaaaatttcctgatttccaagcacaagacttagatatcacatcaagcctgatcgattcaaactccaactatctttcaccagaattctgctactgcatctgctccaactacacaaaagagtcgagaccagtgctaatttggtagatctaaccggtaagtctacctgtcttcttcgtatctttggctcaaaaagttagcta

SEQ ID NO: 253568 - DNA, 242 bp, Gossypium hirsutum
cggacgcgtgggttgctttcagcacaggcagttatgtggtcttaaaaccttcccacggacttgccattgtttcatatctcatatgccctgccttctttttcgttctgcatttgactatttgtgattactatattactaagatattatttcatcgttgattacaatatttttccaattcctaatgtcaatgttacctctttgaagaaatattactttaatattaataatctccatttaattgt

SEQ ID NO: 253569 - DNA, 421 bp, Gossypium hirsutum
tcgcggacgcctgggatttattccctatattatcgcgggacctgttgctttttaatagcgcccggtatttatccattttattattggggaattgaaatcacttgcttcatccataaattttggggtttttgccccaagaaatattggttcgggtcggctttttaaatttattgatgtcggggtgggtggtcttgttggatgctttgggaaaaaaagaaaatcttgttctggtaaaattcaccagccactggctttcttttacaaggcaactacttattattcatattctttattacattgattcatagacaagctattcccttcatcgtattgcatgcaggttcacacgaatatattcttgctgtttctttaggtcttagcttttagggacatagctccccaggctcctatgcacatttta

SEQ ID NO: 253570 - DNA, 430 bp, Gossypium hirsutum
ctgggacgcagtgagatgtacagatgttaatgagattgctgagacaattaaggatagagggatgaataacatgcttgctgagcgaattaaggatttcctcaatcggctggttagagatcatggaagcattgacctggagtggttgagagatgttccgccagacaaagcaaaagagtacctgctaagttttagaggactggggcttaaaagtgtggagtgtgtgcggcttctgacgcttcaccatcttgcttttccagttgacacaaatgttggacgtatagctgtaagattgggatgggtcccccttcagccactaccagagtcccttcaattgcatctcctagagctgtaccctgtcctggaatccatccaaaaatatctatggcctcgattatgcaagcttgatcaaagaacattgtatgagctacat

SEQ ID NO: 253571 - DNA, 148 bp, Gossypium hirsutum
acgctgacgcgcagcgtgctggagattttttattcgttgggttttgccccctcaagagcttccaaacaatatcatgatcaagtgtttcccaactgatagcgtgatataccccagtcaacttcaaaggccaagagtcatcttaatggct

SEQ ID NO: 253572 - DNA, 332 bp, Gossypium hirsutum
acaggctttgaggtattggctggattcagaaaggggaatcaaattagaacagattatttttagtcaagaattagtaaaagagaacaatcaaagtaaaatcttaattttataatctatgtgagcataaagaaaaataatgtacaggtttttcgttccctcccccatttttaccctctcttatgggattcatgttgtaagaattgacgccttaattattcttgcctaaagaataagatacaagggaatagattatttactgaaaataataaccatccacccaatctggtacggacggtggcaaaaaatacggaaagaaaatcatccgtgagttc

SEQ ID NO: 253573 - DNA, 427 bp, Gossypium hirsutum
ctctcctttatctctttcattgcttgcttcgccttcggccagtagccccaatttcttgcttcgcctttcgtgcttagttttgctgcaaaaatggaatacttttgactttaaatccgttcctaaatagtagaaggaaaataccagttcaaacactcgactaaactgcatcaaatttcggatcctccatttctttaaaagaattttctcagttactgttctattccattttgatcttatttatttcccaccaatttttctcacaaacttccgcgttgctgttgcaagcagtaccggaaattcccctctctttttatctttaatcggtttccacagttatttttcttcgattatttgaatgaagctgaggtagctgttttaggaacaaaggcgatttgaaacatttttgaaagaaaggattgatggatag

SEQ ID NO: 253574 - DNA, 408 bp, Gossypium hirsutum
cccacgcgtccgcttgaacattgttcctcgggatagtcacatgtttgttttctgcgaccatgaccagaaaacgtataactgggaaacaaatattttatgtattctataagaaacatgtccatatactattttctgtgtcacattggaagtggattaaaactacaaaaaagagacttttaagatctctgtagctgaaccttgtaatcaaaggcttagtttgatcttggttattgttagtaaatatctttgcaaaaagaaggaattagtgcattggctgctctttattgctatagtacttgtatgcatatgatttgttattaggacctaaaaattatctaatacattatacaatttgatcatgtggttatggatgttgttgttttctcccctcattgttgtatttagtct

SEQ ID NO: 253575 - DNA, 336 bp, Gossypium hirsutum
aaagaaagaaagaagaagcatccctttataccccactttaagttactcaaaatttccgtacttttattttttgcatggcagtaagtctattgtcacatgagttgtctgacctgtgtcttgggaagccagcactaaggtcactttccatcacatccaccattgctgaagctcttgaggtcttgaaaacctctgatgacaactttcttaacatctggaattgggatgatgtctagtgtcaccttatatatgtaagcaaagctgggaagcacgtacctagtgccgtatctctggatcttgaacccactgttattgatgaagtgagaactggtgcttacc

SEQ ID NO: 253576 - DNA, 142 bp, Gossypium hirsutum
acggcaaaggcatcacagacagttcctctgattcatctcagcttttcccttaaacaacaagcttaaccctcacaacaatggccttcatgctggaaacccaaaatatttgttcgaatgaaaggactgcctcatcccaagggaa

SEQ ID NO: 253577 - DNA, 265 bp, Gossypium hirsutum
aaaaaaaaagaaagagaaaagtccccacgccgagccaaccgtatcatttcttctttgtagttttactttattggtagttcctcctcagcttcgccggcgcttgactctaccgttcgtctctgatcaactgcccacttaacggccaattacgtgtccatccctcttttttgctttctctagctccgccatgacaaaacctcaatttttagatctctaaattctaaattctaaatctgaatctagatttaaattcattttttttaaa

SEQ ID NO: 253578 - DNA, 187 bp, Gossypium hirsutum
gagctacaaggtattaacctatgttgcttagattcttccattttttggagtatacatgtccaatccatattttgaagtataaatatctatacccaatgctcagatttgagttctgtaggtatcaggtcaggtgtactattttttgtattttgataggtgaaatttttttggcttttaacactcttga

SEQ ID NO: 253579 - DNA, 416 bp, Gossypium hirsutum
attgtaaatgacaaaatctccttcccgtatcagaactcaacacattgtgactggtgagaacacctttcagcccattaatctactcttaaattcgactttaactaagcaagaggagatccacggcgtgcttatagggtaaacatccacttttaccttttttatacatgcctctcgtgtggaaacaacaaatcaacaaaagatccagcccgaaaaaatagaacgccccgagatttcagtcggaaaatcacctttaagaatcggctgtttttttattgcttctggttttgcatgcgtatttctatgtttatgtggcgttcgagtgtgtaatatgcgtgtgtatattgcattccgaaagaagaagaattttcaatcgaaaataaaaggctttatagcccgataacacaaaaaaaaacaac

SEQ ID NO: 253580 - DNA, 345 bp, Gossypium hirsutum
cggacccgtggccttcatttcctttttgctcaaaggctcccatttttccacttttttttcttttttctaatccccaagggccgtccttttttcaaatttccaccccgagtctggtcttaagctcttaatgaactttctttttgaaatctacattttttggaataactgccaagatgactaaagttatgctgtgttgaaaaccctgtgatcttccaagtagcagggataatttgtttccactgcgcactcctgcaactgtgcgtggttgtgcaactgtcactatctgtaactgagtgaatatacacactgattatcgtataacaagagatagaggtcaagaaggac

SEQ ID NO: 253581 - DNA, 209 bp, Gossypium hirsutum
aagctgaaagactaatttaaaaacgctcccacacaccacaagcaagccacacccaattacaccgaatcaactatgaagctatcgggcctcggcttcttctgttcttcttcgctcccttctctgcaggtccatctgaaacacatgtaagactgaccaaacatgctacaccccacaagaagtggactttatgatcctttgtgaccatatca

SEQ ID NO: 253582 - DNA, 428 bp, Gossypium hirsutum
ctaaagtcaaacacagtacgcggccttggatattaaatttcagagtatatttgtaaatgtagaatctattataatcggtgagtgtgggattcggttcctcctctgatttaaggcacaggattccaatgattaattaacttttttgaggggaacaaagaaataaagaaaatggagaggttagtagcagcggtgctggcagcaggttttctgcaggtattgctagcaaccgccgacgatcattatctgctttctcgtattgctttcggatcttgtgccaaccaaagtgctcctcagcccatctgggacgccatcaacaagtttgatccccaagtattcatatggctgggtgacaacatatatggagacattagacgtcctttcatctttctgggaaaggaaagggacgatggtccctggcagaaatgctc

SEQ ID NO: 253583 - DNA, 442 bp, Gossypium hirsutum
atttactctaatttcctagctttgttggggcagtgtgagagacgagatgagtatctgttttcgctgggtttcaaatttgtcttcttctactactggaactctctcaacttgcaaaacatacggttcacttccattgaagcctccgcttttctcctctatcctccaccttcctcctcgtcctagatttcaactcctaatccgagctacggctgccatggaaacagatcaaagtgcagtcacaagcacgaccgacaactcctcgaatccaccgatgaaactccttttcgtggagatgggtgttggttatgatcaacatgggcaagatatcacatctgcagcaatgagggcatgcagggatgctatttcttctaattcaattcctgcatttaggagaggatccatacctggggtctcgtttgagcaaatgaaattacagatcaaa

SEQ ID NO: 253584 - DNA, 442 bp, Gossypium hirsutum
aaataaggaagccagccactaagaaatgaagcttctctctcctttgttataggatttatgaataaccttaattccggcaataaaactccaccgtttctttctatcttcgtttgttgggttttggctcagatcgactcccggaacgaaggtttctcttttgtggacgtcggccattcatatcaacccaaggactttgcaactgttgttttctgacagataggtttggacatgtctttgattcaatttcgtcttaccctgtctttctctaccagcagtatggcgaatttgccctccttttcaactgaagaattttattggctagcatcattcttttgggggcatcatcacctgcaaactacatgggcgtctctctacctccttctattctcagatctttttgacaaggattccagtaatgacttgatagttaatagaagctcta

SEQ ID NO: 253585 - DNA, 170 bp, Gossypium hirsutum
cacaggtgtacgtggacacccaggttgagatgtccactgaccctgtctagtatacaacgcatccaaacccaactgaacgggcttggtataatcaacggcgaaagaagaccttgttgagctagactctaccccaactttgggaactgacttgataggagaaggattagtgg

SEQ ID NO: 253586 - DNA, 435 bp, Gossypium hirsutum
catttatcggtttctcctcttcctatatttcttttaatcttcttcctccttcatgctttgttaaaattctcttcttttatttttgatacaatcttttttttcccctattttaaagattctttagctctgtttaacatgtctttagccacttctcagatccttcagttttctccatattttctctaaatttggattcttcacgggttaatgaatccaaagtatttgttgttaaggagcacaagacgctccagatacctctttgcatccactttgaatgttctaataaaaggattttatcctagagatgttgtcagatacgctggcaactaagctttcacaaagttgaggtctgtgttgttgtgttgatgctttataagatggaccgagaagatacatcagggtttgtaagtggagggggagcgtcatcggaatttc

SEQ ID NO: 253587 - DNA, 353 bp, Gossypium hirsutum
attttctcttattctttttctttaatccaaacaaacaaaaagaaaaaaagggaaatgaagagattaagaagctattacatgcagtttcgacacaacaacaatcaagcaatggagcgtaaatggatcttcccattagctgttggctccattgtttctttatttttactcttcttaacaaccttaacctctttcgatggctccccttttcttttcttctaccgttcctccgccgtaaccggcggttcctctcctttcgtggaaaaccaactaaaacccatccctatttccaccctccctccgtctccccgcttcgcctacctcatctctggctctgccggcgacggtcggatgct

SEQ ID NO: 253588 - DNA, 171 bp, Gossypium hirsutum
atttctcttttcttctcaaattatcaggcggcgatctttctgagggggggtggagatctcaaactgatttattacgcattaatataggttgtgatggtttcgaccactctaatctgaaatacccagccatggaaggactagaaggctaatactgaggatattaacaaaact

SEQ ID NO: 253589 - DNA, 370 bp, Gossypium hirsutum
gtttggaacaaagatgtttatcaaccaagcatttatacaatttgagatgttcaccggtttgcctgcaccaaagcaactcattagggatgtattggcaagaactacataaaaagaaggaatatttgctaagtgaaagtctaattgcagctcaaccgaagtttgtcaagggattttcatgtgatcaagctcaaccccttattctttgacaatttttttttatttaataaatatatttggtcattaattttgagagaaaatgtaagcattttcttcttttgtctcagtttgtaattgtatcatgaaaattaacttccaaagatattacttatgcatttgtatttaatccatctattgaaccgattgaatgtct

SEQ ID NO: 253590 - DNA, 443 bp, Gossypium hirsutum
tccgaacttggtttcaaccaaagtcagaaaactctaaagggggggggcccggaaaaaaaggaaggaaggaggagaaaccgggtgggaaataaaaaaaaaaagttgaggccgaaaaaatgcttaggaaaatggtgggaaggtatcggggaatagaaaaaatgggtaaatccctcccgattcctttttaaagtccgatcaaatcccatcgggtttcccaatctccagctcttccatagtaaaaaacatcgtttcttcttacaaaggcttcattcaattcccttcaagtggatttgactgagggaagatatttgctatcgggtgcatctgatgcatcggctgctgtttttgatattcaaagaacaactaactattaaggagatggtctgattgccaaacacaaatgtttgttttcggtggataagcaacaccaaaagggacataaa

SEQ ID NO: 253591 - DNA, 219 bp, Gossypium hirsutum
ccttccggtggtgggcataatttcaatcctttcttcccttcccttggcctcccttccttggtttcccccctttttgtgcctttgggaataaaggtgccagcctcttttaaaaaaggggccgggggcccttttattgaggttgacctcaggggggtttacttggtttggcaggacctaccgggggggttgccaacttttggtaataaaccaaccaaaagg

SEQ ID NO: 253592 - DNA, 354 bp, Gossypium hirsutum
accgaagcaggagaaaaaggaagaaaaacctctaagaaacctctttaacatttcccctccggtcatttaatcgccgccgccgctgctgtcgctgctgccaccacaatcaccgacacctttatttttataaggaaatagccttaacctgttattttccacattttaccctgacttatttctccaaatttacccaataaatgcagtttctagggttagggttttggggaactcgatgaaaaaaagaaagaaaagcgacatggaagatttcaaggattcggaatcgaaatcggagagtgagacaagcaacgggtcacaccaattgacgatcaagggttactcgttggctaaagggat

SEQ ID NO: 253593 - DNA, 361 bp, Gossypium hirsutum
cccacgcgtccgcccacgcgtccggagatggagtaggttatggagctggaggtggaactggtggagctagaggagttggtggtgatggaactggaactggtagtggaattggaactggaactggaactggaactggtggtgaaactggagctggtggtggtggaactggagctggaactggtggtggtggtggtggaactggaactagagctggaactggtggaattggaactggaattggtggtggtggaattggaactggtggtagtggagctggagctggaactggaattggaattggtggtggttttggagctagttttggttttcgtcgtaatggaattagagctagtttcggagc

SEQ ID NO: 253594 - DNA, 209 bp, Gossypium hirsutum
tcacttatcaaccagaacttggtaaatccttccctttgggcccactgaccatctcgggtgcgaatcacagtttgcgtgacataatccgaaggaaaacactgatgggttccctggggcagatcggagggatcaccaaagcttcgattaccctcttgagaaggatcttaacagggtcaggggcactttatactttacttccaaaaatgagg

SEQ ID NO: 253595 - DNA, 320 bp, Gossypium hirsutum
cggacgcgtgggttccaaaacagatttcaaacccccccccttttttttttactcctcaacccctctgccttctcagacgactgttgggtttcaccggcgcataatacgcctccaccaccaccgaggctctaataggatccgcaaggatccgatcgtcttcggaccggagaagcaaacgatcagcaacaccaaagcaaggtagaaatcctccccttttacgtatttatgcgatagattcaaaaattaaaaaaaaaacagcccatgaacaaaaaatgagacaccttttccaatgtttctttggctaatcgactctgtatata

SEQ ID NO: 253596 - DNA, 148 bp, Gossypium hirsutum
aggtggatggctatatatctgatgagaagaattgtatagtcaatgcttgaaatcctccactttatcggcagtcaacccagttttccaattcgagacctgtgtctgaaaataatatgaaccaatcattgcaggcacatagctggttaag

SEQ ID NO: 253597 - DNA, 440 bp, Gossypium hirsutum
  unsure (1)..(440): unsure at all n locations
atagattagtaaatatttatcaataaaaataaacattttgtttttctaatatcttaacatatcctcccctttaggaggaagaacgtgcaaaacgtgaggagctagagcgaatactggaagagaataaccgaaaaattgcagaagcacaagccaaactggccgaagaacagttgagaattgttgaagaacaaagaaagattcatgaggaaaggatgaaactagaacaagaacggcaacgtcaacaaaaagaagaacaaaaaattatcctgggcaaggggaagtccaggccaaaactgtccttctcattaaaaacccaggattaaattgcaaactctgaactttttacaaagaaaaatggaaaaacttcgtatggtagcttcatgttgaagnggntttttgggtttgttttggtttcgttttttaatttgaaaatctggaaa

SEQ ID NO: 253598 - DNA, 331 bp, Gossypium hirsutum
gaaaagtgcatgtttaaatttttttatcaggctttattttagggaatggagattgataaataattctctactagccctaacaaagctttctgttaatttttcttttcccttttccaattgattgcggataaaggcagatgtttcaaaagggaatggcagcaaaatcttttacgtcatcacgctttgatgaatccttgaagaatcatctagctatggttgatgacttaaatgtgaagaagccattgagtgtggtgtctgctttcctctttggtcaagcattgcggttgatttctgcccaactagcaaacgcaagtgaaattactagcggaga

SEQ ID NO: 253599 - DNA, 354 bp, Gossypium hirsutum
ctcactttctttaaaatacctattttctttctcactggtctccacacttacgtccaccttggaaaagcaggcagcgccaacaatgctttctctggtcttagagctcgctactcgtagaccttcctctggttcaggttctcaacttgatgatcaccattatttgtcatcaatacccaatggggatctcaaaaagaggaacaaatgtaaagtcaagttcgagttcgatgagaacaatgcccagatctttaggctgaaactcgaagacggtcatcttcaaacaaggctctttttcaatgagtatcgaaattctttcgttttctcctttctgggcatttcatgtttgtgtctttcaaa

SEQ ID NO: 253600 - DNA, 359 bp, Gossypium hirsutum
cgataattgctgatattttatttcaaatattggatatttttacttactttagatgtgatgcattcagttcttgggcaacaaacattggaaagatgcttcaagaatgtttgtgagcttgacattgtgttcaattacagcaaggttgtgtatcctctgatcacttatatatatagatagatatatatgtatagatttagtgccatggaaggttagattctacatgtaaacgagatctactgtcttcattggaataataaacataaagtacaagaggatggcacctaggtaaataggagttgatgttggaatatataaatatatgtggggggtatacttcaagattttacattttaattgat

SEQ ID NO: 253601 - DNA, 204 bp, Gossypium hirsutum
cccagccacccgttggtagacgcttttccccccccgcggcggcggtttagctttgatgggattattcctttcccaaacctaaatcatgtgctggccccggaaccaaatcttccttataggtctatagaaaccgaccggtggatgttttcccgcacatcactccaataagctgattagggagttgcatttgtttcctaaagggga

SEQ ID NO: 253602 - DNA, 393 bp, Gossypium hirsutum
  unsure (1)..(393): unsure at all n locations
caaacatctaggccttgtttggttcacatgaatggcttagccattcctcccttattcaacacaatgatcttattcatgggtttggttggctgtaaagcctattcaatggaatagctattacagccttattcctcaaaatcactgaatagcaattcaacgtcatcactaatgaatggctattcaacgcttccagtaatacaaaaaattatttttctttccttttccacccatctcacatctcttcaaattccctacttctatctgagagtttttcaacaaatctatcgtgcgaacgtttggagtgagcaagaagaggggtttgaaaaaccagcagcaacagccatggtgaagaagattagcgtcacanataaagccttgattccaggtttaatc

SEQ ID NO: 253603 - DNA, 412 bp, Gossypium hirsutum
  unsure (1)..(412): unsure at all n locations
tagctatctatttattccattagatcaagacttttacttaattgcaaacctttgatgcctagctatctatttgttcgtaattttgattaaaatattattccctctcttgtttatgaggatgggaaaatgggttttcgaaggggaaggtagcgaccatctgtttcactccatgtctgttccttgtgagcttattcactgttcattattgtcctctttagtaaatgagttttgagatttttgttagaatttgtttaacacggctcactaagtcaatagagaatagattcctattatacattaggtctagactttacttagttgcaaacctttgatacctagctntatctttgttcataaaagatgtgccttgtttaagtgtcttttttttttctacttttgatgatgtgtgcac

SEQ ID NO: 253604 - DNA, 436 bp, Gossypium hirsutum
cggacgcgtggggtttatttttaatattaatattaatttttttactataaataagatttttgaaggttggccaggacattggcggtgttgtgattaatattattgaacctttttaaatctcattatataaattttattattgttaattgttaatttcgtagaatgaaccaagaattcttaacttcagaggtcatagtcataagcttatatatatattaatgttggcattatttagagttaggaggaaggaaagcagtgaactgagggtccatttgataacccgatgaagagtttttagttggtccattctcatgctgtgaacctggcattattttttttaagggtaatgagttttgtgatggcacaaaaaatccattgggcacgtaaattgttctaaaaaaatatggtggttagcttatcttagccgagtaagaaa

SEQ ID NO: 253605 - DNA, 416 bp, Gossypium hirsutum
cttttccatccttttatttttacaattttcttttcccccgctcctgattttccttccctccagacactattgcaaatgttgccatttctccctcttggaggcattgattggtgacgggcgatttaattcttttttttttctctcaaaagagaagtttaatggaattaaagataaaaaggggttgatttttctgtcctggaggctagctttcccgggaaattttgcctccttttttcaaatactctctctctctcagctgccaccgttagttgcatttttttccccattcagtcctctgttttctagaaaatttatatttcggaacttttctttttgatccatcgatccaagaagaatttatgtagtcgtggatggatttaaaatgtaacggaaggaaaatttcattggaggatcta

SEQ ID NO: 253606 - DNA, 431 bp, Gossypium hirsutum
taatcagctaaccccttgtcaatgctgcctcttctgctgtgcattctgggccatatggggagactgaaataaatgaatacatgagaaaacagttagtactgggaaggacattacaaagttcatcaatagttacatacatgaacttaacggtatcgaagaaagaaaggtagaaaaaacaacagaacccaatagatgggaacacccaactggcgaagtcataaaaattaaaggtggggttgattggaataaaacattttccggaaaaaggtttcaaccttttcccggggttggttggctgaaaatattttccccatgtaaaatcaattacaaacacgggaaaaagaagtgttaaattttggaaaatgacttaccgtttctaattcggtaagacattttcaggaaaattttagacaccgatcttccctttccct

SEQ ID NO: 253607 - DNA, 386 bp, Gossypium hirsutum
cccacgcgtccgaaaagaggcaatgagagtagtatggacattataggtggtcaatctgaagttgacgataaatctgtcaactctaagaaatttgaggagcaagttttcaaggatgccgctaaggaatctgctactgataaaacgaaggataagaaaaaaaagaaaagcaagtcaacttctgattctttaattgaaagtgttggacagcatggttcagaggacacgcaacatgctgcagttactttgaatgctagtgacatatcagtggaagacaagacttccaaatctaaaaagaagaaaaagaaggatgattctgaagatgtagagaaagaaaaatccacagaggaaaataagatctcgaaggtggattcaacgatcacagatga

SEQ ID NO: 253608 - DNA, 415 bp, Gossypium hirsutum
ctcgttttgtgaggaaagaatgaaccttgggagtggaaattgctgaaatgggtcattgtgcccaagtcttccacaatagaaacaaaataaagataagcgctcatatttaaaatgttcatacgtcaattttaaatatgagcgcttatctttaaaattgacgtatgaacattttccaccaaaagaaattttcttcctccttttcaaaggacgccttatgtcgatctgtactctaattctactcataaaattcctattcccttttcccaatgaagagacatcatgctccatgaaatttcccaagaaatttcctaacgggacagccagaatatcagaaaagagaccagtaggaatgttataaatctggacccaaaaaggtgtcagaactagagggatctgtaaaggatcttcccccaat

SEQ ID NO: 253609 - DNA, 409 bp, Gossypium hirsutum
  unsure (1)..(409): unsure at all n locations
cccacgcgtccgctcactttcacttcaaaaaaattaaaaaggaaaaaaaatcggttgattatctccggtgagttcaagccgggaagtcttaccggcgatctctccggaaaaggtgttttggagggtgaaagaagcttggtttttgattgagtgaagacgagtctgattgtaaggttggcgagaaatgttgcttttcgttgtttcagcatcatcattgtgcacaagcttctacaaggaaacagcaaaatctgtatggttaataactcatttcaatgagtgacactgttttcgtcttgggctcctagtctaatatgggttacacttgcagttgtatcactttgctgccttgttcggattacatgttaagataaaattaaaaagatgtcactgttgaatgncacaggacatg

SEQ ID NO: 253610 - DNA, 423 bp, Gossypium hirsutum
agggaatctccctcaaaaatcagaaactgccatcccttaccggctcctatttggactgctttccggctggctattgattatgcagcaaatgccgataagatattttcatggatttctgtacatgataagaggattttcccttctgaatctcttaccacaactccggaggccgagcggttctggcttttattgaaggccccaccaaaattgatcttaatgaaccctccatgtggccttttacatcttatttttcccccgagtgcacaacacaagagtctactgtgataaaggttaagcttttccagcacccagcaggacaggcaccaaaaagatgattcattgtttcagctcattcaccgcaacggggacaactttggttaactgataactttcaatgctgaaggttcacctttgtaggaaaat

SEQ ID NO: 253611 - DNA, 428 bp, Gossypium hirsutum
attcccaagggcctgccatctttgataggaactttggacaagtactctgttatttttaacatgaaaccatttttcccccggagataaatggatctgatgagaaattggcatgagtttaattagcagtcctatgtatagaaactttacatgaagaaaagtctgcatcaccctagtactcatgagtcagttatgagtcccagctcacccctgacatgactaatgccttccttttttcttttatcacgagggtgtgagaacaagaaataaacttcaggctactactgtacagtgaagtgccccgcaagcacgtatgatcttaaaatagcaacaagggcagcagcaccatgacaacaaaagtaataatggcaaagagaagcagaaccctaatgtttttgggttcgccactagatacccttttaatcctgatt

SEQ ID NO: 253612 - DNA, 253 bp, Gossypium hirsutum
gaaaaaagagaatataacgcgctttttacttcgctgttgactggaaaactcccatcattacttcgatccgatcattattctgagacgaagatcgaattggatgacgtctactttgcaggacaaggaggtttgctccaatgagcacacatttggattggtgaagggttgctttatgaggaacaaccagttgtgaaatgtctgaagcggagtggcctttgttgaacccaatgaggatgccagagactcagctggg

SEQ ID NO: 253613 - DNA, 341 bp, Gossypium hirsutum
gttttctctgtttgccattcgcctgaatggtcttcctctttctttaaaacttgttcctatttaattccgaccaaactctcactcgattccatggctactggacgggttgtttcagggataacggcgttccatgaagagaaacctgaataagaggtcaagggggaataaatttcaacaacacaggttttggctgttgctcctgcaccaaaacctgttggtgaagaaccaaagggatccgtgcctgaagcatcattccaaaaaccccaagctccagaaactgaagccacagttgaaactgaatccaaggagggggtcaaagagcccaatgctgtgactgaaga

SEQ ID NO: 253614 - DNA, 394 bp, Gossypium hirsutum
aattaacaacgcaaacaaatatttaaaaaaaatggggtttcgataaaaatatgaatatttttagttcattatatgaaaccaatgcaattgcaggcaatcatgattttgatagtgaaatagaaagctagcctttccctttgccattgcgtttgtctctcttgtgttcactgtttcagggataattaaaccctttcaaccacctctcttgtctccgccattaaagcttctgaaagaaaaaaaaagagtcaattttcattcatttaattcctttgtttctctggtacaaaagatccaaggggagataaagtgttgtttgtttttagctattgttttatttttatagtaatgcattgctagcttctccaatttcatcactttcctttggcactgaatg

SEQ ID NO: 253615 - DNA, 363 bp, Gossypium hirsutum
tgcagtgcatgcggaaaaaatggatcaaaatatgaactcaaccaaggaaggtcttatctcagggtcaggggcgattcaacacaaagcttacgctcgtgttggattgcttggcaacccaagcgatgtttacttcggcaaaaccatctcttttagccttgccaatttctgggcttccgttactttggagccttctcctcatctcatcatcaaccctcaccccattcatgatcttgttcagtttgattcccttgatcacctcgttaatcggttgcaaagtgaaagttattatggaggtgtgcgactgcttatgtcaatttgtaaactctttcataagcattgcaaggataataacataaatctctc

SEQ ID NO: 253616 - DNA, 232 bp, Gossypium hirsutum
cttcgaattaacaacgcaaaccaatattttaaaaaaatgggggttccattaaaaaattaatttttttaagtcatttttttgaacccaaggcattggcggccattcatgaatttggatagggaaataaaaagctagcctttccctttgccattgagtttgtctctctcgtggtcactgttttaaggattaattaaaccctttcaaccacctatcttgtctccaccattaaagc

SEQ ID NO: 253617 - DNA, 328 bp, Gossypium hirsutum
  unsure (1)..(328): unsure at all n locations
ctacggattcttcttggttagcatatgtctcaaaggcctaacgttccccactcttcttcaatagcttttggtctccattctcatctcctggtttccaagaaaaatacccctaatatgcaacaggacctaatagagacaaatatcccttaggagaaactgtttcagtaaagaagaaagtagattcagcgaccgagaaagttgagaagacgactgatttaaaagaacccaaagttcaaaacgataaacaaagtgtttctgaggtaatgaaagaattgcaggttctgtttgagaaagcttctgagtcntgaaaccaacttttgaaaatgct

SEQ ID NO: 253618 - DNA, 420 bp, Gossypium hirsutum
gaagtgatcaaataggaaaatatatgctattatagtaaggtaaattagatacaattatacaatgaggaaatgcgcatcattcgttgttttggtggatttatccacatggacatacacatggcatcaatgtgtcaaatttgataaagattttagttttgactgataaaggatgtaagaatgtaacatggttgtgcatatgaagatttaggtcagaaggatgaaatgaaacatttcttaaagattatgaaatgtggatgaaatttctgtttcacagctttgcatgtcaaattcagcagttctcatccatatattacaagcgcttttattacacatatgttgatttgcctcctttatattgaagttatatctttcatggtttaaatttgtattttaaatgttttgatttagattccaaacatg

SEQ ID NO: 253619 - DNA, 432 bp, Gossypium hirsutum
  unsure (1)..(432): unsure at all n locations
cgactttaactcgtaggaatccagattctgcgcccaaattgaatcgcttgtacgcacgcgagagcttctgctgcaaatgttgttggtatgtgttcatttctgtaaatttttgtttttaaggcttgacctaaagagtttcttataacaatccctatacacgatctattgttctgtttttcaaatgcaacatcaaaattgattttgacattcatctcatttggtggcctccaattctcattagcaattatgttgacaggtatcattctatatacccattcaatttcttgtatatagtctaaaatgaattgggcaactctcgcttctgtttgtgccttattcttatgtattagcaaatttcttgctgaccataagcccaatacagtacatataatgcttttaatctgtctgtttcattnttttgaataaataact

SEQ ID NO: 253620 - DNA, 175 bp, Gossypium hirsutum
gagagttgtttaggtttgtcttcaaaaattaaaaagatgtaatgtattgacattaagatttgtcttgtactctctatctgactcgaaatcttgtgtggttctgattggttggtttagctgtcattgttgccaaacggctaatttattacaattatacaaagcattcttatttccg

SEQ ID NO: 253621 - DNA, 363 bp, Gossypium hirsutum
cataataaccccagtcgaagtttaacactgtgtggggcgtctatcgagattcctttataatcttcaaactcttagttacgcttatagaaatactgtgggaaaataatgtatgatcacaaagacaatcactatgaatcgttgatggagaagatatcatataagaacacatgccatgatatatcttactccttctcggattcctatgtcgactagccatttaaatcctccatgaaagccaaagtctttcatctgttatgaatataaaggcccggtcactacggtacaggagaacgcaaacaagataatattttcctggggaggaacaaaaagattactgctagaacactacgtggcgtaactgtg

SEQ ID NO: 253622 - DNA, 416 bp, Gossypium hirsutum
caaaaataatactcaatagtaaagtctctcaaaaagaattaggtttttgttggtagattgaaaggaaataggaggaaggcgtaaaccggagattccgactgcggatgaagatttgattcaagtttcagctgaacctcagtcttagcctcaggcaggaatttatacgaaaaatctcttcagcgaaagaaagaaagaaagagaaagaaaatggaccctggtcgctaccctgttcaacaaggacatggatgggataataacagcgctcttgagggttttcctgctgctcttgaccacaattaccgggtcggtggttcatatgatgagaggagatatctagatgaaagatactcgagggataatgtgtatccaagaagtaactaccacagagattttctggagagggataaccaaccccc

SEQ ID NO: 253623 - DNA, 368 bp, Gossypium hirsutum
gtttaccctgtcctgttttttaatcccattttctggggttttctgaaggtctacagaagggaaagataagtattttgattttttgtctgtctttggccttttgggttttgttttgcgtatttggaaaagatgatgctgcattatcttcagcccgctaagctccaatccaagaagattgtttttgaggatgtgttctctgcgcgtgatcctgccacacttgaacatctcaaggagttgagctctaggcgcagtgtaattgaggagtccattaatcagagtagcttcattactgaggctattgcaagagaaatgtctggaggcttaacttctcattgtctaagggaccttcagaagctggagcaatacct

SEQ ID NO: 253624 - DNA, 170 bp, Gossypium hirsutum
ccacggcgtacgcccactcatatcttgtactcctgcgcccatgaagcacattcaacatggcctctacttcaagacttgaaaggaaatgtctacaaagctaacctacccgagacacgccgagcgctacgaacagatgggtatgctcatacaaaccgtcgggccctccgaag

SEQ ID NO: 253625 - DNA, 426 bp, Gossypium hirsutum
ctttccctgtatcagcgtttgaggttgaaggtgaagttaagggtgctgttaaggacaagaaagaagaaaaggataatgtgaagcctgctgctgtggaagcagtgaaagaggtctagagtagtgagactagaattaaatttccaaattccatccatctgcggggttgtttttggacttgctatcttttaacaagcctcttctattaatatcatcaatagcagcaatcaataaaaaataacagcatgttagtttacattcagaacactaatgttgcatcgcattgcaagtcaaattgcatggaccatattatatttcaggtacgaccttgcctgaggctgagatacctatacttgtatgtcgcaaaaactagtaatgtgtttcctctttatgacttaaatcaaagagaataaataattgactactact

SEQ ID NO: 253626 - DNA, 406 bp, Gossypium hirsutum
gagcacgcctcccattaactcaattgggtgcacaacagaacgcgatatactgtcatctccctctttctgtcttttctgagtttctcctttttatgatcctctgttttttcattacctcaatggcctaccgctaaaattcgtggtctcccccatcatatcgaacccgaattcagtgatccaacacaatccaatcatcaactctcgaggttcagcacccaattttagtaacaaagaggcacacctcgtagccctcgcacttttcccatcttcaacttatcctcaacattcttccattttcctctgcggaattgagtcaacggttgaattgcaaaaaaaaggtttactgattgggtatttgcgaatctgggtttcttccgaatttccaaaattttgataagattgagca

SEQ ID NO: 253627 - DNA, 135 bp, Gossypium hirsutum
tttttcgccacgccctccgcatatgaacgactgttgatattatatcggtcatggtgacgggacgagagcaactagtttacttggctaggcttcctgagctaaccaaaaactacgattagatattttctgccatca

SEQ ID NO: 253628 - DNA, 241 bp, Gossypium hirsutum
cccacgcgtccggttttttttgagagtcaatcctattcaaaaaatcaaaatcccttcgtccatggatctttggatcttttaaaaactttttttcttggtggggggtctttgggttggccttcgtatgggcgttggttttaaaacccaaggccaaggagccttctttggttgaccatttgaacctcgccttgaatttttattcgcaggcattcgaattaaaccttaaaagggccgactttta

SEQ ID NO: 253629 - DNA, 454 bp, Gossypium hirsutum
cccacgcgtccggaaaaatattatgtaaataaataattacatcactaataaaaattcatattacacattattacttaattaaaaattataaattaacatatttttaataatttttaaaaatgatataacttaaaagttttattatatgctaattttagcttaatgtccttaacaataatttttcatccttatttagttgcatttgaattcaaacatatataataattggcctctctattgaatttaactggcccaaaaataacatgtttgtattattgtgaacaagcattgcatgatactttttgagcatgagcccttttttacttgcagactgcagttgtttttattaatcattcatcccattatagtacttccatttgtccttgaacactcattatttgcatcttctatcatattgagttatgatatgctgcttgtaaaaatataaatatag

SEQ ID NO: 253630 - DNA, 423 bp, Gossypium hirsutum
ctcttaatgggtgtgaaaagggcagaaaagcagccaacttctctgcttttaaataaactttgattaactcttcaaggaatttatgatgcttgcttgcatatgggggggatctataaaccaagctattttgcaaattccaaggtcctctctatttgcaagaaagctaaatcccatgaatacatgatgtttgactcttcacttgatcaatctgctataagccaaaatgattgtcagctagatattgttagtgaacttcaagacaataactcatcgatagaggaaacaagtactaatgaaaagactggaagtgttgaatcatgttctaaaagcactgatttttatccttacaggtttccacttgagcaagatgtacatagattgcaacaaatacttgcaagaagatatagacttgcattctgtttt

SEQ ID NO: 253631 - DNA, 456 bp, Gossypium hirsutum
cccacgcgtccgctgaaagtcagttactatggcgaacatctttacttgaataatcagcaagtgatgttattttattcctaccttgttttctttatttggatttgcccaacactgatgccaagttgagtagaagaagtaggggaaagagatagaataggcagaaacagttagggaggaacaaaggaaattgagagacaaagaactagcggaggaagcctgaaagatttaatggtaattaaatcctataaaatggaaacagaggagttagaattttttagcaacgtctttgagatctgaaggtaaaagattttggagtaaatgaggtgaaaagtgagaggagtatagataacaagccttctctaccttatttgggaatggagagtagagtagagtaaagctaggagggggttacgtgcctaatatgttgtatataaaccgtaactaaaataagttttc

SEQ ID NO: 253632 - DNA, 376 bp, Gossypium hirsutum
attatacattattggcttgaaattgggggcggtgctaaaagggggctggggctgtgccttttctagctctttgctcttgctctttctctaccatcaattacagctagaaggagacagtttccattaagaacagctatggcgggttccactagcggaaccacttcttccaatccatcattgaacccttctgctcccaaaatcctattatccaagccatcagctgggctgtttcctggttaatttggacgctgaggttgtgattatgaaacggctcctgatagggcccgtttccctcccgttggttcccttaaccttctttctgattcctgggaattccacatcgatcgtattttgccttttttgactgagaatactg

SEQ ID NO: 253633 - DNA, 440 bp, Gossypium hirsutum
gaactttcatcggattccgacggcgaacctagttggtgagtctcttcccgccacgccccctcgtcggaggagtagacccagggcggcggtggtcaaggattacgctagtgaaaacgaagctcagagaccgagagggcggcggagcaaggatttgaggaagaggagagttataaagggaagatggattgataaagaaatgggttgtaaacatgaagggaagaacaaaagtgggttgtactacaattacagccatagcaattacagtgggagttttagtggtgaaagtgaagggggtgtagtggtgattactagacctaaaggtggaaaacgatcgttgtgtatggatatggaggaagggaaagcatgtacggacttagggttggaattggagatgcctggtcgtgtctcattatcaggttccgccattgataatactagta

SEQ ID NO: 253634 - DNA, 421 bp, Gossypium hirsutum
gctgaaaatctggttctacttggcgatgctttgtttcgggagagagagtatcgtagagcgattcatacgtacaagcaagccttgcagtattataagattattcccaagcaaaattctacatcttctagaagtgcattgtctgcctcaaacaggtcctcttctccaaattcttttaacatttgtgctataaatgaaaacgaggtgaagttcaaaattgcttcttgtcattttgctttaagtgaaaacaaagtggctcttgttgagatggagggaattcctagcaaagcaagaaatttgcagatgagtttattgatggcaaagctttatcgaaatactaaacatacccgtggtgctgttacttgttacagggaatgtttaaggcaatgcccttatgtcattgaggctatcatagccttggctg

SEQ ID NO: 253635 - DNA, 358 bp, Gossypium hirsutum
agtttctgcaccacaactacataggggagagtgaacactaaaaaacgggacacaaaattggcaattatcttactgacttgcatgtcttattaataaaggaggctttcactcttttagacactgacggttatggaaagatcgttccatatgagtttatgatactaatgaggtgtatctacggtaaccgaatccaatctaatgtcattatctattatttgttaatagaatctcacggtgccctttgacttgcttcatttttttgattcattgtacaagcttatgaattggtgggccgcatttataggaatgttacactatgcttttaaggtttctgtatattgacaatactggtcttagt

SEQ ID NO: 253636 - DNA, 415 bp, Gossypium hirsutum
  unsure (1)..(415): unsure at all n locations
attttcaatcgtcttctctttcaatcttcttgatttcgaagcaacctctcgattccgaatatctcccagaagataatcttctctttacagcttctttttctatttcagttttgatttctttgttcgtgatttctcgtaaatttttatttggtgtaattagggtaaggtttcatcaattaattggatctatttcaataaatatattggcatctgtttgtaaagatcttatttttnttaggtttcaagatctaaaattccagtttgttttgtccagtcgattgatttgccaactttggtattgttgattttagggtttcatgggttagttctgatctggcttaagaattttatgaactttatttgagtttttttatttagggtctgatttggttagtgcttcatggttgaataaact

SEQ ID NO: 253637 - DNA, 274 bp, Gossypium hirsutum
gaaggttcgagatacacatggggcgcgcgcctgggagaggataaaaatggttttgggaccaaatggaccctgttgtgagagcacggcaccaccaacccattggcgatactagagcctgttggtgagctttgaaagtacaacctttttatgcagccgggggaaatatttgggggaaatgggcgctctgtgtctttaactttgaaatacactcaactcttgggtggcgtttaccaaaaatgatctggggtgataaacaaacatctcccttttccgc

SEQ ID NO: 253638 - DNA, 418 bp, Gossypium hirsutum
gctcaacccttcttcttcggaaaagaaggaaattagtaagaaggctaatgcgttaactgagagaaaacagaagcgaaagaagtgccaatccgagaccataattaaacctgcagtgtcagattgtggggagaagaaaataagctctatgaaaaataaggacgtaggtgatggaagatgcatagctgaaattaagtctccagctatgatttgtgcagaggaaattcaatcaaacctagaacctgaatttcccagttttgcaaaatctttggttaaatcacatgttggaagctgtttttggatggggcttccggggatgttctgtaaaatacatttacctaggaaagatactacaatcactttggaagacgagagtgggaaccaatttcatgtaaaatactacgctgataaaacgggattg

SEQ ID NO: 253639 - DNA, 354 bp, Gossypium hirsutum
  unsure (1)..(354): unsure at all n locations
attagattgaactttttttcctgttgatttagaagttaaattcagtttgaattgaatcttaattaaatggaaacagggaaaaaaattagtgagttcttaagttntattgagtgcttaaatagagagttttctttctttattcgtttggacttatatgatattatgaatgctgcgataatgtccttatataataaggattntattatgtttatttacttagagagttctttcattcaactgtagtcttaaatgtcaatgcggtttgaatggttgctattcatacatttgatcggtaaacaagaaagattcgaaaatggattgaaatggggaaaatggtaaattctttttttaaaa

SEQ ID NO: 253640 - DNA, 352 bp, Gossypium hirsutum
cgaccactccacacgtgactggcactcgttcgcgtgtcgatgtagaacttaattttacctggctcggaatcttatttaattggatactggaaaaaaaatctagcgcagacttaagtttcagtgatcagcataaagaaagagagggaggaatatattcggaagcactcatatgatatgatgaatgctgcgataatgtccgtagataataaggatgggactatgtttattgacatagagagaacttggattcaactgaaggcacacaagtcaatgcggggtgaatgggtgctatggatacatccgatcggaaaacaggaaaaggcgcaatggatgaaacgtgaaaaagaaaact

SEQ ID NO: 253641 - DNA, 423 bp, Gossypium hirsutum
aaaaagccaagtgccgcaaacagtgaaacacctgcccatatacagtgaggatcaaatattcattcattatcaaaacaaattacaactggattaacatttataaagaatctaaactaagtgattatcctgaatcatggtacatcaacagagcaccaaagttactcaacagttaactacaaaaaatctactaaaaacaccaaaaagacttacctgcaaagaacattttagatagaatgactaaaactgggatatatttccaccacaatatcagccacattgcaatctgaaatcaagtacacccagcctcatgttaaaaaaactttattaacatcttgtcaaaagcaatgatcccaaaggaaatcagtatgccacaacacttaccaaagtgacaaaatcacttaacttggttgattagaaaaaata

SEQ ID NO: 253642 - DNA, 414 bp, Gossypium hirsutum
aacatatagaaggacctaccactttgggcaaaatacatagatactgagcatagtgaggtctactggccctcttattaatcataaatgatgagaaggtggctgtctttgattgttgaaattgatgcattcatacgtaaagacataccgtattgcttattccaaattctgactgggaaagggctcactaacctatatcagtgacaatttagcttcttgagcttgaataacattgtatccatctcatttgggaggcagggcatatctggggttcttacacgacttattgataacataattggtaaagatagtgcctcccatagtgggggtcctttccttcattcaaagcttcttctgcgacggtgatgttgaaatgagagcatctatctgtgcgctatgagctgaagtatgaaacat

SEQ ID NO: 253643 - DNA, 342 bp, Gossypium hirsutum
attgccctgtattcttcctcacacaatcagccgatctctccttttttgtttgaaacaaaacggaatctacattgggtggcacatgttttgcgagagagtaaagaggagagcattggcaaatttcatttgggtctcttagttttccatgttataaaaaaaaaaagaaaaaaaacgccattgccgacacccgtgttgttggtttcttattttgtttttttgatctactattgaatggaatagagggaggcgtttgttcaaatttaaccgaagctgatgatcccgatgtctgttcaagtgtttaagagataacatcacggtccaactgaggatgatattgggagc

SEQ ID NO: 253644 - DNA, 396 bp, Gossypium hirsutum
ggagattcggagagatcgcgtgatcgtcatgcatctggttcgaggagaaataggagtatgagtcctcgaactagaaaatgaactcctgtagattctgactcccctaaacatagtagagaaagttcacctaagcttaggaaatcatcccgtcctgggtcaacatcaccaagggatcacagaagaaatagggcatccccaaagaatgatgatgaaaagaaattgaaatatagaaagcgctctaggtcaatgtctgttgatttggataacaaaaagaatgagaccccagatggaaaaacaaagcaccgcatgaagaaggcgatcgaggtcattatcttcagaagggagacctcaaagaagaagcaagtcttcttctgcaagttcatatgaaaacaattc

SEQ ID NO: 253645 - DNA, 318 bp, Gossypium hirsutum
gcacacatgcgtaaatactgctgggaagccggagacgcgtgaagtgaggcgaattgcattctgggtggaacacaatggggatatcgaggatcggtacactcgtggttactagctaaatgctggcatgtccggcactttccgatatggttctatgcaaagtcgatcgacgtatttatttgacatccaacatggttcgaatatcttatactttagaggtggaaaaggcacgtacaaaaactgactctaaggttttgagggcttttactgaccttaaaacataaaacttggaatatgtgaatacttcctatcatgaagcca

SEQ ID NO: 253646 - DNA, 358 bp, Gossypium hirsutum
gagggcgcggggatttaagctgtttagttggcggcgggcaaagtaagggtgaaaaattgaaaagaatgggaaaacgagacaagaaacgaaggcaccaacaaagatcatctcatagaggagcagcctcttattactctgtccaacacgatgatgattatgaagatgagagctccagttttcaacaaccatctcaagattttgaagaagaacaacaagaagaagaaccagaacaagaggaagaagaagatgacccaaacccatcaccggaaatgccatcaaaattcattctttaccaacaatctgtacagtcaccgaaaggagatataagctatttgcagaagttctttttgatgtatgt

SEQ ID NO: 253647 - DNA, 387 bp, Gossypium hirsutum
ggaccaccacgggggagggaacatgatcgctgttgtctgctgaggagtgcttaaacaaactcaatttcatatggggcaaccgccctttacttttatactgaccgtgtctaggatcataattgcgctaggccctatctgggattgctaccgcgatatctgatgaaactagctgcggatatgatactgttaacattgttcaaggcactggcgtaaattgctgtacatcatactcatccgaaacaatgcgattgatcttacggcaaacttacagggatcataatcaaactgtggactagaaactcaaactttgcgagctgatgctcaacttgatgatacgaatgatattcgactatacatattacggggactataacactggcggcatcg

SEQ ID NO: 253648 - DNA, 447 bp, Gossypium hirsutum
  unsure (1)..(447): unsure at all n locations
cccacgcgtccgaatcacttgtttatcacgggagaaagtgcagaaaggtttctgggtttttcctttgcttactcaaggggatgaattagtctctaattttcaataatttgaaagaaatagcctttattcagagatgggacatactggtaactgcagatatttaagagaacaacttgtttttgctaagaattagtaccagctggattacattaacttgggatgagaacatataaggcgaagaccaatatagaagttaatggacaaaagggtgatggaggaatcaagaaccatggagttaatgatttcatggctcggaagaatccgatacaaggagcatcgtatatggcaagtcctagtgaagtagaaagacgaaaggaagaaaacaaagctcataatatgagcgagacctttttggcatctgatgcgccgganctggttgtatttatt

SEQ ID NO: 253649 - DNA, 427 bp, Gossypium hirsutum
gaaagtggaccgctgggggtccgggtcggaattccgggttggaccaaggcttcggccaacgcgtccgaaagctccttttaacattccttacgtgcttgcttgcatataggttgatatatatatatatcaccagtgaagtggtatgttggaggatttgggaaacttttgttttaagattaaggatcataaaggatcgttgggccttattgttaagaagggatctatataatccttgtcaagggttgttaggttattgatgatttttgttgattaacttgtggttggatataggatgtattatatatttgggttctaaaaacatgttagggttgctatgattttggggccggtgggcaatatactataacttttgaaccggtccattcgaatgatagttctgttttgtgtaacctaaattaattatttg

SEQ ID NO: 253650 - DNA, 312 bp, Gossypium hirsutum
ttcgggatgtaactttattcaaaattaccctattcaagtggcatagctgtagctgcaaaaattctgttttgtggaatgacataaacaaatatagctatatgaggattaaagcatgactaaagcctcttttgaaattaattcatatttttaaaactatacgtaaagatactggggaatgactccttaacagagtttaagaaacatattgtggacttaattgactgtctcagttagggggcggatgtgtgagacacaccttttttgcgcttaatgtacataagtcatgaaagcaatgcttggatctttttttaa

SEQ ID NO: 253651 - DNA, 434 bp, Gossypium hirsutum
  unsure (1)..(434): unsure at all n locations
atttcttaaaaacttaaactctccctctccctcgacaccgctcagtagttcatcaccctttcagaggctctccggaccgtgcctttagctccgacaacaacggaggaagagcaatcggtccaaacgtgaggtacgccctctctctcttactgttatctccttaaaaatgctcgatagaatctcaaaacaaaaacaacaaatcccaaaaaagggttgaactatgaacaatcaaaagagaaaaaaaaaatgaacccagaaattaccttttttggtgctttttgatttttggattctgatttttgtattctgattgcgtatatttttttacagcatggtcttggtcctttttatagcgtctatatacagaatagaataaaataaaaataaaatccaaacaaatcgcccctgctctgtcatacttactttntttctct

SEQ ID NO: 253652 - DNA, 164 bp, Gossypium hirsutum
tcgaaagaaacacaatgactttgtcattagccagctatgaagaatcgcatattacttggatttcttcatctaattgtacgcaacaaagctggtgatcgtggagttgaaggtgccaacgacacctattgatgggccaaagccagacacttgtggacttggataaa

SEQ ID NO: 253653 - DNA, 221 bp, Gossypium hirsutum
ggaagcttctcacccttaacaagaggattagctttggcgatttggtgttttcccatccctttgaaatcaaaagtacaagcatgttgatcaggttacgccaaacacatgcttgagatgcgagaaacgcgtggggctaacggggttaaagggctggtgcgggaaggatattactgggatccatgggtaaccctaacaacatactagtggggggggggggaagt

SEQ ID NO: 253654 - DNA, 340 bp, Gossypium hirsutum
caggaaaagccttaaagcctattggggatgccctgcaacaggtttacattggtattgaggggctggaaaggagtctaggctttgacccaaatgatcccgttgtcccttttttccttctcactggcacctcagccactttatgggtgttttaccgggtatgggcatacggtggttactatggggatttatctcctcaactaactttggagctcttgtctggaaaggagaatgttttacttattgatgtccggcctgaagtcttaagggagaaagacggcattcctgatcttcggcgagcagctcggtctcgttacgctagtgtatcttttacctgaaggtc

SEQ ID NO: 253655 - DNA, 150 bp, Gossypium hirsutum
cttcttcttcttctgcatattcctcttctttggatcagacactttcttgcttgatcccctccccaccaacaccaactttttataccattgtacctgacacccaaacaggctgttttacttgtttcaaacaacacttagcaggttacagga

SEQ ID NO: 253656 - DNA, 394 bp, Gossypium hirsutum
aagaagtccaactttctttcaattctactactcaaaactctcttcttcttttttatttctgaattgcttgtttcaaaatggtttggttttgggtacttgttttattcactgccaatttaaagttgggtttgactcacatccatggaggagagcaaccgttggctaaaatcaatatcctccaaacaaccgtcgcccttcacgaatccgcttctatttcagctgaacctgttcttcttggtttgaagggggaggatactgaatggataactgtgaatttcgttaatccgaagccgtctttggatgactgggttggagtcttttctccggcaaagttcgacccatcggcctgtccgccggtgaatgaacggaaaaaacagcttccatatatatgttc

SEQ ID NO: 253657 - DNA, 440 bp, Gossypium hirsutum
gtttgcagtcgatgcttgtactctaatggcgatcataacagaagaggtagagcccgaatcacccaaaacgagagtagacaagaaaactcccccaaaacctacttttaatcctaacccagtctcctcaaaatccgaccctaattcccaaactcaaaatccttttgccttctggttctatttcaccctcaccatcgctctcatcactttcctcttcgtctccttttcatctttgtccccacaagaccccaaatcctggttcctttctttgcccaactccctccgtcaacactactcaaatggtagaatcattaaggttcagacatctccaaaccaatcgccaattgaggtttttgtttctgaaaatggtcagttttcttcatctgagaatgttttggtcgttcatgggctggggctgagttcttattcttatagagaaatga

SEQ ID NO: 253658 - DNA, 408 bp, Gossypium hirsutum
  unsure (1)..(408): unsure at all n locations
atcgccttctatcaagacatcttccaaaaggtttctaatttagttattggtcctagtgttaaaatatgttaggattaggactcttttctctatttaagttcagttctttagttaataataatagaacagttttattaaaagctctcttgaaaactttcacctagcatgcacttcaaattactttatgcagtagcttttccatttttcatttattttgatcttctgtaaacatgataacagctttaataattagtcctattgtttaaaaagataaatgcttacttcagaaagtggcatgctagaaaaccttgttatattgttgctggtgccatgtttttacacattttcctttattttccatttcagaaaagggatgtggctgatggttacctaactcancatattttc

SEQ ID NO: 253659 - DNA, 194 bp, Gossypium hirsutum
ctctcattaacacttttcttttcttcttgcaatgcctccaatctaggccgaaaagggagaaaagaaagctgtttcagatcagtatcccacccacattatcctattatattcctatccttgttctccttgtcttcgccatcacccaaaatgttcacccagttttttttcattgccattctttcttcactcctact

SEQ ID NO: 253660 - DNA, 379 bp, Gossypium hirsutum
gttttacgtttatttgtgctgacggatctttaactatttgatccttgatctagatctggatttatgtttcccctgggatcttgatttctacgtaatatagcatattactagtattagaattcatattgaatctattattttttctacaatatctgcttgttttgtttgatcagggttatatttctatcatttgatatgatatgatgttctagctaattccgatcctgtgtataaattgttcttatctctgaaaacggatggtttatattatatgttaccatttatatgtcaaattggttttggtccttttttttttcattttattaatcgggcgaataagctgggatggaccctttttgggtgggtgtgtttttttttc

SEQ ID NO: 253661 - DNA, 421 bp, Gossypium hirsutum
ggagaatccatccacctgtcaatacgctattggagaaaacaacaggtagcttaacttcattggccagttttctcgagaacacgtcgcaaaagattaatccccaaagtcaagtcgtttgatgcctcaagcttcgcttcgttttcctttcgtgtttgctgttgctttggttttgtttaaatgttttaaacaacgattcccagtttcgatttccaagtactccaactgaaaaaaaaaaaaaagaaaaaaagcacacgatccatttgagaaattaaattataaaagcagcgccaaagcttaggaacccatcacctattctctctcgaaatatcaaccttttttatttctggtgttgaaattgaagatccgataaaaaaattgtaaacatttcttaagttctggagagatccaatttctctcctga

SEQ ID NO: 253662 - DNA, 162 bp, Gossypium hirsutum
atgacaaaacgttcggagacctaagctgcaaaggttgaacaaaaatgacaatgagagaagctctgcttggaatttctattttgttaaaatttattgcttatttcatcgaaatttcgtctgctatcgatggatttgaggcctttttcattttctttcccgacc

SEQ ID NO: 253663 - DNA, 367 bp, Gossypium hirsutum
cccacgcgtacggaggaaggtagctaggtgtagttaaggttttcttatttgccatctgaaggcatgctgatccatggcactcaataagttgtaaatgtcagatttctgtttccacaggcctgatttgtaatttttagctcactcactcctgaatttcatttggtttatttaactacaatgtcagttgttgccgacttgccaccctctgctgctgaatgaaagattgaggaaaatagataaatttctcaacttgaagagagctggaaaaagcttcaatgctgaagttcggaataggaaggattataggaaccctgacttcttgctgcatgctgtgaggtatcaagatattgatcagatagggtcttgc

SEQ ID NO: 253664 - DNA, 262 bp, Gossypium hirsutum
accatattctctatctttaaatgcgttcaaaacataatatagggggtgtgtcctacggggggaagtgtgaaaaaatgcccatatctaagttgaaagtgaaaaactcaagcttagggttgtacaggctcgaaacaagggtctatgacgggatttatcttttcagagggcactaataatataggttacagaggagctcaagaaggaaaattttcacttttgctggctttgccggatggctttttttttcaaagccgtttgggag

SEQ ID NO: 253665 - DNA, 412 bp, Gossypium hirsutum
gtttgtgatgtaatagtttgatgctttgtttcccgctcgtttgtgctgattttggacatgaatttgtacttgcaagactctaagcttacaaacctaggaaaaataatggaaattcatggtccaaagcttttagggacttcatacaaggatcccattgctagtttcaatctcttccgggagtacaccgtccgccatcccgaggtatattggtcaatcattctaaaagagctatcagttacatttcatgaacctcccaagtgcattctggatactactgacaaatcaagaccaggaggaacttggcttcccggttcggttttgaatattgctgagtgttgcttattaccctcaattcatcccagaaaaagagatgatagttgtgcaattgtatggagagatgaaggtgatgatg

SEQ ID NO: 253666 - DNA, 232 bp, Gossypium hirsutum
caagcacctgtttgatctatctagttcatactcaaatatgggtcaaaccactcataatcccaatacccaaccttggaaggactttgaacgctcatacggaggatatcaagaaaactgatcttggagattagtgagacgctaagaacgatgcccatgcaacattgtacagtggtactgaatgtactgggacaactcaaggcgttggtccactttggaaaccatgcataaactg

SEQ ID NO: 253667 - DNA, 318 bp, Gossypium hirsutum
gatgtgtgtagttttttcgggggagtttaatagaggggaggggctgctgagacactttataatatgcctagtctaaaccttgtacccatcggcaatttcgacagcgaatacaccttggccatcttttccgaaaccacctattccgtcgcttaactcattggcaaacctgatgcctatgcgatgattgtgttgaagggttttaatcccatgctatatggtggtactgatcattcacctgcctatggtgaactgctatcaattgggggccttagtccatatgtgaagatgaatctgattactgcaatctgccaaatttct

SEQ ID NO: 253668 - DNA, 332 bp, Gossypium hirsutum
  unsure (1)..(332): unsure at all n locations
tttgcgtttaggtttttgttctttgaatactttagagctgcattcatgctgtgtgggttgtgcagacgagaagtgtggttaaggtgtgtgagtacttcaaatgaggtacactttgtattgtagggttcttttctttccttttttttttaatgtaatttaatttattgaagatcctataatgacaacagaacaatgttggaatatttgtttgttccctgttagttgttgaaagtaatatcaacttgggccgattgagcctttgcttgttcggcnnngaaaaagngtgagatgtgcatattaattaaaaatgctaacaatatttctgttaataa

SEQ ID NO: 253669 - DNA, 410 bp, Gossypium hirsutum
gtttaaggagaccttcacgctccccactttgccctctcccattttctcacctgaaaaaagcggacaattcttcatcgtagcgtcaggtaaatcgggtgataaaccgggcacgagcttcgatttcaaattgtcaatacctcctaagtcatgacccaaagatttccccttcacctactcaacatttccattcaaaatcatccattcgcttcttcgatatttacaagcttgcaagcaaggaaaaaatggagaaagaacgagcaagactcaaggaagtttcctgccatggatgttatatattctgatggtagaaaatcaaagctgccgattgtttttgatgcaagtggcgttgattctagcaagttggctgtccctgaaggatctttagtctgtctaccatttagagcaaactc

SEQ ID NO: 253670 - DNA, 416 bp, Gossypium hirsutum
  unsure (1)..(416): unsure at all n locations
agagagccgaagggtgggtaggtgtgatactgacnnnannnnctncancagcatgnnnttttnntntttttttnnttttttattattttttattttttactttaaggctccacaatgatcttaccagtggcatgaccatcaatgctcttagcccatgcttcctcagccttacttaggggatactttgaatcgattaccgtcttaagcttcccgtctttcaataagttaaccagataatcgaggttctcctttttaggtgacataaagagtggtaccagcttcttctttgagaaggtaagcttttttatagcacaagttaggaaagcactaagagcattgatggtcatgccactggtaagatcattgtggagccttaatgtacgaaattttactttatacttactgcagtgatgctt

SEQ ID NO: 253671 - DNA, 368 bp, Gossypium hirsutum
attaggatttgtgtatcttgaaaattatacacacaagcagcatgacctctatgctttattgatataagaataacctctctttcctgtactttaatgtcagctagacattttattattgaagagaacaccaagcttatctgcattccctctcctattttttcttttttggttttggaaggaaacgctttatttattaggaaatacacaaatatgcaggcggtttctactacacaaaatcttaattcttctgtcattcgtccttccaagcctcgccggttccatcagttgactcgctcctttatccgttgcgtttatcacaatgactccgttcaattccctaatggagtcggtttaaaccgcgctgattg

SEQ ID NO: 253672 - DNA, 367 bp, Gossypium hirsutum
ggcatggcttgacatcgcgtgagcccgatgaaggcatctatatcgttttcacagatatcacagcttggcttgacaaacaactcttataaactttaagcaataaagggttcggaaaactcactaatacgagcattgaaacctggttgcagaacccaatggaatgggttcgttgacatcactaacccacttatcctgatagtaacatattagctactgactctgtatattttctctacattaatagaattaaaagatatgaaattgcttcaatactgcaatgtttgaggatctgattaatttgtttcattgcaaatgctttggtgctgtttttattaagaagagacattgaagttaaaatcgatttatg

SEQ ID NO: 253673 - DNA, 381 bp, Gossypium hirsutum
  unsure (1)..(381): unsure at all n locations
ctttgcaagaagccacgctttccttctcccttgtgttctctgattaattacaatggtcccagcagacatttaacatcacaattattccaaataatagataaatttccaattcattagttcacatcgttagaattcgagagaaacagaaaggattttagctttttgttatatatgattaatggctgcgagtgcgaatccgacggggaatcatcaggaaggttcgtcgaaccagaacgtaacgccttctcctcctccaactgccaatggtcttgccgtcaattcgaacaatagtgggggcaatacatcgaccgccgncgccgccgtctcggctgacacgcagtccgcgttgaagcacaaccctggcatctccctagactggac

SEQ ID NO: 253674 - DNA, 410 bp, Gossypium hirsutum
gtgatctctgctctatagtcggacattcttctgttaaattttgttcaggctaattaataagttttgggggtgttaaccaggtgtcaaaattaataacaacattcttcacaacttcttttaagtataatggcttaacccgggtcttcctctttctttgccagagaggttcaaatagcaccacaggttgccacagatataactttatttatagggccaacccaatcactgagcccttcagagtcacttaacactacaacaagtctctttatgggtcaaaccccgctcagggtttttgctgctgtttccacattggctgcaatctgtgttatggcaacaagttcccaaaccattgttctatttggattcaccattagagctcattatagctactcatctgctacgaggtttta

SEQ ID NO: 253675 - DNA, 264 bp, Gossypium hirsutum
gtgggaggaaatattgatcaagatattgcatggggatttcaaaactatacctagggtgatgggttgtatgaaaatgttgatctgaaaggggaaaaggctgacatggagcattcttgtgtggaacagatatgcgaagatgaagatgagatctgaaacattagcttaaagaagaaccttgttttgagttcacagaacatggcatgtcaagatgctgtgcataatgctgactggaaagatcaaaattgttgagagaagtgtgatcaa

SEQ ID NO: 253676 - DNA, 419 bp, Gossypium hirsutum
  unsure (1)..(419): unsure at all n locations
tgtcatctctgcggttcccagtggaaaaggtgagggcggatagagttgttctgatgatgagaacantggaaaataaaaaaaatcaaacggttggcatttcggacaggcttagacctcggaaaagcagaaagtaaacagaaaaggcaagggcagagaatgggtgttgaggaagaaggatcagatgagaaagaaagggaatgtcgtgccccctgacacgaagtacactgctcgaaaaacgaagctcatttctaaccagctacgatattatagatctgaaagtttgggatgaactagtttacatatttcatggtttattatcactttgaaaatcatagttaactataatggttgattaaggtttggttcttgtatcaatacatacnatngtgttttgttttaagaaaatattgatatatata

SEQ ID NO: 253677 - DNA, 455 bp, Gossypium hirsutum
ccggccgatgccggtcacccaccgtcgattgttttcttcttcatcttcttctatcttgcttataatctacacagcagtgacgtcagccggcgccgccgccgccaccatcaaactctccctctctcccttccctcacccttcttcctcccatccttaccaaattctcaacaacttagtcacttcttctgttgcaagagcccaccacctcaaacaccccaaagccaaggccgataatactacctcttctcttctcagggcttccctatttcctcacagatatgggggctacactatctccctcaaatttggaactccgcctcaaacccttcctttcattatggacactgggagcagcctctcctggttcccttgcacctctcgttacctttgttcccaatgcgctttccccaatgttgaccctgcaaaaatccccacttttgcccctaaacgttcat

SEQ ID NO: 253678 - DNA, 467 bp, Gossypium hirsutum
gaggatggaaaatttttaaatccagtgctgatgctatataaagtgtgaaggaggttatgaaagttgtcattgggttgaaaaggtttccatcctccttaccaatcaaggcactgtgcttgtagccgaagtaatttcttttcttctccttttgtgctgaactcctctgggtagagttatgtcagggtctgaattgtttcttaatgcagtaacttgatgcaaaagagcattactatagttccactctgagatacgcaaaagttgacttgtatccaggactttgtgcattctcccctagtttggagggttgcttcttggctcttcctgccaccacggccaaaagagctgtattagtgtacaatgtcatggagcttcagttgcattgtgagatgctcaccggtctcctttggctgcaattgccttatcttccaatgggaaatacattgcaacagcatctgaacaaggaacta

SEQ ID NO: 253679 - DNA, 335 bp, Gossypium hirsutum
attccatctcttctcctttaatccctaaattttcatccccaagttcccaacccagttgccaccgaagacgctgaccggaccacctggtgcatcgccctcgactaacctctctgctgcgtcgccgtcgcctgctcatcctactcagaaacgagattatatttttcacaacagtaaattaaatgggaagcgccatgtacgaccttactactttgagttcgtctctcatgttaataaacgatgggaaggtaaaacaatagtggatttgttcgctcaagagttcagaagtcgatctagagattactatattatttttctagaaacaatatgcaacgatg

SEQ ID NO: 253680 - DNA, 383 bp, Gossypium hirsutum
  unsure (1)..(383): unsure at all n locations
cttactcgttcgcatgggataccagtcctggggtgggcacatcaaggggactaagtgagcaatgctnangtgatagangcaggtggatgggggctttgtatgaagagctgggggtggggatcgaaccatttggtgaagggtgttgatattgtggacaaaatcaaggagctgatggggaaccaaaggatgaaaatggaatgtgcaaggatcagtgaagtggcaaaacaaaggtcaaaggctggtgagggttgtgagaatatgctgaagacacttttccagagcttgacgaagagctgaagaagggaattttgtacgaggactggttaattaattgattatctgttgaatttttctgttttaagatgaataagtaaaatgcttct

SEQ ID NO: 253681 - DNA, 463 bp, Gossypium hirsutum
tctatacccattaagtttcaattttgtaacggtaggaatcattatttctctgaattactatatctccttcccctgttttcaacccaatggagaaaaccccttttctaatttagtggatatacaaataatgtatcaatttgaagtgatctaaagaaatcctatgtttgtataagaaaatgtaataaaataaatcaagacatatttttagaattcgaaatacttttttgaagtatggtacaattatgacaggaatcgaaacgcttttcatataacgtaacgggtacaacccaatatctaagtggtttgataaatccttaaaacaaacgcaaaatgctaacgattaatacaaaaattacataaatcttttgaaatcgttgggtgttgtgctgaaattgtgatctctaaaaatcataatttttcattcatttattcaatccattaataaacatttttttataacttt

SEQ ID NO: 253682 - DNA, 185 bp, Gossypium hirsutum
gctgctgcgcgctgcaggtaccgaattcccagtttccggctccacccacgcgatcgtcaagttctttctactcttcctccatggcaccctgctacttttacactctgcaggctcaacacatatctccttgaaatgtccttttcactttcttaacgtttcacagtcttgaagatttgactacactt

SEQ ID NO: 253683 - DNA, 245 bp, Gossypium hirsutum
acctacgctttttctttggcagtcgatgagtaagggaccgggactgttcataaatatcggattgagagccaaacatcttttgaccaaagattatacgtcggatcaaaagttaacggtttacacttatactgtcgctggagtggacataacatcaactattgtaataaaaagaggactatgtactgatgatggctcttttctatacctataccataacactcaatatgatgtcatagacaataccg

SEQ ID NO: 253684 - DNA, 225 bp, Gossypium hirsutum
tagctgaagcccctgcgcgtgccggtaccgaatcgcagtttccgcctacacccacgcgtacgcgtttttttttatctaaatgctctctgacacagacaccaattgcgaagctgtggatagcacctcttcccgtgcttgccagacggagcttatgaccggttggtgatcaaaatgcaccggactagtgttgaagggagagtagctctcctttcaagacatcgagaa

SEQ ID NO: 253685 - DNA, 428 bp, Gossypium hirsutum
  unsure (1)..(428): unsure at all n locations
ccgtccgagtaacactactaaannaaaaaaannagagggagagatgagacgaaaagaaaaatgggcgcggcgcgacgatttnngtagaaatagaactaaagggagtgaagctttgaagaaaaaaatggcggagcttagggcttcaagaatcgaaacacnnagtgagatctaggctttacagagctggnnagctgcgagccctgacttccgttatatttaactctggaatcgaacttcagcctcttctcgtcggcttccgctagtgttgatcgttgctcttttgcttccgatgctcatgaccgcgattccatcgcttccgaactctctttacatatggcaggacaagaaagtggagatcagaatgagagttttggtggaccagatccagatccagatccaaacaaagctataacagtccccaagcacat

SEQ ID NO: 253686 - DNA, 350 bp, Gossypium hirsutum
atggctagtcaatagcttatagaatataataatcattattttattataataaaatagagattagagtttatgaaaaccacactttgtcaaatacacagcctgttaatttgttctgcatctttgagatctagagttttatttggaatagtatttaatgtatgccacttacatttttttccccagaaaataagcagatgtactttccatatttttacagccaagttgcatcttaatggagggcttagagtataaaaaccagtgaagagattatcttatctactcaaaattactttgaaaaaccccttcaataggcagaatctaggttttctgctgtgctttaactttgagac

SEQ ID NO: 253687 - DNA, 289 bp, Gossypium hirsutum
aaaccataaacccgaataacatgattaatgaatggttaataataaccagaaattacgctttcacaatacaaagttttgaccaaacttgctgttaacatttccaaaatggaactttgtttttttcaaagattgaacatttaatccatggaaattaggtgacaaaacaaaccaacggacaaaaaaaaagaaactcgaactcgaaacttaagaacctcaagagaaggttttctgaatgaatacacttggattaaggattactacagcggttgacacaaacaattattacgga

SEQ ID NO: 253688 - DNA, 327 bp, Gossypium hirsutum
  unsure (1)..(327): unsure at all n locations
gaaacagcacgaatgagtaccataaacagcaccgcttgtttttcttcagtcttccaaaacccatcacaaactgaactttttcctgcanatttcaaatgtaggttcaattccaagctccccaagaagcaatctanaatgggtgctcctagaattntctgtaacttgtctgaaaccgagactggagttgatgataatcccagaaacagtaaggtttctgtgaggtccaagaacaggatggaagagtataacactgccatgaagaaaatgatgaggaatccatatgagtatcatcatgatattggcatgaactacacactgataactgac

SEQ ID NO: 253689 - DNA, 378 bp, Gossypium hirsutum
aattcactctaatttcaggtacatctcataatttcattcgatcagagcttgttgattcgcattttcgcttcacgttgcgtttgctttcctgtaattttccatttttcttctatcaatcaacctattttacgttttaattttgtttctttctttcatgttacctgttccgatataatctttaacttggctattcatttccattgcatgatgatctttttgttgactttctgtctttattattcttttggttttacgggaagctcttgtgtaaccgaatatgccggtagggttttcaaatttacgttgtttatgtcatttacaacacgtgaaacgtctttcagttccgatttatctattagaaccgcttgaatttatgct

SEQ ID NO: 253690 - DNA, 404 bp, Gossypium hirsutum
cggacgcgtgggtttcttgctgtgccgcgtcaagcctcaaaattctgcaacaccggcctccctctctccctccctccctccctctctctctctctctgcaaccatgactgccacgatgggtccaccgcctcccagtaaccctaacccctcgaccgaacccgagtcgatagcccaagaagaatccgaacccagaacagccaaaaccacgatgggtcctccgccacctcttcccataaaccctaaccccgcgaccgaacccgagtcgatagccctagaagaatccgaactcataaaagccaaaaccacgatgggtcctccgccacctcttcccataaaccctaaccttgcaaatcccctagacgaagaagaaccatcgaactcaaagtcagaacccaaatcaactg

SEQ ID NO: 253691 - DNA, 304 bp, Gossypium hirsutum
ggaggatggttaccaggaagctataggtgctgctgatgtaatgaggttagatccattggagcgtgctgaaattgctgctgacttgttggaggtgaagtggtctactaatattatatctaatagatcaaatactaatggttctggattaccttccacgaatgatgcattggataataaaagctactaagagcatacactgattactcgtgaagaaaaccacgttcaatcttcagtacatgatgaggaaggaaataataaatgtgaagaaaaccaattttactctgcaatgtttcatgaggaaaat

SEQ ID NO: 253692 - DNA, 367 bp, Gossypium hirsutum
atggattacaggcgtaagccaccgcactcagccagacagatactatttttaaatgatctttctaacagtattccgttaaatgactaaattaatgtttctgaaatcttgaaatttttaaattaaaattttacaggattggggtttatattcttgtatatttaaaagcaaaatttccttttgtcatctgtgttgcagctctaaaccaccttatgctaaatttatcacttgtttagctgatctcttttttgttttaatgctctaatatacatgaaagattgtggaaaaaaaaaattttttttaagttggggaactataccgagggtatatatgcaatttaatccagaccaaaaaagtatgacagtgagga

SEQ ID NO: 253693 - DNA, 253 bp, Gossypium hirsutum
gaggtgcgcgacgaggtggcggcgatgaagccgccggccttcaaccgcttccagcacaccttctcgcacatcttcgccggcggctatgcggcgggctactacagctacaagtgggccgagctgctcagcgccgacgcctggagcgccttcgaggaggaaggcgtgctcaaccccgagaccggccggcgctaccgccgcgagatcctggaggcgggcggcgcgcgcgacgcgatcgacaacttcaaggccttcc

SEQ ID NO: 253694 - DNA, 440 bp, Gossypium hirsutum
  unsure (1)..(440): unsure at all n locations
cacgccgnntccggcttttttcttctcantttgnngtttctgcgagattggagggcgattcaaaaatcangggaagtttaaccagtgtcccatcctctggctttcctaatgaagtttagtcgttcggatcgcggatannaatgaagctcgaagtcggaagttgttcttgtttgtatcaaattagtttgatttggattcagcaaagccctttgtgatgaattttctaatacatcgggtgtaagcaactggacatgcacatgctcttccggaaaccagagctatatccttaaatctaactgttctaggtcctgtgattgcaatccagttgaatcaagtggagataggtggacatgtgtatgtgccactaatgggtttcccgaagtagcagtcgacaatcatgatactacctgttntacagcctgcaactgcactgctgggtc

SEQ ID NO: 253695 - DNA, 107 bp, Gossypium hirsutum
tatagggaaagctggaacgcctgcgcgtacccgtaccggaattcaatttccgacccaacccacccgtttcaacaacatcattgttactaacacactggcggtgattc

SEQ ID NO: 253696 - DNA, 222 bp, Gossypium hirsutum
aatgtcgactcaacgtcccgtatcggaaacatattgtacttacacactggagtgaggctattttatagatagcggcatatttagatatatgctatagatagctgatatatgggtgtttggattatgaagtacaaaaacaaaggaatgccattgaagtattaccgaggtgtttttgttggtgcaagacaagctggtgctacaaagaatgagtgaagtcacact

SEQ ID NO: 253697 - DNA, 449 bp, Gossypium hirsutum
cccacgcgtccgatttatcagcaacaaagcatcagtgtcaaagaaaggcaggttaccgttacaagacaaaagctggtgtggtgttacaggcaagtttctcagtcctccgacatgtatgaatccttgtaatttcagtttgttatgctagaagaaagcccgaatctaaaccagtaaaaccccacgagaagaaaaaaggaaaaaacaatggcaccacctataatcagatctctaatcgcattctctctgaataaatcatgccgttctcagaaacccatttctggttactccatctcttctattttcttctcatcttcacccacccaggaatcaagagcttcccttcctttagcggatcacttggttgagaaacacagcttttcccctgaacttgccgtcaagactgcatcttccctaacctatgtgaaggatcctcgtagtgtgatactata

SEQ ID NO: 253698 - DNA, 440 bp, Gossypium hirsutum
ttctttaataaataaattatcttcttagcagatccaaatgtaaaagagactcccatcaaagcaacccttctttgtttgtcaattcccagtccaaatctttcaacatctcacgacctcttcgcattgcttcattattagtagatccctatctcttgtttctctcctcttaaactctatttttttttccgtccagattgttctagaattttagatctttgtttctttttttttttcagaacaattttccatcaaattttgggtactttccagatatgggaaaagtttcagccattatatacattgctgtggctcttctaatcctcttcctcatctcgcattcccctaagaaacaccccaaccacagccgccatcgccgcctaaagctccgctcttctttcagcttcagcaaccccacccaccacgagcccgtggcttttgat

SEQ ID NO: 253699 - DNA, 485 bp, Gossypium hirsutum
  unsure (1)..(485): unsure at all n locations
cggaccgccgtgggcggacgccgtgggatcatgctcatgaatcttcccgcctctcaccaaactgnntgttcagctttccttcgaatcccttattgggaaaagaagaacatnnctgctgctgaatgaaccgtagagggcattttgtttaatattcatatacccacccttttggaatgctatgataaaatgcaagcagtgtgccatttttggattctatagaacagcttaagcatcaccaatggaggaagctgtactgtctggtcgatgaaagtatgatacggaaaatagctaaaaccagggggaggggggtggngggttgaggtcagtaccagcagcatgctgtaatgacagttgctaacctctttttgagcctcgaaattnttgtatgtcgtacaaggattcaagtgttgttcattcattataaacatatttgtanggaggagagctaaccttaaatcaagtgaatagatatattttgggaaaaa

SEQ ID NO: 253700 - DNA, 308 bp, Gossypium hirsutum
cctcgtgtttttgtgcttcttatggtcatttgatacctagtgtttatgtcattgatctgctttttggtggtgtagtaactagtttattagctgatttatatggatatgctactatggagatgctagatttaatgttgtagagctatgtcgtgaatgtttaagcccaaagcagttattttatgcctattaagctcgaaaaaaatcaaccagggatgtttgttcttctttcaagtagttcacctaagtcagagtgggagatatctgcaaattaaactcaaagattggctctgggagatagtaacatggac

SEQ ID NO: 253701 - DNA, 433 bp, Gossypium hirsutum
gcttgcttaaaacctgtggttcaatgttggaagcatggcaaggttatatagcaatggaaattgctttaggccatataaatgaagccagggccatatacaagagatgctacagcaaaagatttagtggaacaggttcggaggatatctgccatgcttggttgcgctttgagagggagtttggaacattggatgatcttgaccatgctgtgcaaaaggttatgcctcgtcttgaggagctgcaattgtttaggttagagcaagaatctaaatctttaactgaagtgacagataaaagggagcggccccttaagaaaactgctagtgaaaagaggaaatcgggttcaatcacaattgatgaacagtctccagctaagcggcagaaaagtactcaaaatcagaagaaattgcatgagaaagagaacacacgagggct

SEQ ID NO: 253702 - DNA, 456 bp, Gossypium hirsutum
aaaaccattaaaaaacccaagtcaaaaagttgcttactaacagtttccccacatcaaattcaacataaaattataattatatccaaaaaaaaacaataaacccagatccaaaaacacacacttaagatctgggtttatctagaatcattgaatcaacactaccttcaatcagtattttgttcctttccaatggcaaatccccacaaatccaggttctttcttttcttcttcttcatttgtcatttcattttcgtttctacaccttttcccactgttttagcaaactctaagcacgaatttaatgatccccatgaagttttattgcacaaacttgaagaattagtgaagaatcttagtgaagtagtttctagattagaaacgaaggttttaaaggaatctacaaaaattgatgatggggttggaagtaaagatgaaactagtttaataaaatatgat

SEQ ID NO: 253703 - DNA, 112 bp, Gossypium hirsutum
gtggtttgttttcaccaacgccagacaagccattccttgtttcccaaccgccgcaggaggaatccccaattcctgcccatttccattacaaccttggttacaaccccaccat

SEQ ID NO: 253704 - DNA, 339 bp, Gossypium hirsutum
cgccagaccaaatctccgccatatcgaaaaacagagatatgcagaagagagagcagggcaaatcaggtggctcggggggtggcaacgccgcacctccgccgaagagaggccgaccatttggaagcacagctgctagcgtagcctccgcctccgctgctgattcagtggctccgtccactctcctcggcccttctcttcaaatccacaactccttctctgagcagaacaataaaaggatagttctagcacttcaaagtgggttgaagagtgagttaacttgggctctgaatactctcacattgctctcttttaaagagaaagatgatatgcgtaaagatg

SEQ ID NO: 253705 - DNA, 449 bp, Gossypium hirsutum
  unsure (1)..(449): unsure at all n locations
gcagattgcaaattttggttcttagggaagataaatctggatgaaacagtaagaagtattatgtcatgctctttacttctagatagaataggctgtttttagtttaacttttatgggatgatgttcttgaaatgtgatttactttattttgaaaagtgattattttactttaaactcttgaatcagtgtcttgctttatttgtttgctgattagaatttgttttctcagatccgttctgattctgatctttatatttaaagtcctagctgtttggttcctactcctttaccaaaaagagttcttagcctagttccaatataatgataatggcttgtgacagttgttggttaaattgttgataattactaagcaaacaaagcttgcagttaaatacataagactgatgactaaattgagaaaagggaatnnnttcgcttttgccatattt

SEQ ID NO: 253706 - DNA, 408 bp, Gossypium hirsutum
  unsure (1)..(408): unsure at all n locations
ctactataggcgaaagctggtagcgcgtgcaggtaccggaatctgaagtttccgacccacgccgtaccggtctggaactcaaagaaatcgctcaaaacccaagcacctggcgcctgcatatttggtagtgaatctagggggacagtctcattacaatgatggttatgcgtggatnntggtgatttatggtggttttgggccctgggtccttatagggtcttttggagggtacacaatctattcatcatggatctataggcactgtgcacttttgcaagttgtcactatctagaagatcaaatctatntagatntgcatgcttagtgaaaacccaagttagatcaagcatcaaactagaactgcagctactcatggtagagcaaacaaactcgatcatattagtagagc

SEQ ID NO: 253707 - DNA, 429 bp, Gossypium hirsutum
  unsure (1)..(429): unsure at all n locations
gactgtcgcacctttagcaagtacagaaatcagttctgttggtgttaatttgaaacaggcatctcatgaggcccttcaggtggatgccatagaaagtgagaaaattacacagagtaaagctgaactcgatgattgggaagatgctgctgacatatctgcaccaaacatggaaacttcagacactgacgaacaggctcatgggggattagcaagtcatgaggaagatggaagtgggaatataaagaagaagtattccagagattttcttcttaagtttgcaggacaatatactgatcttccacagggatttgagattgcttctgatattgcagcggccttgatggcatcaaatgtcaatgcatctcatgctngtgatcatgattcataccctagtcctggaagaaaattggataggcaatctaatggatc

SEQ ID NO: 253708 - DNA, 143 bp, Gossypium hirsutum
tcgctctttttcgattgtgcttcggtgaatttgaaggctcttaatcgaaaaatatggcgtctgtttctttcgcgacaagagttcttttcgcttcagtatttgtcctctctgcttggcaagagttcaatgaatttgatgttgat

SEQ ID NO: 253709 - DNA, 250 bp, Gossypium hirsutum
tttgtacaaaaaagcaggctggtcccgtcccggatttcccgggttcttaagccggggcgacagattaagactgtctcaaatccaaaacgaaaaaaactaaccattttactttataggcgggcccctcaaactatagttttttaactaaaaaaaaaaaccccttttttttagttaaaaaaagtttatttagcctgatcagtttaccagatgtcttttcagtgacttttgctcttcataaatccatctcaaa

SEQ ID NO: 253710 - DNA, 353 bp, Gossypium hirsutum
  unsure (1)..(353): unsure at all n locations
acaggttgctaagagcatcaagattgtaatgacttcaagattagcatcagttgtaatctcccttgacatggaaagaatccaagatgcgcaattgcatatagatgcaaatgttgtgaaagaatcaattttgcaaacaccgaagctgaaactaaaggagcagcatgtgaaggttttggatgttaaaaagttggaagtagttcctccagctgatagaagtagaattcattttgaacttcattctcttaaaaatctgcttccaactggttgtggtaaagggcattaaaaaatgttgaaacgtgttgntattgctgagaagaaaaaagacaataaaagtcagaacaaagaagcgaaaa

SEQ ID NO: 253711 - DNA, 344 bp, Gossypium hirsutum
  unsure (1)..(344): unsure at all n locations
tcgtctcgtcccacgcccgtccgagggacctggnttacttaccgtgcgagcgttttccaaccctggagcagactcgatcatgcggcaagtgaagacgctgccaacatacttcgtcccgtggcccactacnnactattggcaaaagagaaatcgttgacttgtgcccttggaccgtatctnaggaagctttngctgataacnnngtaccggtcttcaaggggtttccttgttttcaaacgctgttggtgggagggcactggatctggtcttggttccctccttttggagcgtttgtctgttgattatggcaagaaatccaagttgggtttcactgtctacccatc

SEQ ID NO: 253712 - DNA, 351 bp, Gossypium hirsutum
  unsure (1)..(351): unsure at all n locations
acgaaatttatttcccctattcttctctgttgtttttccattctttgatctctgttaattcgctctttcgttttctttattctctttcccttcctttcttgtcctttcgtaacaaaccccagacactgccgcgccatcaacaccttccggcgtcttacctccgatcaaagttttgggtgcacagaaagacgctacactaggttttctctgcccgttctggtttttgtgattntttgaatttctctgcttcatcggtgactgatttcagtccagatagcctactggtctcgtggataaaaactgcttctggatatgtagactctctgtcataatactgtttagtagatcgtc

SEQ ID NO: 253713 - DNA, 452 bp, Gossypium hirsutum
cctaagtcacttttcattttttttttctgaaaacacaacagcagactcagcccctgctctaccctgtccgccgcctcaaaggatttgaagccccttcaactccgatctgatcggggcaaataaggctccgtcttcctcctcgcaggtgcgacgtgcgcgaacgtgcggggagagtgacaaccactggcacacacgcacggtgagggcccgatggttgcggcgccgctgaaactgctactaggaaaacgaaggtttctcttttgtggacgtcggccattcatatcaacccaaggcccgaaagaattcaaagacactatattgtgattctctctaccgtttctgtttttgggatttttggactcccttgcttaatcagtattgtgtccaattcaaaaggatgaagatagcagtggaagggtgcatgcatggagatctcgacaaggtctacgaca

SEQ ID NO: 253714 - DNA, 448 bp, Gossypium hirsutum
caattctcaaaaccctaatttctctgcttttccttttgcttaatcaatcgatcctcgtcaatggccaacagtaatctccctcgaagaatcatcaaggttcctctttcgatatccgtttggtccttttcgatttctcctagttgtttgttttccgagaaacctcaagaaaatcttggttctttttactttttatttttcatcttctgttgtacttttgggttttagagtttagttttatagctgaattgtttaaattttgatgaaccaaaagcctctgctattttcttttggatcgtcttttttgattggcgaaagcttttttctgcctccattttttgtgtgtttttagaaattttcttggttacttctgtttatttttctttgatctaaacaggaaactcaacgtctcctcagtgaacctgcacctggaattagtgcttcaccatca

SEQ ID NO: 253715 - DNA, 456 bp, Gossypium hirsutum
  unsure (1)..(456): unsure at all n locations
ccaaacatatcacaataaattaggtattccaccttttattttttcccccaaacacgcatgcaaatcgtttttccttatctaattcttttctgacacacacacaaatttcgaagctctggattccacctcttcccgtcctcgccgacggtgcttatgccggttggtttccagattgcaccggacttggatttaaagggatttagctttcctttcaagacatggagaaagcctgcttctggtcaaattgcaaccttttccgggtttttttattccaagaagtacttgactggcggtttattgtccatggagattctcttttggtttcttttgtcaattgcacttagtgcccagtctcctcttaatactcaacacggagccgcaatgaattntgttttctaagataggtgctggatctttagcacacttgttgcattgttgatacaacatccagtcatg

SEQ ID NO: 253716 - DNA, 189 bp, Gossypium hirsutum
gaaattccaaggaatcaactttctttccgttttaaaccggcccaaaaattacggtttcatttggccaggtggcaggaatttttaaccaggttttaagggaacccggatcaactgaagcgggagttattgaaaaccccatttaagggtgccaaccggccacggttggagggaaaggaaaattttggggca

SEQ ID NO: 253717 - DNA, 442 bp, Gossypium hirsutum
atttcctgaagccttcgagcctgtgagagtcccatttcagaagggacttggccagagattccagcagcctcctgggacaggaattgacttaggtttctttgaattggatgatctctcgaaaccatcaccaggggaggatgttttccctcttgtaatttctgctgaaacatgtatgctgccgcattcatctgatgaacatgttggtgatcccacacaaagtacatcagcccacatgcaaattactcaagccattttagagaagaacggtaactctttccaagcaaaagtgatacggcagatattatgggttgatggagtccgctatgaactacgcgagatttatggaataggaagctcagcagcagcggaaggctttgatgatagtgacccggggaaagagtgtgttatctgcatgaccgaacccaaggatactgcggtccta

SEQ ID NO: 253718 - DNA, 144 bp, Gossypium hirsutum
aaaccctaaccaattcttcattatttctttctaattcgtcgctttccgatgatttatttcgaggtttattttcagatctgatccacctcaaattggattcattttgaggaatggatgatgatagtgcagatggataaaatgtct

SEQ ID NO: 253719 - DNA, 439 bp, Gossypium hirsutum
tgtttttgctctttacggactcatcttcggtatgatcctttcttctcgggccgggcaatccctatcttaatacattacattattccaagactcgttatattacaagttctcattacttttattcttctttttatatctttctttccttcttgcttatatatatagagcttaagcctgttctggtttgctttaaaccactataaaaatggcttattaactctcttttttataccccataatctcttcttttttgaaaacaaaccatcaatacctaaactcacaagggttctttgtttctttctacaactttaaatttcaactacaaaacttgcttttcatttttatctttaatccgcgtaccttcattttaatctccttagtgtccttaatattgttaacaaacttcttttttctctttccattaacattttatactatt

SEQ ID NO: 253720 - DNA, 145 bp, Gossypium hirsutum
aggatgttgaaattaatagtttaatctttctttcttatcctccataagcaaaaagaaatctacttctttgtttacgtatatttgtttgaattggaccgacccaattttcattaagaattgaataataagtttttgacttgaatcg

SEQ ID NO: 253721 - DNA, 250 bp, Gossypium hirsutum
acccttccgccaaacccaaaccctaactggttttcctttggttttttggctgccactgactaatggagtccaaaattccaccagctccttccttattaagccatgagccgtttaagggtaactgacattttggacccttactttccctttttttgggttaaagaaacctcaattttggctaacaaggcccttaccttttccctaatttttgaaagcagaacatgaactaagttccgccctcgacctactg

SEQ ID NO: 253722 - DNA, 449 bp, Gossypium hirsutum
attttctcttctttttcttttttccctttttgtgatcttttctttttcttctttattttttcctataagatctttgatctttacctttttctttcaaaataaagatatgggtatcttgtattttgtgatttaatgtttgattttcactttcttttgtttctgggtattggctttttagccatttttattgcatttgaatttgttttgaggaaaaacatgtaatttttgagtgactatttaagcttgaaaatatctacttgtttatgtagatcttttcttcttttctttttttggtacttcagttttagtaaaacaaaaataggaatttactgttttctatttggttatttggtgacaaattagccatttttaatatccaatttcattgttttaagcttgaaagtatctaattgtttgcataggttttttttccttttaatctattttag

SEQ ID NO: 253723 - DNA, 444 bp, Gossypium hirsutum
ttttgttttacattttcttattattgataaagaatccccttcaataataactttttcccactgcatgttaacgccgatctggagggctttacgacacgctattgctttcgccccaaaggctgagggaactctttgatgaacctctgtacatgatagaagaattgaaccctccttatcgcgggccacaaccccaatagccgctttactttgtctaccgtcgtatgctgcatcgaaattgattttgactaccttgtccactggctttgtccatatttttacagatatggaagattgcaacctattttaaccaactgcatcaagatctgaaatatagctatgaacaaatctccctacttcttttccagatttaccatgttttttaggcaatctattgttcctgtctccccagatggcccatactgcaacacaaaagaatcgatgctg

SEQ ID NO: 253724 - DNA, 430 bp, Gossypium hirsutum
ctcctcgaaccaaaaaaacagagctctcaaaatctcaccaaactagtatttgcaaaaactcgctaaaatcttttttgtatagtagtattttcaacatttaatttttttgctttactaaaaaattagttgacatgacttcctttgttcgccgtttaacggtcggttcaacgataccctacgttccggttcatcatcagaaggtttaaaccaacgattgagattcctgccttccctctgttgcctcacaataaccaacggccgttaggaatcgctctgagatcgagaaagtattggagagtggaggcagtggggccggttggaagatcggagggcggagatggcacgaagaaggcatgagggggaccaggaccaggcccatgctcgtattcattgggggaccggacgaccgaggtagagaggagagagagaa

SEQ ID NO: 253725 - DNA, 300 bp, Gossypium hirsutum
aaacatagaactagaatttggttgggaagcaaatcaacaagtctcacaaaaagtaaatttaaagtccaaatttaagataattgtccaaagctgtaatgaaaactgatataattatctctgcaataatctctcatttcttcttggcagcagatttggtgaccttatcaccagttgagactttctccgaatacctaccactcagacgttttgctgtccgctacatgcgccagaccgttactctccgctctttgatgaaaattctgacgctgatcccaacttgttttacccttacgaaaattc

SEQ ID NO: 253726 - DNA, 334 bp, Gossypium hirsutum
gctcaacactcggaggacatctcagagatgcgaagctctttaactccataaattaaacgccccaaaatgtcaggactgaaactgagcctggtagcttcaatctacgtcaagccccgccaatgggtccgaacaataaccaccacccgcccttcaccttcaccttcactccgcctaactcggcgcatgactgcccttttctcaccctccacccattttagcaattcccttcttcccaaaaaaaacctacttcctcttgtgagatttgcctttcccaactggtttctcttcctcagcaaacaataaaggagctatcaacggatcgggtcccggatcg

SEQ ID NO: 253727 - DNA, 297 bp, Gossypium hirsutum
acaatagttctccatgcattctatagactgattgattttattggcctacaatacgactaacaagttccggaaacccgagtaaaccgccacgacaaccaaatgtttgactctgctgcattaatttgaaacataattcatcttcataggtgtaataggggtgtgtcagtgtcaccccccaattgcttatttcaagtataaaataaagtaagtctgggtttcctctcgtttctggaacttgttagtcgtattgtaggccaattaaatcaatcagtctatagaatgcatggagaactattt

SEQ ID NO: 253728 - DNA, 162 bp, Gossypium hirsutum
gctggaagaaaaaatatgttttccaaacaaagatggagaggcaaccatccatgcaggttggtttgatgaacaggcttttgtttgctcctttttattccaacatcagggtcgtatcatgaacttgccccgtccttgtggagaaaaaaacctactatcaacttc

SEQ ID NO: 253729 - DNA, 237 bp, Gossypium hirsutum
gtactttgtcactctacgagacagggattggtattggagagcttttcttggtgagggttaacacagagaccatcctgcacgtaatccatttgttcccatcggtataagttttgaaggaatcaaatttccaaagagtacaggtgtggtttcaggctttgccaacaaacgttgttgtctatcggttttcatcttgtgtatttacgtggtttccctgattacaacattcaaaatgaattc

SEQ ID NO: 253730 - DNA, 348 bp, Gossypium hirsutum
tgtagaataccagccctcactccacacatgactaatgggaggatgcttcttcacaaggtgctggatggtgcccagataagtttggaagaatatgaggttatgaaggatctaataataccacttggccgagcacctcacttttctgcacagagtggagcttgagtggtgtgatttgtagtcattgtggaaattctgtttccttatgattagtatctactgagaagttgcaaaatctgatgatcgccgatggaatcatctcaaaggttttgcttggagtgaaggaactatatgtgctaacaaattcggctcattggtgattacggagttgattgttcaaaattaatcgaa

SEQ ID NO: 253731 - DNA, 173 bp, Gossypium hirsutum
gcttaaccttagacttacgctgctcttatgttcgagaacatagaaattgactgatgctacatttttgacagagtaaccatggatatatatgcggatatggaagagtattgatgagagtactctgattaagagcctcgtgagcaaggacgttatattgataactaatattacaa

SEQ ID NO: 253732 - DNA, 266 bp, Gossypium hirsutum
atttagagtaacgccaaacgtgctagtatcagatgcaagagcagatagcgttcgaactatggagcagatgaaattacaacctgacattgtactaatttaacctaaacaagcaacgctgtcgattcaatcgtgacttacacgattgtgggccaggaagactagtgcaaacagactaactaacctagagatcgctaatttgttgacgcctaagcttgtgcacgaagaggatcatcttctagctgccctcactgatgtaatgcgcacaa

SEQ ID NO: 253733 - DNA, 289 bp, Gossypium hirsutum
aacaacgttgccctcaagatgactgtgatattcccaagccccttatgaagaagtcagctgaatcagcaaatggtgaggataataatgttcatgtatccaccagtcggtgagaacatcgaggaccagaaattcatgtggcttcaatcaatgggtactgttatcatcagtatggtttctggatgtgtactgaaattaagatgtatctgcaaacattctgtacatatcaaacaaaccttttcttttgtgtttgtcaaactgtttcttttatatgagatgcaatcttttcatc

SEQ ID NO: 253734 - DNA, 419 bp, Gossypium hirsutum
aaaacctacaacttcagcaaaaacagaagtagaacgactcccattaacaagatagcccattccttggacgatctctttccaccagctccacggcgtaatcagaaacttgcatatctagaaatcccgacttaactgtaaacagtctttaatgatagcaccgatctccaatttatcttcccctttcatttgtagttttttttattttttttattactgatagagcatccccctctacctctatagccattacccccaaatccatccccatttgaagcctttgaacacatgcaatagcctctgcaacaaaaatcgaaggagcacacacattttaataaccctagaccccaaaatcttcccctttgaatcccgtacaacgatcccagagcaagacctatgttcctccttattgtatgcgacat

SEQ ID NO: 253735 - DNA, 228 bp, Gossypium hirsutum
cggacgcgtgggtgaagctagagtggtcttaagttgatctggaatagcggatctgtattctagaatcttctccgccattttcttcacatctgattccaactcctccaagtcctcttcggagtcaggctccgactcagctcgtcgactgtcgacgccggtctcaagggacatggaatcaaaggcgaccggaaagaacaccttgatggagcttcttctggaaagacgtta

SEQ ID NO: 253736 - DNA, 416 bp, Gossypium hirsutum
  unsure (1)..(416): unsure at all n locations
tcgcccacgcgtccgattctcaacatttcttctctctccttttctctccgttcccctaaaagacgcaaacgaagaaaattttcacatttaagttcccttttctttttttttttaaatttaattttacctttaaagtttcgatctttgttaatcatcataataatagagaatccaatcttcctatttagccttccattgtaatttagtagatatagccgtatatatttatgggcagatcattcaaatgatttgtttagcagcgtatttcatcccaactttcttttactggcattcacggtgattacttttgatagcaacatgaactccctgtgctttggtgcttgctggtatggaggccagaagatctgtgctagtcattatcgntggatagttaagttgtgtttggctttctcaat

SEQ ID NO: 253737 - DNA, 307 bp, Gossypium hirsutum
  unsure (1)..(307): unsure at all n locations
aacaaatactatcaantttcaacaaatcattttccaatatcccacattctcttaatgctccacataaccctcanactttttctacttttaaaaattacttcttacctaatcactttacctctttttatcccatttctttttccatcaatcttctctcttcttattttatgactttattctctttaaaaacagaacccacttcttcccatacttttttcctttgtatattacatattctgctttttttcaatccacattgacaatatttcctttttttaaacaacaatatttctttaacaaaacatca

SEQ ID NO: 253738 - DNA, 469 bp, Gossypium hirsutum
tctctttgcaaagcattagcaaccatagccatggcttcctcaccaaaactctggtctatgtctatcctcttcctttttgccctcttctctcatgcaaatccatgctagagagtacttcatcatattcccaatagttaacaccaatgtaaatgatacatcttctttttatgcatttttcttattactcttttttcttagtcctctcttatttaattatctacattgttcacggtcaatggaagcatattctctttttttttatatttataattatatccttattttttttattattatttctaatctttgtctttttaatttatttattttcttcttcataattctttttgtttttttttcttctattactttatttaatttattttaattattttttttacttttcttttttctataccttcttttttactttattttctttttttatttcattttttctatttttctt

SEQ ID NO: 253739 - DNA, 351 bp, Gossypium hirsutum
cccacgcgtccggcgaaacaaggcaaagcggagcagccctagaaaatgacggtattccaaaacatagcaatgtctcgtcgagagggtcgtgattccgactctagacgacaccgttctgggttcgaccgtgaacccagccctaagaggtctaggagagatgggaaacctcatactgaaagacaggcatcactcgttgatcgttaaagactggcttcacgaaatacgacagacttggacgacgagcatgatgaccggttcaaggtttttgcgggcgaacttgatactagcggcgcgtcattagaaacttgaccctgtcgggactgacggtgtgactcaattcttcgatttgac

SEQ ID NO: 253740 - DNA, 180 bp, Gossypium hirsutum
atcttaatttccttcccattttctcatctgggtcatttcctatatggaattctgggttgtcttctgattagggtataaagttttttttcagatgatcctatattggatttgacagatccccatttttcctttggtaggattctatctgttcataataaaaagataaagatggaatctgat

SEQ ID NO: 253741 - DNA, 335 bp, Gossypium hirsutum
  unsure (1)..(335): unsure at all n locations
cccacgcgtacgatttgtattccttgtatatagctatggttcttagctgacttttattttctcctctacaacgaatctaaaccgaaggacccatttgtctaaattataagtgcccttatttaatatatatgatacagcgaacatgaagatatgatgaagaaataaaggacgagtgtagagtggaagaatagagaatcgtttgtgatattgttctttagaagcttctcattgaatatatagatatctcccttntaatccattgcaaaaatcataacgtaccaggttactgaccgacaagttatgcccacctattctgaaatctcactaatgctata

SEQ ID NO: 253742 - DNA, 422 bp, Gossypium hirsutum
  unsure (1)..(422): unsure at all n locations
caggatttgcttactcatcttctaaggagccttgcaagccgtactggtgaacaaggggggaaaaacatgtctgggcttttgccagaagcttgtgatttagaagctgtttcagctttattttcgaatggccaaggccctcctcggcctttcaagcaccacataactggaactgcatcagagattccacatacaggaagaaaatcttgtgatactaaaggtgctgaagtgccaagcaatacagctggagccagcaagataaataattttgatttgaatgacatatacattgactcagatgatgagacagatggcataaagaggtcacccgcacctgtgaatgcanggactggctcccttgattgcccttcatgggtccagcaagattctcatcaatcaagtccaccccagaccagtcggaattc

SEQ ID NO: 253743 - DNA, 420 bp, Gossypium hirsutum
cggacgcgtgggctttttttttttttttgaaggcccaaaacaataggggggggtataaagaaatgaaggtcaatgaaaatagcatcattaagaacaaatgaacaatttcttgaaaccctctacaagtgggaaatccatccacatatacagcaatatatctactttcaaaactatccacgtagggagacaaaaggataaaaactacatacacgttgctactcacccaaatatgcatgaggagcgtgcaatacaagaagcttatcccatgtttggaaaaattccagaaaagtttgggatcttgtcaacatgcttcagggcgcgctctgcaatctgtcgggttctgtagtcggcatggtggaaggcatcaacaaatgcagtgctcacattttgatctccagaaacttcataagctatatcatc

SEQ ID NO: 253744 - DNA, 292 bp, Gossypium hirsutum
  unsure (1)..(292): unsure at all n locations
aagccatgcaagtatatatatatatattgatatatggtttataaacaggtgaaagcctagttgttgattatgatgaatgtaaggaacttaggtttcagcactggactcctttttaactgttttattgcaggaaaggtttatttttgtattatatatgtttcttaaaactctacatatagttttcaaaaaaaaaaaaaaaaaaaaaaaaaaaaaaaaaaaaaaaaaaaaaaaaaaaaaaaagnggaaaaaaaaaaaaaaaaaaaaaaaannaaaaaaaaaaaaaagagaaaag

SEQ ID NO: 253745 - DNA, 444 bp, Gossypium hirsutum
ctcaaactcaaaacacactaaaagtctccggcatcaatccgatcaacgcttgccctttccgtcttttgtttcttccttctagttttcttctccactctcctcgccgtcttctccttctcttttttgcccctctttggcgtcacaactggacttagaacaccgatcagaaaccaccctccatctcacgttttccgttcctctccgccggcgaaactggtgaagtttttactgttgtgtccatgggaaccggtaaagaagatacagtcattttcctggatcgtgcttctcgatcaaccagagggagaaggatgacgaagttgctggacgaggaatttgaagaggacgagttgttttggaatcaagaagcttttaaagaggaggagaatgatgtcaattacgaagaagagccggaggttgctgatggtttgatagtgacttcgatga

SEQ ID NO: 253746 - DNA, 176 bp, Gossypium hirsutum
taaatcaggggaaatttgctcagtttatagcagatatgaatatagggattggggctcattttgacaacctttctatgtgatctgttaactgtcaaaaccttgaatgtaaagaatctattgcaaaacttagttatgggaggaaatgttcgattaaactctgtttctacaattacatc

SEQ ID NO: 253747 - DNA, 395 bp, Gossypium hirsutum
ttttaaactttaaatctaaataaataataaacgaaaacaaaggggccggagcaatgaaagaaaattttcaaaagaaagaaaaaaaaaagttcttggctatttagttttgggttgttacttgattactagttttgtttttaaaggtacaatctttaattaaagaagggctttgtttgaaaagaaacagagatgggtggtgttgttgctgtcgatggcttgttgtctctttgctttttttctctttggaaaaacaaaagatcttggatagtggtgaaacactatgaggagcaacataaggattaaaaagccgagacgaggcggagtttggcgggatttggggcagaaaatgaagtgtttatgcgccggagagaaattaatcaaagtggaacagatga

SEQ ID NO: 253748 - DNA, 174 bp, Gossypium hirsutum
cgcttcttctactatttccaaattcccaatgccgtggcacaagacgtagcttggaagttcttagatcttcgcttcaatttgagttgctccctggaaatatgtcaaaaaatctccatcttattcatttttacaatatcatgctgcctttgaagttaattcataatggttgatagc

SEQ ID NO: 253749 - DNA, 447 bp, Gossypium hirsutum
gaaagaagagaaaatgagttagaaaaagaaacagaagaaaaagacgaggaaaggctagtgaggaatgtttccactaaccaagatatgaatttttcttgtgttgctacttttaaggttcctgaaagatcgaaagataactttcaacttcaatacctctcaaatgaaagacgctttcatacgatcaacttaggcaaagatgaaatcacactacatgatcccgaaggtaagcgaggtaaggaaattttagaaaccgagtccagtgcagatttgaaaattattgataaaacttttggtgacttagttcttaaaagatcccctcattttgatccgattaattgttactcttcgattgtggttgataaagtcattacgaaacagagcgtgatttgttattctcttaatttaccttgtgtaaaatcctcgaatttgtccaaatctgttttggag

SEQ ID NO: 253750 - DNA, 354 bp, Gossypium hirsutum
aaacagataaacgaggaaccggcagacaaacccgaggttgaacaaaatgcctatgaggttaccaaggctgtcatcttgtctgaagaggtggaagactacagttccgtctcaaaagaatgtctgaaggaaggagaatcaaaggaacaggtagaggcgaaaaacttggagtttgaagatcattcaatcaaggaccaagaagcatccgtcatcgtagaatcggaagataggagacaggatcaagagtctggagacccttgaagtacaggcaccaaagatgcagaatcagaagaaaaaatttagggacattgttgatgaatccaagcatgattgtcaaggacaagagtcacgaaattt

SEQ ID NO: 253751 - DNA, 312 bp, Gossypium hirsutum
atgcatgagaaaggatagcaagtctctgaggtgacctcagggtggaattctctgttaagtccaccctgccccagggtgctcctaccctcttggtctttttagccaaggtgtgatttaagcacctgactgtcccgtttaccttaacaactttgggaatccatgtgatgattttgatacttcttcctcatttgggacattcagcaggagcatttgggcttctggggcccctgagaccaaagaagatgggccaagtgccctgggaaatcagctgaaggtcaacaagaaaactggttgtgagttgcacctgtcctg

SEQ ID NO: 253752 - DNA, 193 bp, Gossypium hirsutum
ccattacattttctgcttttttttaacttcccctggtgggattttttcgaattaggtggagttggccggccaaggaaaaaaccttgggggcagccttggacctgttccaaaaattgccgcctcgtacttaaaaaacaggcctttccgtttttttaacccttttgcctaaaaattcctccaatctcctttttaa

SEQ ID NO: 253753 - DNA, 352 bp, Gossypium hirsutum
cggacgcgtgggcggacgcgtgggcgataaaatacttttacatccagcccaatccctgaccaaagtcagtgacgcctgaggtaggcctttttctctcaattccgttgttgttatttgcccccagtcctttctcctctcgtcactcggagaactgctttgttttcactaataaggtttgtttctatttacgcttttcattccgttgtactgatatataggttgattgcgcatagaatctgtttgataaaatgcttaagggaaaagtttctccctttttcccaaaccgttttctttttaaccgatccggcagttttttggttggtgacgtggggcttcccataaaatgaaaaat

SEQ ID NO: 253754 - DNA, 415 bp, Gossypium hirsutum
aagcagtttgggcattattgctatcttaaaatgtagtttcctgatttgttttgggagtttagtggttgttgaagctttagatcgtcaatcttagttgcagagctaatgaacacacaaatttctcattaataacctgtcataactcatggaagtctattttgtctaacatttttggttgttcttattagcggttcaccaatattgtttaaagttcttgtcatttgttaattatatagtaatcaacttcggtgtggtgtttgaacttagacctcattcatcttcttgttccatgttaatggagacttatctacataattggcgaggactatattctggaaaattttcaccactgttgataactaaaaattgttcatgtacctctagatatgactaagagaaagcttttggaattgag

SEQ ID NO: 253755 - DNA, 169 bp, Gossypium hirsutum
agtattgtttaattatttagtgagttgctactgttgagatgggcgtgtcaaaaatcattagaagctgaaagtgtgtactatgtcattcatacatatctattcttatatgtagatgagatatgtattaaattgcttgttttatggctataattggagttattcttctgtt

SEQ ID NO: 253756 - DNA, 352 bp, Gossypium hirsutum
tcgcccacgcgttcgggatataagatatgatcgtagaattgttgaagcctggattgtctagtttcatgcttttagattaagtttcttgattaaatgaaacatggtaatgtataacatggcagtttgaaccaaaacattttaggtctgctaaaagtaatttttatgctagttggatcttcctatgctaaatgggggatgttattaagtagatgaaatatgatagaaaatatcactgaactggttggtttaagtattttttctaccctaattgtatatgatttatatttttgcagataggagacagaatttatatggcgaaagtacctttggtcaaattttaaaaagccgggat

SEQ ID NO: 253757 - DNA, 297 bp, Gossypium hirsutum
aggtttcccatcatgaaaagagctcaaaatcggactaattagtcgctcttacaagcgtcaactctgttgcagttacagattcttttctagaagaagcatggcgtcaaatcatgagcaacctgggctttcctctctaggaaaggagggaaggtcttctggtgagactggtccataacatgaaccccttattaacgggattcacacttgtgaaagctattatgcttacactgctatccttccatttctctctccccctctagcatgacttctatatgaggtatgatgttggtgctacat

SEQ ID NO: 253758 - DNA, 411 bp, Gossypium hirsutum
taagaatgtcattatgacgaatgaatatcagtccacaaggctgtgtgaggcactatataccaaatgtgaggacagaatggaccagcttcaagttcttagacttcctactatggcaaaatttgatgcaggtttacagcaatgtaaccaaagctttgagcaggagtgtgttgggccttcgaaagccaattacgagcaacgaataatgaagatgctgggaaagtcgcgttctctgtttatcaaggaatacaatcaaaggctcttcaattggttggtggccttctcccttgtcatgggggtgggtgggcggttcatcataaaattcattttggtcgaaatggcggcatggatactatttatattcttagagacatatacgaagatgttctggtcagcggagtctctttactacaa

SEQ ID NO: 253759 - DNA, 455 bp, Gossypium hirsutum
atccgaaggtggagtcgccgcacctgccggaacggatgaatgtttggacaaagcaaccaaccaagaattagccagtaataatggggttgaagccttgaatgctgtctctcaagggaatccagaaatatccaagggtgaaagtttttcaatgtcacctgaggtttctgagatctgtgaaatgccagatcataacacgattgatgacactccattgaaagctgataagataccggagaatgatggaaagatgtcgaagagtgaggcaactgcagaccatgattcttcttcggaagagaaatgtgggagtattgtagaagaaacaagccaaaatgctgatgttgagtccaataaacaagaggctaacttagaactcaagaaacaagctttgagtgataaccatgatctgataattgaaagctcgaatgaggcctatgaaatagttagcaaggacgatc

SEQ ID NO: 253760 - DNA, 441 bp, Gossypium hirsutum
gccttgttccggacgagggttcgaccgattcttcgtcggcttctaagatccggtattctccgggaagtttatcacccgtcatggatttcacgacgatctccaacggtcattcaccctcgagtttcactaagttcaactctgcactcactgcgggtcttttaaacccgcattctccgccgcctccgccggacaagtcacgatctagtccaacccttttcgagatgatggctagcgaacccgatgtccacccaaggacccaaacccagatccaagtacccatttcaggtcctagacaaaaccaacccccaccagtcattgacaaacaggcgttgacaatgcagcggatttcaaaccttttgtcaacccggagccccggaaaccagttcaacgatccggattcgagtgatataaagctaacgttgagttccaaggatgggatta

SEQ ID NO: 253761 - DNA, 416 bp, Gossypium hirsutum
aaaatctttgtgggatttagatgttaacaagcatcacaactctgcaaattattctcaaaatttattgctttaaataagaattcaagctatttgccttagattatgtatatgccctcactatcattcttagtgcaatctgcatctgtggttacaagttacagcaaacaaataaagctggcattctgatccataaacttagtttgtctgtcgattgacatgacatcatgaatcattcgcatttcgttagcgaattgtgatattctataagtttcagagtcacgcctttagtaataatgctaaagctggatgaacagacaccaactatggattcctatatccatttgtttaaaatggtgtattagccctagacaagaatcctttctgaatgaaaaaatcttaatcaagaaacatgagat

SEQ ID NO: 253762 - DNA, 182 bp, Gossypium hirsutum
gagcagtctgtctttggcattggctatgcggagcggcgtctaactcaagtgacatgttcataactagacaacaactatgatttacctgatggacaaatgataaccgtcggttcttaccgtgccaaacgcccccatgtgcttttccaaccatgctgtatctgcttggaagcttctaacgtcaa

SEQ ID NO: 253763 - DNA, 441 bp, Gossypium hirsutum
ctcattcattctcagtcttttcatcatatcattggctttggctttggagtttgcaaaaccaaagaagggttttcaattttcaagctgcctcccacttgtaatatctttctcctaggtttttcagttttcttttgtctatggctgcttctgattctgacgatgtgaaccttgcctatgacgatactgctgacgacgattacttctatctcgacgatacggatgaggacttacatccaccccaagccagcgacagccttgatgacgatcaactccaaggcagcgacagccgtaatgacgatgatgacgatctactccaaagcagcgacaggcatgatgacggtgatcatgattgtgacgacaacgatgatggtgatgagaatgcacttgaaaaagatgatcatgattccccaatatctggccaaaactttagtgttttaactg

SEQ ID NO: 253764 - DNA, 420 bp, Gossypium hirsutum
gcaagtataaataatcgggaaggggagagagagttgggagatgaacggaatggggagacaggggaagagatctggtgcggcagggttgcaggttcaccatcagagacaatactcggataacttcttggaaacgacatccaatggaaggtggcttcagtctgctggccttcagcatcttcactcttctaacaactctattcctcctcttcaggattatgcattttatggcggtggagatgggggaggacaagggtctagaatgtataggaatatacagagggaattcagtatggggaatgactttttcacggagcctacaactcctccggttggttcacggccgtcaagccagaggatgaatggtgatcagtcacccaatgagttcagtccaggcctcttagatctgcattcttttgatac

SEQ ID NO: 253765 - DNA, 195 bp, Gossypium hirsutum
gttccatgtggccacgcctatggacttctagtacctggaccctgataatgaccttataaatcgaacgaccagtggcgagctaaatatgccgtaagctcgtgccatagactgaactgtttaatgtttacgatcggatcactaccctgatcaattgtttaagcaccatcgattattcattcttgctggaagaaattg

SEQ ID NO: 253766 - DNA, 358 bp, Gossypium hirsutum
gtgatacattgtaccagtgcgtgaacaactatatatctgctaaaaacaggatctctgtccacgctactgctgtaggtacaattggaacctgcggtttagactcgtggagtttaggcaacgacacttactggcttagagagaataatccgacaatctacgtccatcggcaccacgtattctggcaaggttgcattcaggaactgtgtgcatctggagctattacgcacagaccatggataagacgcttgaacgcactggcttaactgaattgctatgcacatttagatgacccaaacgatgggatggtgctggagctgactacatgtctatctccgtttacgattccatctcggtggat

SEQ ID NO: 253767 - DNA, 306 bp, Gossypium hirsutum
  unsure (1)..(306): unsure at all n locations
aagaccccatagtaaaattccacaaccggaccataaaaagtcactagaaagtaaaaacatcagtgcattgtattccacgagagatctccattattttcattttccatttataatttttaataattttcaacacctaaaaaattgcttcaaaccctagctatgggttttgtttcacaaaaaatgtaacagaaccttgcagatctgaccccccagattttgnccttcttctgtnttgtttcttgaacttgctttttctttttgctgatgaatgtcttttttgatcatcaattgcactgttttatactg

SEQ ID NO: 253768 - DNA, 336 bp, Gossypium hirsutum
aaaatgcaggcgcatgtgtaattcatatgacacgtgaacttcttcagctttctccatcttcggaacttacgaaggagacttctagcgatctttcctttatgattacatgcgaaaaaccaaatccaagccaaggaacacctgcatcactgaaacgaattatggctttgaacttccacaggatactacgatgccatagttactataattgaaacaagcatgcagcatgaggaacttgtccgattgctcactacataacacttacgggaggcaacgccatatgcaatttttcatgcatgatgggcagcacgtttaccatttgcaaattagcctatttga

SEQ ID NO: 253769 - DNA, 171 bp, Gossypium hirsutum
ttttggggggagggtattacttctggtgagaatggttagggagaaaattgaaacttcaattgggaggagaaaaggttcccttgttaaatgggaaaaaattaaagaaaacgggaaaggtcttgggattgggggtttttcggatgatgatttggaaagatttgaaaagggttt

SEQ ID NO: 253770 - DNA, 399 bp, Gossypium hirsutum
ctgagattttaggacagaacagccctaatcgtatttagcttcagttatatctcaccacgtcgtgcagtaattttcagattttcttttccctaatttccttcgtcttccacatccttgcgactcgaactgatttactcacaacagcactaaaaaaaaacaaaaacaaagaatctgtctgtaactgtcttttgcgtttctagcagttgaattgaaagttgagtggtcgactatgattctccggtcggtcataatggtggttgtggttgtggggattttatcctctgcgtcgcaagcattgcgattcgagctgcaatcgggacacaccaagtgcatctccgaagacatcaaaagcaattccatgacggtcggaaagtaccacgttgtcaacccaaacgaagc

SEQ ID NO: 253771 - DNA, 458 bp, Gossypium hirsutum
  unsure (1)..(458): unsure at all n locations
gccagaacctgatgattctgagttggttatggatgatggagatgaaaatctagatattcaatgtcaaattagggctcaggggaaacatgcttatgaatcagattctgatggccttgctgacaatcaaaacaagtgtgagcctgatccggatgatttgcttcatgctgaaactctgcaactgaaacatcattctgtatccactgaaaacagttctcaatctcagatgactcttgggaaatcaacagccatgagttcaaatgaagagcctgatcctgatgattcgggtgcttcttcaagttctggaaatgtggttgaacctgtggtgatgccagctctggacaccaagattcagacaagtgagaccatagatgagccagatcctaatgatgtagaagcacaatctagcatttcgggatgtgtgaacagagcanattatgatcctcgtcatcacataacaa

SEQ ID NO: 253772 - DNA, 442 bp, Gossypium hirsutum
gaaagctagaaaccagagagtaaaaaaccgcttgcaatttgtggggataaatcaacacatatagaatatcaaacactagcattttcagatctctaggatctcagaatttcaggggggataaatcaggaacttgttgcttgtttctcgataaaattctctttttctcttttagctcttttgtcttagctcatccgctccttcattctgttacttttacttgcctttcgattcatatttgtatgaaagcaagtcatttttaggatctgggtattgatcaaaaacaacaagttttgattttgtttttcaagtgaaaaaggttaaaaaggaaaggaatttcctttaaaagtaatggtggtttcagttcttgtggtactgaaagggacaccttttgctgggataagggtagaaaaaagactttagcttcatgtgaaggatggtggca

SEQ ID NO: 253773 - DNA, 442 bp, Gossypium hirsutum
ggaatacgatattgtgaatttgattgcgttgggagtgatctcatggacgacagtttttctacttgtccgaaaaatcttctccgaccgctcctttgaactttgcaaccgcattgtttctacaatccatgggattttggctgtgattttagcctcgctctctgttgaagattggagctgccctgtttgtcctttggcttcggcttctacgcctaagcagaggcaagttttggctgttaccgtcgcttatcttatatatgacctcatatgctgcctctttgacgtcaaattcactcttgacaatacagttcatcacttggtcagcatcgttggtcttgcagctggccttgcctttcaattgtgtggatcagaacaagttgctgccttattcataacggagatctcaagtcctttcctccacgccagggaactgcttaaagaattc

SEQ ID NO: 253774 - DNA, 405 bp, Gossypium hirsutum
  unsure (1)..(405): unsure at all n locations
atccaagtaggccaccaacgcaacctcctctctgcttttgtttccagtctggcggaggcgcaaaaacctctgctcttcaaaaccattaaaatcaaaatcccaatttgcatcacatttcatccaaatctgaaatgcccaaatcaaattcatccaattcctcctcagatgaggatgtaaaagcacctaatatgtttgaaagagcaaaggaagagatagaagctgtgattcatgttgggaaaatacatccttttggtaaggaaactcatgggaagcgagatgatattaatgaaaacaccccattggatgatgtgaaagcacccaatgtgtttgaaagagtaaaggaggagtttgaggcccttgttgaaacagtccatcatanaaaagagtctcaaactcatgttgatg

SEQ ID NO: 253775 - DNA, 445 bp, Gossypium hirsutum
gttcaattctccccctcttgtatcttctctttcctttttttttttcaattcaaaacccagctccaggccaagccaagggttcaacctgcagttgggtctttaaggttgttccttggaataaagacggaacctgagaaggtgattggtggtgttagtgaggctgaaatggatggttcaaaaccagttatggaggaaacagaaactgagggtcaagtcccaatggaggccgagactggagctgctgaagttaaagaccaagttcaagttgaagaagatgtgagattggaggctgatcagctggttggtgacaacccagattcagtagcacaacaggccattgaagatactagcaaagctctcattgttgttggtgctcaaaatgaagaaaaaatgaagcctgaagagagtgttggtgttgaagacaaatctttagctgaaactgata

SEQ ID NO: 253776 - DNA, 409 bp, Gossypium hirsutum
  unsure (1)..(409): unsure at all n locations
cccacgcgtncgcgaagaaatcctaaaatttcacttgaaatttcttctctttttttccccattttatttttcccaaaccatttctcccctaccccgattccctttattttttcccccaatttcctcaaatcagcagccctctgcatctccgtcggtagcccgctactatatctctgtcgacatctgctgtcggtagccctctctctctttgtttactatcactgtttttacttgtaattttcatattaataactatctcttcaaatgggttttcttttcaatttatatgccatcgggaatagacctctntagtcttcgaaaacactttccctgatcgttaattttactacagttgacagtgttctaagggttcagactcgagagtgtgctattggtatgcttgaaaaag

SEQ ID NO: 253777 - DNA, 407 bp, Gossypium hirsutum
cccacgcgtccgatagcattcatcatatcccccccccccccaaaaaaaaaaaaacccaacatcctttgaatactatcttcttctttcttgttttctgtttttgattcagtagtttttttattttttgttgctgtcaacacctgaataagctctcacaagtcaaaccagattttaaagaaatgtacccaagggtgaaagtcaaagaacaagaccaagatgatcaacaagttatcaaggattctgttttgtctttgaaggatgttctgtttctctctatgcttgattcttattttccagggaaaaaacatgaagatgatgtttctccgatgcccacagcaagaattccaaagtcttaccatgcaccagaagtagataaacattcagattctacatctgaagaagcagag

SEQ ID NO: 253778 - DNA, 352 bp, Gossypium hirsutum
atttgctgatatgtaggtaccgccacccatgcttgcaggaatgtacggttctggtggtcaggtgcgctttaataatgcaatgattactatgaagcatctgaattgtggtgtaatcaatgataaaagaccggatcatgttgttcatgtgggatataggaaaacatatactatcttgatttagatacacggtttaacttgtgaaaatatacagatagatagcattgatcaatacaacagataatacagattccatctgatgaaacggaaggtgctcaaattcatatttaccctctatgactaagaaagatggacacccattgggcactatgcgaagttgtgttaacaggaattc

SEQ ID NO: 253779 - DNA, 230 bp, Gossypium hirsutum
aagctgaccctgcggccggccgatcattcgacaacaccgacggattgctgactgttgatacttataggtcaattcacggcgctgtggttctttcattaactatgaacaaatcacatatttgatgacatctccatcttagacataaaatcgatctactgcgcctataaccatttgttttaacacctaaaatcctaataactatataggggactcactaggtcatatataag

SEQ ID NO: 253780 - DNA, 376 bp, Gossypium hirsutum
gtccatttacctacaatcacaaatgctacctttttgccaatcaaaaacttagccggcatttcacgtcattcaatttcaggctccaaagcaggaaaaattctacttctgatgctaaggagttcgacgaatcggcatttgaagctgagaggttgagactggacgcaaaggctcgagaatcaatggcccagatttccaaaacaatgacggaaacgactgcagaagccgaagctgatcccaaagcttggaaatgggtcattcgtaaaaggatttgggatttaatggaggcgcagaatattgcacagaacccaagacccgttcatcatcggatcccaaacttcgtcggtgcctcatctgctgccaaaaaaatgagtgagct

SEQ ID NO: 253781 - DNA, 392 bp, Gossypium hirsutum
gtcaaagttggctaaattcactttttgggctatgtgagtaccatagtaccactcatttgtttatctgctataatggctggaattacggtttcaagactgaggtcactttcaaattccttatattcatctttaaaactgtcatcactgccgttatacagatcgtacacgtcgcttacaagaatcgctgatcacagctatgttagagcatcttatgctcatttgaatagtttttatgacaaaagagaaactcagtctgcttcaatgtttatgaatactcctattaggggtggaagcatctgatcctttggctgatacctgtttccgcaaaaccaatcccgtgtctgtgttaccctcaacctcatcaacattgcgtttccggagtatttttcctt

SEQ ID NO: 253782 - DNA, 442 bp, Gossypium hirsutum
tgctttgccgtctctttctcctttctagttttccttctccttttcttctacattttcccagaaaaaaaaacccaataagactttgtagtgatggttgaattgatgcatgtaacagcagcagtggtaatcattgttattgttttgatccttttggtagtgtttatacttaagtggtgtcttcataaagagagtactgaaggtaaagacatggttgctgatcaccactatgttttccgacgtggggtgtcggcaaagccattgtttagttggtctgatcatccatctctcatcacagatgcagttgaaaatggatggtctagatttggtttcacaccctacaacatatcatcatcaacaaggtcatcaagcttgttgggattatgtgcagctgttgattttctaagagggaatgatgttgaattaagttgggaagtatgtcaag

SEQ ID NO: 253783 - DNA, 168 bp, Gossypium hirsutum
ttggaagtctggtgaaacacctaggtcgtatttagacaagccattggtcgtatgttgctcgctcaaaggttaacaaccctatatgttggttctacattgattgattatgggcatatcgagccatggattgattttcaaccttggaaattgaagctaatattgccaaag

SEQ ID NO: 253784 - DNA, 350 bp, Gossypium hirsutum
gaagaggccaaaatcatccacctaaaacacctgttcgagagaagcaacaaaatcacaaggtctctcctgttcatggggcagatgctgctgctgctgctgttggccatctcgaaaccgatactaaaatgatagatttaaatatgaagcctcatcgaatacatgggcaagcctcaaacaatcaggttagaactacttttaaactattttctatacctatataaacatgcttatctttttctttcactgcatttgaaacacatggtgtaattgttctttcaacatgtttaggggtaatatctgcaattatttattaaggagtgtgactaagaggctgtcttggttggaacttg

SEQ ID NO: 253785 - DNA, 412 bp, Gossypium hirsutum
aaacaaaacccttttggaacagtaatcatctgcaatggttatggtgcctggctcaagtccgcaaaccgatccaagtctctcaaaacaaaaccccaggaaatgttgtctcaattcgccctttcttttttcagtaaatcccctttaaattcctcaaaaccccatgaacccctcaaattccagctccccctttccaatctctatgtcaagaattcaatgaaggcccctgttacttcttcttcatcaaattttgggttcaaggaattgttggaaactttcacggtggaagttcagaaagctgagaacaaacccctaaatgttcctttggttgctcctttcaccatagccacttctaggcttgataaagtggaaaacgtggcaatcaggatcgagttgaaaaatggatgtgttggtt

SEQ ID NO: 253786 - DNA, 452 bp, Gossypium hirsutum
ttaaattcctacagataatcgattaactcaggcaaagtaggatttggctgtggattggcttgggcggcctcatcagtcagcagggtagaggacgccaaagcgcaaccatccccaaacccacctatttcctgaaaaaccctaaacgccttcacacatttccatggcgaaaccataatattattgagaaacaaagttagcccggattttgtttacgaaaaaaagtgaacccagataataaaaaaggagaaaagaatttgttttttagctttttttggttgtcgggtttttgggagatgtcggagatcgaggtggttgaagaagttttgccattgaagcaatccggtgacgttgtagcgaatggaaatggatacaggggagggaataatggggttaataggtttctcatgatgagaacttgaggaacgatgtctacaccgctgctacttatgggg

SEQ ID NO: 253787 - DNA, 447 bp, Gossypium hirsutum
  unsure (1)..(447): unsure at all n locations
caatgctcgaattaatccactaccagtagccccatgagcgactccaatatctcttcctcttcctcttcatcttcctccgattctgcttccatcgctaccgtcgatcagaatgtaaggaggaatgggagaatgatagatgatggcgacacgttttctccaaaggtgcgtcgttggcgtgatgttttctggttagcaatattcatgcttcatttaattgcgttgggatttgtgctcgtgcttcttggactcaataggtttaagaaatcagataggctaaacatcgatagatatacgaatcgagtttgggagcataataatggattgacggagaattattggcccaattatgctgttgccggtggggttggggccgcccttggatggatntgggtgtttttgcttgggtctcattctaacctaatgatgaanggttcagttcacattttg

SEQ ID NO: 253788 - DNA, 416 bp, Gossypium hirsutum
tgaacttgttttaagttttctgggggcattggtcaatatatttggggtaaatgcatgaaaccacgatatcaaagattggtttagctgcatatattttactttatcattcatcgatcatattagtcagcattatctgtgattattcctcataattggcctttcttcagaggaattaattactgatgtttgttaccaaaaatctttatctaatgatttttaaattgatactcacgataagcgattacaaattttttgataaagttaaacaagaataatcctattagtgtgaaaatttatgagtattctcctaatcaaattggtcaggggctcttaaaaaaaacatcggtgactattactaatttagtcatgaccagttataattagcttttttttttacctaaaagagaatgggttcc

SEQ ID NO: 253789 - DNA, 138 bp, Gossypium hirsutum
gtgatgataagctaaattggcgtccacgtttaacggatatcaagctggaccagactgcggattcttaggaaccgctgctgctgtataaggatcttgtaccaaagaagtttacggaacatgcataatcagggacatgat

SEQ ID NO: 253790 - DNA, 360 bp, Gossypium hirsutum
cttctttttgatgattggatttttgttgagggacatcggacatgttgtcgatgaacaacggagtgaccatctctagggattccacctacggaggcagtgtcgtcgatcgtactgatgttatttccgacgctccggcactggcttccggcaaagcttccatttatggggcgaaacatgagccggcttcatcccttggtattgtgcctcatagaggacctgattcacttgaagttgatgaagatatgcagttggctctagctcatcaattgtacaaatctggaaactacaaacaagcattggatcatagcaatgctgtttacgaccagaattcgcttcgtactgataatctacttcttttgg

SEQ ID NO: 253791 - DNA, 459 bp, Gossypium hirsutum
agcgaagctacggaccccaaaaacctcagaggtaaaatttattagcatcgtcgttcgtctccttccaaaccctagaatacgtgaggagtgagttgagtagaagaagagaaaaggaacttcgaatttttgtgctttgctttcccgtgatctgaaaaaagtaacacggcgaacttgcgatttcatttttgagctgatgatgatacatatttcatgaatcattaactcatggatcctgaaggcaagaaatttggaggaggaccgagggaacttagcggtgctgttgatcttataagtcactataagttattgcctcaccatgacttcttctgcaagagacctcttccagtatcaatctcagatacacattatcttcataatgtggtgggagatactgaaattagaaaaggagaagggatgcagctggaccaacttattcagaatacatgtcataacagagac

SEQ ID NO: 253792 - DNA, 360 bp, Gossypium hirsutum
gtttttcaatgcgagaatgatttcaaatgtgagggatgtaagtacgcagaaaatgtttctttcagtaataattttattcactcattttccactagcatcttcaattgcgatcagggattacatctaacaagacagcgagatcaatttaaatccctgtttgtaacagcatctttggtagcatctgccatgctcctctctgtgtagtttagtgcttaattgtctcccatttcagattcacactctttgtacgtaaactgtggtggcgatgatgtgtcaataaaatggcaaacttatataggagatagaacgtttggatctggtggtgctgcaacattatatcggaatggtgataactgggga

SEQ ID NO: 253793 - DNA, 386 bp, Gossypium hirsutum
ctggagctttttcttaattcttgaagtttgtagttttgccttccagttttgagtggatttgtttttttcttttatttctgttgaagttaagtcaaaaggttttatctttctgttttatatttgtactgagcaaaacaagtagtcaaattttgggtataggatgattggtaagagcaagagtgtttgctttggtagatgcttttggggtttttcaaaatttcatcctgatagaggtttctacttctgggatagtttatagggttttcctctctgattttggagttaaagttcccttctcttaatggactaagttatgctgtagaggaaaattgaataagggttggttcattgtggatttggttctttattttgatttgaaaatgatc

SEQ ID NO: 253794 - DNA, 311 bp, Gossypium hirsutum
cccacgcgtccgcctgcctgtttctcttttgaatttcagtgaaagaaaaaaaatggctcagttcaaagccatttcactctcttcgtccattaatcttgcaagttacggtcccaaaagaaatacattgttacattccgataatttgatctgttctaggaagttatccactttccatgagttaagtggaaaatctagttcgcttcatggtaatgctattgtaagcaacaatgtgtgtatgactctaacacctaagaatcaaggtattcaagctgttctttccagcaactcagggacggatgtttccacagtta

SEQ ID NO: 253795 - DNA, 352 bp, Gossypium hirsutum
  unsure (1)..(352): unsure at all n locations
aatttctcttggggcgttggtccatctcatagagggtggaggacaccagttcagtgagagttactgtnacatgttgtttaatagcataatatatgcatcatacacaacacaaccgcttgagctacttaatgcattgggactagagaatccaatgaacccctctattttaagagatttaaaggttcattacatatgtttatcaatttaattctacggataatgggaacatttcaccacttgcatccctttataacaacacaaagaatactaatgcatttgttttacaagatcacagtcaagatttttcattacaacctatttcatatggatctgaaggtgttcccttaccttc

SEQ ID NO: 253796 - DNA, 256 bp, Gossypium hirsutum
gtgaaccgcactggcacattaatttcacgagcctaataaactccggaggggcggtgccttatctctttcaaccttagcttataattggatatccggataatgattagatggcctttacgttcacatttgatcacgctgttatccaattcggaaatgcctgctgggagctttactggctttaacattgaatccaacctgatgcccaattccaatgacaagactgtcggaggaggtgatgatgcttttaacacctttt

SEQ ID NO: 253797 - DNA, 383 bp, Gossypium hirsutum
aaaggactctgtttcctttatcctttctttcccatcagctgccgcaagctttccatcctcacggtggtccgctccttcatctggcaaccttctcccgttggctcgtccatacccttggccactatctacctccacttttatgtcgatctttggtctacacttagtttacttgtctctttacctcttccttacgtcatcttcgatgcttgctcttgcgtctttgctgctttatactcccttcactggactctcttaggtatatatgatctttacttatctttgatacgctttcagtactaattttacttctttgtttacaagtttgcttcgaatttgagcaaatttaaggtatttatttctacgagcccctaactagttttctt

SEQ ID NO: 253798 - DNA, 376 bp, Gossypium hirsutum
taattttgctgcttccaactttcagttcacacgaaaaataaaatacatacactgaaaactaacggcaaagcttcttcttctcttcatcttcatatctgagaatggaaaacccaggatcaaatcagcttcctgaagtggactcattgccagatggttttgttgagagtccttcagagattttggctccaaaaaccccaatttctaaagaagaaaagcctttgctccctgattgtaaagaagatgatttagtctccagtgagtttggagcaaacaagggccaaaaacaaagaatgttccctgtgccattgtctgaggcagatggttttgagggctcagcagactatgtagaaggtaaagtagtctgtcccgagttgag

SEQ ID NO: 253799 - DNA, 468 bp, Gossypium hirsutum
ggtggagatgctgaaatcttaaagctgcaaatagctctggaggatgaggttcatcagaaaaagaagcttgaagaagaaataataatactaagaagtcagatgttacaactgacttttgaagccgaccagatgagaaggtgtcttgcaagaggtggatctggaaatgcttatcccggtttagattctccaatgtctcaagttagggactctttgagtggacataagacaccagtttctgcactatttgatcaagttggagtgcaaaagatattggatttgcttgagtcagaagatgctaatgtacgcattcatgctgtaaaagtagtggcaaacctagctgctgaagaagcaaaccaggaaaggattgttgaagctggtggtcttacttccttgctgatgcttctaagaagttatgaggatgaaactgttcgcagagtagcaaccggtgcaattgctaatcttgcaatg

SEQ ID NO: 253800 - DNA, 396 bp, Gossypium hirsutum
cggacgcgtgggtgatgatggaagcaatccatcattgaacagtactggttcacctgtgacatactgcaaagaaaccaatataatccgctttgctaacagttcagttgatgctaatagtcttagaaatatggtagtattggctattcacactggaagaatctactgcatcattgaagctgtgagtgataaaactgctgaaagttctttcgctgaaactgttgatacggtctcatcagagtttgctaccttctatgaatacttctacaaaaagtacaatattgtgctgaaacatccaagacagcctttgatgctgttaaagcagagccataacccgcacaacttgcttgtgaattttaatgatgaaggtgtatcagctaaagcatcacaagctggcgt

SEQ ID NO: 253801 - DNA, 313 bp, Gossypium hirsutum
ggccatcctatcaacccagaactattcttagggttggaacaaaccaaagcaagctctttgctatcaaagccggatcatgagaagttgcatcggaagcttatatttgattctgctaatgagattcttgttggaaagttagctcaagtcagagcttctccggagccttggttaaatcctggaaagctcacaacgaagaccctcaatgcacaaaagcttctaaaggaactatgcatggagatagagcaacttcaaccgaagaaatcagacaacaacatggaggaagaagatggtctgaaaaacatattgtgggaaa

SEQ ID NO: 253802 - DNA, 381 bp, Gossypium hirsutum
cccccccccctttttttttttttttttttttggtggggttttaaatctaacatgtttgggtttgttttttaactcatgacgttaagcaaagattacaactttctacagcagtccattggccatacttaaaaaacaaatttcagttaatttacccccagaattttctatctctaagacaacatcgaaaatcgaaacaattctgacttattacccatagtttgagccataaacagagccataccctcccgcatgtccgggattggatggtggcgaatcatataccgaactatgagctgcataaggattataagcttggtctgcaaccccacctgcttgtgcctgagctggagccggaacagcttcagccatgaaattctgtat

SEQ ID NO: 253803 - DNA, 376 bp, Gossypium hirsutum
aacagcttcaggaacgtctgctgctggctatccatgaagctagtgaagggtttggctttggatgaacagagtttgtattacgatgaagtcaatgtccctgcaatgccggcagtccatttaaagatctatattgaatataagctttttcattaaatttcggttggcgaagagaacgtagtaatgccgacaatgggatatggcatgctcaaaacgatgtacaaatggaggggaaggttggttgtgctgcctttataatttcaaaagtggagagcttatattctacacaaacactgaagaggataaaagatgatatttttttgaagtaaattgaataagggatctttatcctatggataatatattgatctaataatgg

SEQ ID NO: 253804 - DNA, 348 bp, Gossypium hirsutum
attttcagaaacagaagctaagaactctgaacacctgatcttcctttcccctttcccttctcccatccttgacacccagatcttctgcttgtcgtcagccaacaatgattctcaacactagacgtcagtgttcatcgttgattttcctcatcttcacctttcattttcaaaatggttactgcaccaccaatcggcatatatatttggagtcaccctctacatctgcatccatcttttccatttcactgaaaattaaaccctagaattttgatttgaatcgctccgagacagccaaggggcagattgatggtttacatcctgtgctgtgatggaggtagtcgggtcatg

SEQ ID NO: 253805 - DNA, 263 bp, Gossypium hirsutum
gatactcggctgactctgcttttctctgtacgggctgtctgccaattccactatcccctataccatgcttgacacccagatcaaatggagaagatgatggcgcaatgatccgtatactatagcacgaagttgtaaatcgtcccgttttacccccatcgccgtcacggccgccgtcaaccacaatcgccacttggtttcccggagtttcttctctatctcatcgcctatcgcccctaatccgtctataaacaccccttctggtg

SEQ ID NO: 253806 - DNA, 420 bp, Gossypium hirsutum
gttctacctattctgcttctccttctgaggcggctgccaaagttattctttccattgacccgcgtgtttccagtgatgataatgactcctcttctgctcagttcaccatggaattggttggcacagaaaccggggatgtaccgaagcgctattccatggatatgaccaaagactctgctccaatgtctgtgttgtctgagactctccaaagaaagcttgacggtgacggaaaaatactgaacaagtttgacatgagacctcatgatgaaaacatcgaaaactatgggaaactttgacgtgaaaagacaaatcagtctatgaacaaatccagacagatacaggtcatcgacaatgatcatgggactcacatgagggctatgcccagggttattaatggtgctgtattcaataatatattta

SEQ ID NO: 253807 - DNA, 383 bp, Gossypium hirsutum
gtgattttggagtatcaaacaccggtcaacagctcgaaaccggatgaatgtgatgttgcttggaggtttcggaataaaaaggaaagatcttggagaaagtacagagattttagaaggttcgagttcgggatcggagtgaattgtacttacagagtgatccatacaggccgttggcattcgggaatcaacgctcgacgaccttggattcggcctaacccaaagttcactcaaccgatacgtgatgaagagataaacgatacaatcccgactttaccggaaacgaactttaggaaaaggaagtatttgtattatgcaagaggaagagattattgtaagggaatgaaccattacttaatgagtttcttatgtggtttaagggaagc

SEQ ID NO: 253808 - DNA, 411 bp, Gossypium hirsutum
gaagagccctatcacaagcctctgaacaatcatggagatcattccatgactgattctgcgcaaagcttggagactcaaggtgaaattgctgatgaccccgatgaatactgcaaagaggtccaatgtattgacacggaaggatcaggcagggataataataattctgaatctcttgccgtaccaaatggtgaaagtgaaggacgattggcattgacattaaatggagttggagatgtggctggccaggaaacaatgtctaccccaatgaatggagatagagaagcaaatcgtattcaaaatagcctgaagttgagtaggagctggagttgtagagatgatgtcacgggtggtacatcttctccatatatggacggagaacataatgaaagcaccccgcctaatgggttagag

SEQ ID NO: 253809 - DNA, 411 bp, Gossypium hirsutum
gataaatcgttcctctattggccctttgccttcttgttactctccatccttgaaaacacttatcaagggcatgctaagaaagaatccagagcaccgaccaagtgcatcagagcttttgaagcacccttatctgcagccgtatgttgatcagtatcgttcatccttcagctacccttcaacaaattgctccttggataagcatatttccactggtcgtgaatctcgtgataataggaaaaatatggccgagagtcacagcagtaatagctcatgcagtgataaagatagtttactttcaagtgacagaaacactgccacaatggtttcaaatagcaatagtaaggccactgacagagattcaatttctaatgatgaggaaggaagcactgagcagcacctgccaagtaaaag

SEQ ID NO: 253810 - DNA, 380 bp, Gossypium hirsutum
ctcgaagctcgttagggttttcgccgatctatcgcggaattactcggatctcattaacaaaccatcttatcgggctctgtttgaaactgattcactgtccatcgatgagtcggtgctccggcaattcgagaaagaagtgaaagagcgaatcaaggctacgcgccaaatgatttcggaagccaaggaatcttttgataaccaactcaagatccagaaattgaaagatacgatcttcgctgtcaacgagcagctgacaaaagcgaaaaagcaaggtgcgttttccagcctcatcgcggccaaatcaatccctaagagcttacattgtttggcaatgaggttgatggaggaacgtatcgcacatccagagaagtataccgatg

SEQ ID NO: 253811 - DNA, 374 bp, Gossypium hirsutum
cggacgcgtgggttgaatttgaaaagaaaagagggagaaaaagaagaagaagagagtttgataatctgattgtttcagagcaaaaataaagaaggttgtatacaatatataatataaccttccgggctcttttttcctttttctgtttggatagaaggaaagtaagatgatggtatacaaaaagagagaggcggttgaagaagtggcaatatatggaggattgataggggtgcaatttgtttatgcaggcaactcaattttacttggttatcttatgtcccttggccttagccttttcaccattgttattttcttcacttttgccaccttcattattgtctctccttttgctctttatttcgagaggagcaatt

SEQ ID NO: 253812 - DNA, 279 bp, Gossypium hirsutum
aaaaagctttatgctaaagcgatgaccgcatcttaggggcctaaatggatcttctcaaagaagagcttctcaagaagcggcatagcttatctcaggaaaccggcggcaggcgcgtatttaaacgctcctagattgaacaaaatcaaattctgaagcttacccagcactatattacctttttttaatctgtattttgtttttaatctacctcttttttttattcattcgttctataattccgtgtaaatagtaccttacctattttttttatttctaatt

SEQ ID NO: 253813 - DNA, 193 bp, Gossypium hirsutum
gtgagcatatagagttacatgttatagttacagcttgtgtgagcatttcccaagcatctgatgttatttcattaggttcaacaggtggtaaaggtttaaaaaaatatgtacatatatgaaatgttatatggtcaagatatgtgaattggaagatgttgataaaaatacttgaaataataaactatgtttatcg

SEQ ID NO: 253814 - DNA, 380 bp, Gossypium hirsutum
gcgagaaatttttggggcctcttgggcacatgtgggggggaaaatatatgctggaatcggtctttttatcaccaactataaaatttcggtattttcagggataaaaaaatcaaaacccccaggtgaagaaagtgaaaaccagcagcggcaaaggcaataaaatgtgaagccaaagagagagagatatatacataataaaaaagacttttcaaaaaaacacaactatggctcctcatacagaaggatcagatgcttcagtggaagccatggttgctcaagtcgaaaaacacccaatttcatcgaaccttatcatcattgctatgcaaacagaacctttgcccgtggtgaataaattccaattgatttaaaaccctcattct

SEQ ID NO: 253815 - DNA, 147 bp, Gossypium hirsutum
acaatatacctgctcctgcaggtcattgcaggtgcttaacattcgctctgtctagctctatgcattataacaccatgtggactcgatattacatagcgggaacctcctatgtgcttattgtatagttatctactcacacacaccctt

SEQ ID NO: 253816 - DNA, 426 bp, Gossypium hirsutum
tctatctgtcatttttccccccttcttcgtgtcgtcttttgaccttagattcttttttattcaaattgatgggattttttttgtttctaggattcgatttgggggattgagttttcgatattgatatgacatttttcttttccttttcggcaatttgtcattgtatgcgagtgattcaaccgttgggtctttgttgagctgaaatgaacaataaagttatacaagttacagaacaaacaagtttgacacaagttacagtgtgtgatgatgggaggaggaatttctattttcatatttgaatttgttttgggtttttggtaaagccaaaatttgagtgagataggtgggaaaaagaaagaaacggaaaatttgaccacagaatcgaacactgggtttcatcatgtggatgatttaacttctattatg

SEQ ID NO: 253817 - DNA, 422 bp, Gossypium hirsutum
atggaccctttggtattgaacaaggaactagtttctcaatgaacaaaggcaagatcgttggattccgtggcaggagtggttggtatttggatgcaattggagtgtattcaaagccagtactaaaactaaacccttcaaagcctattgttaatgcccaaagtttagctgctactgggcctgaaaaaagtggctattcagtgatccagggaagtgttggagaaagctacgacattgttctagctgtgaggcagagggatggatttgtgaatccccagccaagggaactcataaggcaaaattctagctctagtagctctgacgattcgagtgatgtagaagccaaaagcagggttccatttcggactcctatgaaagtccctccaaagttaccggaaggagtgttaacttatggaccctggggt

SEQ ID NO: 253818 - DNA, 360 bp, Gossypium hirsutum
cttttctcccccaaaaactgttcttccctctgattttttgcctgaaatatcaagttctttgcttttgtttcttttcctctggttctttgttcctcttccgccggtgattcgcaagctcgattgttcaccctctctctattgaatttgcttctgggttccgaaccccaacgcatggattttgttaaaactgctttgtttaagaggcacagtaattacagcatttcagttgatgaaattggtatgaaattggatttcgtttgggcaccttatgtattgaatttaacccatttgttgacggatttcaagactaaaaagaaataccctaatgttatggtaatgggggctggtctatggcatatg

SEQ ID NO: 253819 - DNA, 432 bp, Gossypium hirsutum
gattgttttgagggtcaaacaaggagacaacccaacatttggcttcttaatgcctgatcatcgactgcatccctactttaggtttcttgttgatcaccaagaacttttaagcagcaattccattgatgaagagagcaaagccgacagttctcttgatcaggcaagtagtggtagagggggtggcgctttatctttgcttggcactgtctatggttccggagaagacgaggatggtgaaacggagaatgctaccaaagctaagagaatggaatctggggaatctggggttgctatcaataaaaagtcaactgacggatcagatcagaaagaatcttctttaagtgttagtagaaaagatgatactgtaactaaacatttggcccctttgaaggaaaaggcttctctaataaaacgaaatcaatctataacatc

SEQ ID NO: 253820 - DNA, 352 bp, Gossypium hirsutum
gatggcggagaagtgagagattaaaagagtttatagaagcatctcctccgagtggaagtgatttataagttggcaactcccgaggtgtctctttcacaaaacaggtgaaaaaaaagcaaagaaacagaatactactgttactgttagtattaaagaaagaaagaagcttttaaagtccagagatagaaatcaagtccaaggagaacaacgcactacagacaaattccaattatattattaataatcaaatacctataatatttatatataggaaaaccccacccttactcaataaagcttcagactgggttttctatgtgaagtttaagatttttttttctttgtgatggat

SEQ ID NO: 253821 - DNA, 305 bp, Gossypium hirsutum
gagcaacgagcttggagttatcgagggaaagaggctaaccgtcgaggataccgaaccggagaagacagaggcggaagcactgaggaaagctttattcatcactcgacaaatgtagtgcgctgagcagagtactaccgggagtgtctagcatgactacaccggttgataatagagtgtctttcacgagatcaccgtcagtcacatcttttactttcgacaatacctcatatatatcggttgaaccacctggtgattctagccatactacagggaatttagcttcatcaatgttgattaaatgctat

SEQ ID NO: 253822 - DNA, 183 bp, Gossypium hirsutum
aaagtgcggagcatcctggaagggttatgtgagagtgcaaagagtacatactggaagactgaagatgaatgtggagcaatggctggtttaggaggtgacactgacgcccatccctatgtctccttcacgatcaatattgcttgaaactgttgttgatttcttcaagcatatccatcaagacat

SEQ ID NO: 253823 - DNA, 419 bp, Gossypium hirsutum
tcatgcttaaaaccctatatgaaatttaaaatgttatagcaatttctctcattttcattgtcacaggaactatcaaatcgcaaaaattcctttttaacttggactctgtgtatttttgtcttgaggaggtcctcattgagttccattgtcatcgcctaaattttctgtattttattttaatacctaaatttttccgtcgtttaattcaccgtctccactctccaacgccaaaccctagttttaattgacttgtatatacatctctgaatgcatttctttgtctatcggtagtttttggtatcaaaagaatatttcttcaatcattttgtttaaatcttctctttccctttccccccctcctggtgtggtcctcgaggggtcaagttttgaaaatggatatcgagcaaaatcaagctgag

SEQ ID NO: 253824 - DNA, 430 bp, Gossypium hirsutum
atggggagcactgcacttgaggagtcctccgtcctttgctacagtactaaaacatctacagattatcgggaaaaatggtggtgaagacactcttgctcactggcctactgcatcaggcatgatgaccatagatgatgctacttatgaagttttgaaatatttggataaaatatggggctccctctcttcttcagatatagcaaagctgcaaggagtggcatttctgcctgctgcaaatggaacacgcctggtgccagctaactctctttttgcacgtttgaccattaatttggctccattttcttttgagcttccttctctctatcttcctttcatgaagattcttaaggatttgggacttcaggacatgctatcagttgcttctgcaaaagagcttctgttaaatctacagaaagcatgtggatatcag

SEQ ID NO: 253825 - DNA, 350 bp, Gossypium hirsutum
gctataagtagggcggcattccaagcacctcatttgcaagaggtctttactcttcagctgtttttcagtccccaatagaaaagcttaaaacagaactcagcatttgtttgtctgctatttctctccatattgctagcatttgttttagctgagaggcaaaacttcggaacagcaaaagaatacagtttgtttctaaaaaattcccaaggacagagaaagcagagtagctgtgttagggaaagaaaagatggttgcacctctgtcagcttggtcctgggagaacttcggagttttcaagtatctgctatacggtcctttagctgcaaaagtattgtattcatggatctatg

SEQ ID NO: 253826 - DNA, 411 bp, Gossypium hirsutum
  unsure (1)..(411): unsure at all n locations
gttttagttccttcattttcattatcattatcatcccgatattcattcatatctctatttttctttttctccctttctatcttcttcatctctaagaagggggaaaaaccgtagaaagaaaaaaaaaaagaaaagaaacctaaaagcccatgattgttgatttgatggatctgtagatctaacgctttgagggaaaaaaaaaaaaccaacacgtatccgctccgtttcttttgatctccgttgttttcacctgctatgattcagtagctgaaaaccaaacagcttaatttctactgagaccgctctgattatttattggtttaagtatcttttggtcggtattttgcatccaatttggatgtttatggggaattggaggctggctcangtgagatgagggatgttatcaag

SEQ ID NO: 253827 - DNA, 146 bp, Gossypium hirsutum
atcgcagctaatatacagaggccatgatactgggcttgctggagattcatggctaatcctgtgatcacatccgtgcacagtcttcgtgagcgtttagatgacaccctccttgcccacaggaacgtgattttgggcttgctctcaat

SEQ ID NO: 253828 - DNA, 420 bp, Gossypium hirsutum
ccagtattagtctctgtgtatatatatctcacctcccatcccatctttgtctgctaaatttggctctcttactgaaatcaaataaaatgatgccccctcagcaagactagcaatatcaccacccataatactcctgcccccatcatgctcacaaccagccggatgacggagaatttcatttctgttcacgctcagccatcggcttcttcatccaccaacgtcgtcccatgttctccgcagcatcccatcccatcccaacaggacacgctaactccacttccattttcagtttcgtgtcaatctttacgtcctgtaactctcaagtttgaagaagtggcatacaccatccattccagtgtcacaagcgcaagttgtttctcctcgcataaaccccaacagagaacaaatgtactgaacggg

SEQ ID NO: 253829 - DNA, 431 bp, Gossypium hirsutum
  unsure (1)..(431): unsure at all n locations
ctgagaactggtataatcttttgttacagtatagccactattctcttattttttaatgaagttgtaataaaagtttaaggttgttgaaaatcatttgacatatgaaaatcattatcttagagtaccgtactggtttgaagcatgaaagttttggtcaattcttttgatggaacttcaatttccattttattatctttctcttgaaagttgtgtgtctgagcaaaaaattctttgggccgttgagaaggtttggctttattggttctcacttttctcatggattgagctgtctttgacttactaatctgttcttgttggatcacaagctttatggaaaatagcacaaatatgttattntctgggcaagaaatagcgcaaatgatacttgcctgatgtctggtgacttttttgttagctggttgctcgaaaca

SEQ ID NO: 253830 - DNA, 162 bp, Gossypium hirsutum
ttttgactctgctaactgctgattgagtgccggccgtttcttaaacagatctttttaatcgctctttaatcttaaatttctttggctctcccattcgattttgaaagggcggaatcaaagtctttgaggaaacctgtttttaccaaggtggaccaactccgc

SEQ ID NO: 253831 - DNA, 339 bp, Gossypium hirsutum
ggttgctcatctttcaatgacaaagttttcaagtatgaatttagtccagtatagtgcaaaagaggctttaagccatgattttgctaatactggatcaccattgtacactagaataaataagaggctatggagtgctgtgaggtctatggagtccttgctaccacatgcaaaccccagaagcagctatgctgttacagatgaaaacactaatggtttcatctatgcaaaaatatttggtggattcgagaagataagatcttcgatctgtgatcttgtcaccatatccaggcttctaaatgctactcttgtaattccagagatacaacaaagtacccgctc

SEQ ID NO: 253832 - DNA, 394 bp, Gossypium hirsutum
cggacgcgtgggatttaattttctgcgtaaaaattaaaagaaaatatagggaaaaagaacaggagaaaccctaaccatgcgattagggtttgggattgaaattgaagcgaagcgaagggattgttgaaattcggattattggaaattggggaattcgacagaaatgggaagcgaagacgctgacagtgataagagtaagcaatggtcgtctccaaacagggcttataaagggaaggaggaagaccccaaactttggggacttttcctctttggtttaattggcgccactgccaccactttcgctgttagtcaactgaagaaatcttgtgattggatgtttgctcagttagccaggtctcaattatctcaaaggggaggttcttttcgaacattc

SEQ ID NO: 253833 - DNA, 336 bp, Gossypium hirsutum
gttaagcaggaacaacaacctccagcagaggagaaaacaaaagacaaggtggaggagaagcctgccgaagaaaataaagaagaaacggccccaccggcaccggctacaccaacctcttttgtattggttggggacttgcattgggttggatgtgcaaagaaaatcgaaaaaaccatcatgaagatcagaggtgtggaaggagttgtgatcgacatgctcaaaccaagtactataaaggatatcgacccagctttgtctaaatatgaaaaccaaagactagtctttcttgctgactagtgactatctgagtgtctacagtaggatacaccggactac

SEQ ID NO: 253834 - DNA, 386 bp, Gossypium hirsutum
gttttaccagctctagcctccatgtgactgcgctcacagggaaaaaaaaaccctcttatttggctctgtcaaaattaagaatcctcaataaatctcaaagaaaaaatggaagacagcgcagagttggagtcgatcctgccctatctaccgttagtaattggatcttcgaggcgactgttatggccatcgaaagtggttgaggctctggaggcgatgtccagaggtcctgatcacagcctagtcaactgtggcgaagtcctctccatcgccatttccgacatgagagcttctctttccctcgctgaccctctcgctctctctgcccccctaggctatgccctcttctttgatgagctcatgtcccggggccgactccagaaaaatgg

SEQ ID NO: 253835 - DNA, 398 bp, Gossypium hirsutum
tgaaataaacatacaaacaagcagtctcaatttttgttgaagtcctgataaaatttattattaatttatagtttaatctctcctcgtccagaaaagaagacccagaaggtttctcttcttttctcattgtcggttccttcgaaatccctggcgaagtttatctcaactcggtagagcaaaatgatgaggctgcgaacatatgctggtctcagtttagtcacgacactagcagttatatatcatgcattcaacagcagaggccagttttatcctgctatggtttatttatcaacctctaagatcagcttagtgttgcttctcaacatgggccttgtagttatgtgtatcttatggcaattaaccaaacggctattccttgggtctcttcgaaaagctga

SEQ ID NO: 253836 - DNA, 231 bp, Gossypium hirsutum
  unsure (1)..(231): unsure at all n locations
aacaaacttacnaaatcgcgtggggttttatgggtttttggttttggcttacaagacggtataatggagaaatggagtcgacggaatcatcttacgtgtcatcaccggaggctgcgagaaatagatctcctccggcgtctaaatagccgacttctggaaatgtggagaagcctatgtatataatggttcttgtctccaatgctgcggctggttctgtaattggatagggtg

SEQ ID NO: 253837 - DNA, 204 bp, Gossypium hirsutum
gtccacgccgcattctaaaagagacctgctcgaataatatacatagtgcgaacaaggcggaaagaagcatttacattatctaaacgcggatctaaacagaaagagcaaagaccatggtacattatcactctgtaagagagaaggtaccatttctaagaaggaaataccctgcaactcaactcatattacgcatcccccatccta

SEQ ID NO: 253838 - DNA, 335 bp, Gossypium hirsutum
cccacgcgtccggaaaaagtgaacaagataaaataaacaaattccctcacttttcacactcacagttcctactttccaatttccttaataatacaaacaaaaacataccaaactattttcctctgaatttctcatctttccctgcaccgatctgcctttacttagtttctacatttccttctctcttttatttttttctcgggttttcttggtagttcactgaggtccttttaatagtcattcgtttttttttgtgtgtgtgtggggaaagaattggtacgcatttgagaagaagctgaaatggaaactgggtcgaactcagattcactagcaaa

SEQ ID NO: 253839 - DNA, 392 bp, Gossypium hirsutum
cggacgcgtggggttttactcattaacaccacgacagactagctcagtcagcttgctcatgatatgctcgatggttgctcgatatgctcccccaatttcgtacaactttctcaatctcattagccttggtggtaaaaagaccatatttgaaaagcgtatggggaacattgatgatgctgtacctttctttggagaaggattcaacaacatctatccacttatcatggttgtttacaccttgttagttgctagcaatttctttgatcgtgtagttggtttctttgggaactggaagagacttagatttcaaactgaggctgatgatatggatggatttgatccctcaggactaattatcctgcaaaaaagaacgatcttggcttgaacaagga

SEQ ID NO: 253840 - DNA, 444 bp, Gossypium hirsutum
gcgggcctacgcattcagtttctcgcccactaaatcgagaatggaattaccggaagagtgctgggaatgaatattcagtttcttagaacgccatcgctacttggagcctctttctttagtcctgccaagattcttttccatcaccaatcatctacgtagcagactcaccatcaccgaccctacccttgaatccctacctcatctccttctacggtttaccaatctgaccaccatggcttttcgtgatttccacggcaatctcgattccgggctttccctcatttgtcagcctgggctggccttgacctccctcgacgtgttctgacacaagtgtttccctttactgggtttgaaatgcttggcttccaaaattaggattgtgacggaattgaattgctccaacattgggtctttgaaagactctgatttgattgagatcgggaa

SEQ ID NO: 253841 - DNA, 191 bp, Gossypium hirsutum
  unsure (1)..(191): unsure at all n locations
aaacactcctcttaaattcaacattntgatttcatcgcccactgtcgatttctaaaaccctaaaccctaattagtttaaaatctccatcaatcaaaaaaaaaaaaaagccaaatcaaaaactctaaataaaatgtcttccattgttcttagatcgcgaacaatttcaaataatttcagttcaaagagtatt

SEQ ID NO: 253842 - DNA, 442 bp, Gossypium hirsutum
caacgacatcgtttcggagcagtagatccgaaatggaagcctcacagtcgcaggcatcagcgaacgcagccctgaaccctcaccctaaccctaacagcaattacacaaacaatagcaattctatactgtcatcgacgccggtgtggcccacaatcgacggtccgttgggcctgtcggaggaagaatcgttagcctacgctcggaggttctacaagttcggctacgcgcttctgccttttctttgggccatcaattgcttctacttctggcctgttctccgtcactctcgctccttccctcgccttcgcccctatgttgtgttatcagcaattgggttttcagtgttttcagttattttgtcttcatgggcattgacatttgccataggagggagaacatctcttggttctaccctggatcaactggtaatataaaacgttgc

SEQ ID NO: 253843 - DNA, 194 bp, Gossypium hirsutum
gaacaatctgatccctttttttacatgtatatgattatcccaagggatgacatatgtcggcgctactgcgattctactgttagcttcgatagaccaaaattgtcataatccgttaaacatgtacaccggagacatactgccggtaccttaatacgctaacaacttcttgcatctgggcaacaattatcattttt

SEQ ID NO: 253844 - DNA, 201 bp, Gossypium hirsutum
  unsure (1)..(201): unsure at all n locations
ttttagtattttaagttgtaaaaattcaatctttgaattcagtttggtgtggtctgtagttgttggtattgttatcgaggagctatcattgaaacctctcactcttcgtaaatttgaaggctccccaatttaattnttatattatttattctgggaaatttgtttggtgggacaaaatttcgggttgtagaaccatttttt

SEQ ID NO: 253845 - DNA, 454 bp, Gossypium hirsutum
ttccacttgaagcttttgtggcagcaggttagctgtgtgttgcagctcttcaccaaactccaaaagtcttacatctaaacaaacaattcaaacacaacaacaacagtcagactgttagggttgtatgccctgaatttctctctttatttaactgttatgtcctgtttcagttattctgcatgttgattcaaatttatagaatcttttccgagaaaaagtgaaaaacagctatactctcatctatcatatattatttgtgaacttcttttaatttcactttctcatgctttgagtttgtgtttactgcaggccaagaggcggagggggagaactcctactccaggaagatatttggggttgagaacttctcgtgctcgtcatcgatctcgaagcaactcaccttgtcgatcttcaaggtattcctcttattcaagaagtcagagtcggtcttctc

SEQ ID NO: 253846 - DNA, 476 bp, Gossypium hirsutum
tttgaagtacctaagccttagggactgaaaatgaaaggtaagaagaaatatttaaaatatatgtttggtagtaaggacacatagaagaacaaaactgggtgagtgttaatgccaattgcatgagattctaaaacgtgaaaacttcaataaatccaaatctcaggtcaagtctgcatcacagaaacgtagttgttgagagtagattaagttattgaaaatatcgttaaaatattcaatatttatttaggcagcctccgtagttgaaatttcagtattttattattcgtattgtttgcttaattggctgtgctctcgcttgttcagaatcaatcctgctatttttatactagtagttcgaatttgcgggtgccgagacatacaatcaatttactacctctatcatcgcaaattctgaaagataagggatccgatctgatctgctgcaaatgggggagaatgggcgttgataaaacggg

SEQ ID NO: 253847 - DNA, 223 bp, Gossypium hirsutum
ctcggaccaatgagtccgacaagtgtgggagggagcgctctaataagcgggaaaggctcattgaagctgattggcggcatccctcgggggtgcaccgacgaccgaccttgattttcagagaagggttcgagtgagagcatgcctgtaagaacccgtaagatggggaactatgcctaatcggggcttactcagaggaaactcttgtggaggcccgcagcgatac

SEQ ID NO: 253848 - DNA, 452 bp, Gossypium hirsutum
  unsure (1)..(452): unsure at all n locations
cggacgcgtgggcttttaaattccgaatcatgctttaattccataaaggtaaagaaaaaaaattgaaaaaagaaaagattaccccttccttaaggaaataaaatcaaagaaaaaaaaaccaccttttttctgtactaaacagttaatgtccatagtcaaataatagtaatttgttctgttatttcctatgaaagagcaatgggaaatatttctaggttttgtcttttataggtatatatgtgtgtttctttctttttatggtgcaggatcttcaaactctgagagaagaaattcaatccaaaaaaagaaaaagaaccccataagatgaggattaatgggagttgggagttgattttttattgattntttcaagtgatattgttatatagtaaaaaaagatgaattcaaaaaatcaagtggagtcaactctcaaggaaatactcgaagtggtc

SEQ ID NO: 253849 - DNA, 439 bp, Gossypium hirsutum
aaaaaatcatattcccaaataatttaatttaatttgattttttttaagatccttactgttggagtaccctaaaggctttaatctacactgtttaattaattatctttcaaatcctttcaattttcctttacttaaattctcttaattcacggattcatgaagttttgatttgtcgcacgctttacgagagtatgatggattctgaagatgtcttgcctgttgaggggcttgaggttgcccttcaaaatggtgttaattaggaaacttcaggtgtctgaggacgacgatggttttcagatatgtgactgggatgtgagataactttgagacttgttgcagatgaaatggtgatatggatactaagaagatgagaagatgattgcttctgatacattgattatgatctaaggaaggagtaagatatgtaacatcaatctaa

SEQ ID NO: 253850 - DNA, 343 bp, Gossypium hirsutum
aagaaataacatgaacgacacgggaataaacgtgtgcctagggttttcaaaatgtgttgttttcttcagaaaaaatatgatatggtatcattacatttgcacctttaaaatcaattaactttcgtgttgcatttgggattatacgtgaaaaagaagaaaaatcaactccgaggctaccttgaccataggtcaaatcgtgaattttcattaagatatctcaaaaaatggagaaggaagtcggcaacgggtgttcttctcttgcttacaagcttttattctcatgccctttcggtctgtctcagccacagctgtccgcagttttcgatgaatcatacgatagaat

SEQ ID NO: 253851 - DNA, 186 bp, Gossypium hirsutum
ctactcaacaccagagcctttttctttctgaggggagagagatatcagggaaggtgatggctttcaaaaagcgtcaatttactatcgttgaaaggcttacctctctttacactattgtccgaccatttgtaaccggtgaaaagcacccaagccacttccttgtgattcatggcttacccagtgaca

SEQ ID NO: 253852 - DNA, 229 bp, Gossypium hirsutum
atcgaatcatttacttgccatgccttcttatgaggagcattcattgaaagaagttgttgctttctgcatattcctttcgcctccgcacatttcaccatgttccttgacacctatatgtattagatcgaaatcccatttccctttacttgcagttcttctcttgaccttcatacttgttccattcttttcaattaattcaacattccacaaaatccataaaagcccgaat

SEQ ID NO: 253853 - DNA, 416 bp, Gossypium hirsutum
gctaaaacactgtaaaaggagggggggcaaaagttggcgccaaaattttgcttcttaaggtgctttttaccgctatcgcaacgtcttctctctctccctcccacgttctgaaaatgcagcgccaaaaatcgatactctcgttatggcaaaaaccttcgccggcgagccaaaacggcgctgtcggtgaggtaaaaggtcaaggagcttctctgtttccttctaaacagaacctgaatggcgacgtttgtggctcctctttagaagtcacaggcactgatactccaccggagaaggtgcctcgtaaggttttaccggtaaacttcgcatcgaatgccgaggctaggggttcctcttctctggtttctagtatcatgcacaagtttgtgaaggctgacgacagagaaaatggaagtcag

SEQ ID NO: 253854 - DNA, 464 bp, Gossypium hirsutum
tatactttagctcgagttggaagggccagagatatcatcacactatctagtcattatgtgagttgagaagattgtatatcatcatggtttaaggcatgtataggatagactataggtagaatgatatttcgactttgtatacattacagccatgcgaagatggcttgctcattttgtttagagaagccttataattgaactaatgtggtgaaatgttttagttataacttgatagtagttaatttgttattagatattcggttatgttttgatagtgagtcattttagaaatttataagagctcttatggaaaatcaatgatacatgtttgcattgttgataatttatgtctggtaagtatctttgaccttatataagttttttcagtcaagtaataccttataaccttattccggcaacggatacaagttaagagtgttacagaaaaataaaattatatttgc

SEQ ID NO: 253855 - DNA, 357 bp, Gossypium hirsutum
aaacattcctatctaattctctcccaaacaatggtgaatttttttttatagatgatctgtttgcctttaaagaaaacgaagcaaaacccacatatgtttttcatgaaattcgattcacttttaatatataagtcttgcccatatatatatacatatatatatattggcttgaatttttttcaattttgattgccctttgatattctaacaaaggtcgaacatggggaatttcaatgccaccgacttgaacgagcgacggaggaactccatccggcagatctacactacgcaagctcaacacccaccacattcctctcgttaaccgcaaacggggttcaacgccgacccttactccta

SEQ ID NO: 253856 - DNA, 387 bp, Gossypium hirsutum
cggacgcgtggggattgatttgcgtttgtccttgaaggaagagacactaaaagcgaaaagagagaagaggagaaaatcagccgccgccgccgccattgccattgccttcgccgacgccgacgcccattttccattagcatcggcagctgtgatttactgtctatatataatataaccataatctatgccagtcccagccttcgggtattcttttatttccttatgaacgccttggacaagccgtgttgctcctcttcctcctcctcttccaatctcagccgcttcattgccggcctcttaatctcccttctcttccattcattccagctgatttctaatttcctcactcctatacacccgtaattcttcgtttctaatccatggatc

SEQ ID NO: 253857 - DNA, 396 bp, Gossypium hirsutum
  unsure (1)..(396): unsure at all n locations
cccacgcgtccggaagaaataccgataggaaagctaaataaggtcactcgaaaaccgaggggaaaaaagagaaaacgacgagagattaccaataaaacgataaaggtacttaaggacgatattgcctggcccatgatggaaaacgagaagaaatatgtcaaggagcgacaacagcaactgaagggcggaaatggagtaacaaaatctgttggtgaacaagatcaaccacaacgaggtaagatggttagtgaacaaggctcacaggacccaaaaattgacatcagaaccaaaacgctggtaaatcctttcgatggagatgtaaataacttgaagattntcacctccgagcgttctgctcgtctattagaaaagaaaaagaaaaaaggtttaaagcac

SEQ ID NO: 253858 - DNA, 317 bp, Gossypium hirsutum
gaaaaaagcacagaagataaaaatgggggagaatacaaataaatagaagaaaacaaaatgtataataacatatgaaaaaataatagaaaacgtctcaaaataaaaactaaaaaaatatgacgaaagggacaaaacatgttaaaaaaaagtcaatcaatagaataataaaaagtgctaaaaacgaatgaaagcaacaagaaggagaatgatatatcgaatacatgcctacacgtgaggagcttatgaaaacaaaacgaaatgctgtgaggaaaaattgcaaacagataatgccataaaaaaaaaaaattaaacgaaaa

SEQ ID NO: 253859 - DNA, 468 bp, Gossypium hirsutum
gttttaaggagggattggtccagatattaaaatccgaattatctcaaaaggaggctgatgcaagtagatttcatgaagtttctaaaatgtcgaggcaggtagagttcttaaggaagcctagaagttcatctcatacgcctgtaataaaacattgtacagctagggaaggaactgttttgggagacgagaatggcggcggcaacaaatgcagcgtaaacatgaagaaaggaagctccgctccacatgttcatgattctctgaaggacaatggaaggggaagcagaagttcgaagaggaaaaaggatgatgaaattcgtatttctgaaactccaaatctattcacttctacgtttaaagttcccagattgagagactcctctcccaagtcaagatgatctttcttctaaatctactcatccatttgtatcttttaccaatgattgaaatagtgtctgtgatcgtgaattt

SEQ ID NO: 253860 - DNA, 451 bp, Gossypium hirsutum
  unsure (1)..(451): unsure at all n locations
atcaaaatccccttctcataaattttctctcttgaagatttcatgcctacccacctttaatctcaaccaacggaagagacgcggtgtgcaatttgactgttccaatttccttttcaacattcaattaaaaccctagcctcttccttttgcttctatcgggagggggggagggaatcatgtctttcgatctcatatgctgaagccgtcctgcagctgcttcggattcttccaagatctgtacggctgaggaccaaaagaagaaagatgatgaggatctggtgagtggctgttcgggatttcgccctcgctgattctctacaccgcanatctatgctattcacgtctttgctctcctttccctcgcttgacattagcattntgtattgaatcaaaatgcatggttaggatttgacattttgccgactactgcatcaaattacttcagtcttga

SEQ ID NO: 253861 - DNA, 226 bp, Gossypium hirsutum
ctgagaaagagatgggcaggacgaaaggagtggcggagttcgaagaaacggcgccggttgacttggacccggacgatccctacaaagaccctgtggccatgcttgagatgagggagcatataggtcgagagatatggattgacattgtgaaagccaagatcctgcgtgacatggtcaggtggtgctaccgcatctattgggtcaaccatgtgcagaagtgccggca

SEQ ID NO: 253862 - DNA, 319 bp, Gossypium hirsutum
cccacgcgtccgcagcatgaaagtgtattggttatattaagagcaaatcttggatgagtatccaaaagttcagtcattatcagcatttacaatcatagtggcatattggaatgcaagctaccactgtaagtctgctcttaaactttcataactgattcttatgaatttctatatttctatctctatcttgtccagcccccttatgttttatgtagcaggaactcaagttgatatcttaactttgatttgttttctctttgaattagtgggaagggaaatttttcttatcaattggtcttttaagatctttcctttcttt

SEQ ID NO: 253863 - DNA, 365 bp, Gossypium hirsutum
  unsure (1)..(365): unsure at all n locations
gctagatgatgcaattctggcatttgtgtacacaaacggataccgattccaaccatccaaatggagaaagactgatgaaatcccttttgatttcatgagaagaagagtatcggttattctggaaacagaatctaatccagaaggcagaaatatccaacccttttacagattcataataaccaaaggagcacttgaagatgtgctcaaagtttgttcttatgtggagaatgtagatatgggtgagataacagctgtctctgcagaacaccattcataggatcctaaatgtggtggaagaaactanaaatgagggattaaggattataggagttgcaataaagaacctgcagcaaacaaaattaagt

SEQ ID NO: 253864 - DNA, 418 bp, Gossypium hirsutum
gggaaaaagaagcgaaaagaaaggccaaaaaaaaaacaggctgacaatcacagatctaagatcccaaatccaaatgcccctttctcatttcttcatatcaaagtgtaaataacaggcaagatttagaacgatagtaagcaagcaaccatgtcaaggaggcaagctaatcccatgcgccgctttgtcgacagcggaagcttttctctcgctggtgccctacattccaaaccccgatcttctcccattttgccaatcggtcttgtccttgtgggcgctatccttcttattggctatgtatatagtggctcaagcaaattccgaggcgaagcagttagtcggatcggaggcgactattcatgttcagtagaagttcagagggtaataccttttttaaagaaggcatatggtgacagcatgc

SEQ ID NO: 253865 - DNA, 457 bp, Gossypium hirsutum
ggctttgtgtgcaatagtagttctccgagttcagtaaaggcaaaattttcaggaccattgaaatttggggtggctgaagaaagatgtgttttcagaaatatttataagtagaaagattataggagcatgtcattttcttcaggaattctcttaagattatttaggtgttcctccaatgtaaaactagaagttagattatcttttttctttaggacgtgttgttaaggaaagcattcaaagaacttgcaggagaaaaaagatacttgtgagtgtcaggaataagaaaagcgtaagttatttttatacttccaaggtatgatttgtggcactaacaacatattcagtggaagaaactcctcacaagttataatggtcatgtaatgtctaggttatgttatgtgttgtcactcaattcgatatttatttgcttggatttgtttcattattaagctgtctg

SEQ ID NO: 253866 - DNA, 390 bp, Gossypium hirsutum
  unsure (1)..(390): unsure at all n locations
caaggttgcacagttgccattcataatagttagaaaagcacatacataaaagcattgttagcaagctgatgaatgacacatacagcatttaaagcatgtcaattaactattttttggttgcggagacctttctaaggaaatctgtgatcaaataatgatggaaaactgattgaaggcagaggctgaaatgtaagccgacagtttcccatgttgccatttatgtttgaagtttcttttgtgctaataaaagttgctaaatcagggttgactganaaaaaaaaaaaaaaaaaaaaaaaaaaaaaaaaaaaaaaaaaaaaaaaaattntaaaaaataaataaaaaaatggggggccccttttaaagatccaaatttaactaccccttctttcc

SEQ ID NO: 253867 - DNA, 369 bp, Gossypium hirsutum
gtattattacatttacatgtgatgttacttgcaaaaaagaaaaaactgagagctgcttttccttttcatccatgtttcaagcaaagaacaactctgccatatgtcttaatcaaagtaccttaaacgatgtctcgtcggtgctgtcgccgtcgataataaggtgtctcagcgatatatcggagatggacacggttcatctcagtgtcgatctagtgtcggcggcgagacgaactgttgggttcttgagaagtgttaatgaatgtcagtggcttcatcagagaccaactattattgaagcaataaggaggtatgataaggtatggatgccattgatttctaatctgacggtggtggggtcaacgcctcctt

SEQ ID NO: 253868 - DNA, 308 bp, Gossypium hirsutum
tgatgaaccacttattctctttttgaaagcaggatgtataacgctatcgccagaatctagctcctctatcctggaaatacactctttcattcgattcacgaggactggcattgccgaaatgttacttgaaattttttctttaagcagctgtatcttctctttcgtccttttctcagtatctaattctctatcttctgaatctataaaaatcaaaatcttagtcaattatcaagagagattattcaatcccgatttcacaaacccctaaaaagtttagggccctacctggattacgctctccggatgat

SEQ ID NO: 253869 - DNA, 384 bp, Gossypium hirsutum
cggacgcgtgggcacaattgaaaatgttgaagagctgcagaagaaaaacccttctgtttgcataaacggaggtgaaactgtaaatgctggggtagaggtagctaattcggaagttgaatatattgagtctgagaacttgggtgatctagaagatgttaatacctgtcttgagaagctcttacctggacttgaatccaaagattgggttctggttgttgaaactctcaacaatgttcgccgattatcaatattccatagggaagcaatgcatagtatgctgggtgatttgatcccacttgtagtcaaatccttgaagaatccaagaagtgctgtttggtaaacttgcaatatgacattcgcagacatcttcagtgcatataatga

SEQ ID NO: 253870 - DNA, 308 bp, Gossypium hirsutum
cactcacccaaactagaacattcaactcggtaactcactcacctccccaaaaaacccccactcccatcatcacctttaactcgtgttccactcacgggtctactcaatctctacttaatacaaaaaaccctactcctttgggctaaatcacaagactcacaaggaaaccagttgggtgaatttaatggcgacaaacacatcctctttaaagaagaaaagtgagcaagtcctagacggttcggatataatggagttggttgaaaaccaagaggtgttcactagtttcgtcgaccataagttcaaagagc

SEQ ID NO: 253871 - DNA, 414 bp, Gossypium hirsutum
ggaaggtttccggtgctggtcgacagctggaattgaacaccgcaacagggacctcactctgctttggccaacttttattagccacgtccccataaccaaaacctcatcttcagctttaggattggtagcggtcgattcattaaagaaaaaaaaacgaatatttctttgttttgcagttggtcacgtgcttgtcagatataaatgttaaagagtttaaattataatatttagatgactataaaatgttgattttttgatctccactaataatatatcacgtcatttattttaaaaaatttcctaattaatgccatgtactccaactctaattattctaataatatcggtaaagcaagattatggttcaaagttttttaatgcacaagtttttaagtttagtgcttaacgttaatg

SEQ ID NO: 253872 - DNA, 321 bp, Gossypium hirsutum
gaatgatattcccatttgcagaatttatggatagatatcaggggcagacccagttgttcaagtggaagcaaagtgattttcagatggctctggaggaggcagttttggcagaaaatggtttcctagactcggaacataagacccaacaaatgggatacacagatactcaacccagttgttcaagtcaggatctggattgtttatacacccacaaccaggatgcaagaccttgtgacagctgtggctcggttgttccattaaaaactatgaagaaaatgaagaaatctgctgagcttttgtgcaaacattgttataagctgc

SEQ ID NO: 253873 - DNA, 358 bp, Gossypium hirsutum
  unsure (1)..(358): unsure at all n locations
aacgtgttacagcccctattattaggtacttggattgaactggttgttctgaatgcttttcctatccgcatctctgaggttcgttgtatcgaattgaagtcgatttgccaaagctatggtacaaaattggcggtctactttgattgatggtgaactactttagtatgtttcttctgtgttgtctgatgatgtagacatgttttgagtaatgttgagctgccctttgtgctttttcctcaagaaacttcttgttggtacttgtttcttaagaattgaatcatcagccttttagacttatgtttaaaaccacaagtacaatttaggatgcatantgggttcaatttgaaattattttttt

SEQ ID NO: 253874 - DNA, 237 bp, Gossypium hirsutum
aatacggacatcatggtgaggaatgtgaactgagggttgcttacatagcacctactcgacctacttcacctgctaaagaatgatccatagtaggctcttcaccttgggcttgcgcctcagacaatggtctctacaacactgcagatttggcatctaaaatggctctcatttcctagctgtatgaagagaaaaacgcctcccttctggagaataacatgctccagcatgaactggaac

SEQ ID NO: 253875 - DNA, 392 bp, Gossypium hirsutum
aatcttgaagggtgttacggagagctgttcaaacaatacatgggctcatttcattgtggagacttctagtggctttcacagactggatattttctggcctttgatgaaccttttacagcgtcaaagaaaccctgtttcaagcaagagtgaacgatgaaaacctattaatctgtgtactgtaggaatgttgcaagcgattgtatcagtcaaaccatgctccttgcgtgcatgcaagcaagggtacgagttgaatatttgtgcgacgtggctgttggcttggtggataatcaacccaagcccttgtcaaagcttaagttgatctctagaatttgaataattatggttgtttaacgaatctactccaatttctccccttttgggttttttttttg

SEQ ID NO: 253876 - DNA, 267 bp, Gossypium hirsutum
cttgggtttcctgtttcactacccaatcccgatcaactgtacgagaagtgccgcgatgcagtgtttaaatgtgggaatatctccattggatatcctttctctggaggtgatcgagatccagaatgcggacatcctggtttggcgcttcactgtgacgtttttactaataccactaagattgaaatttttcgtgtaaagtatgaggtgctggacatccatcatgaaaatcaaattctaaggattgcgagggaggacttcatcaagaat

SEQ ID NO: 253877 - DNA, 269 bp, Gossypium hirsutum
gaacaacagagtttgtgtctggagggtgtgccctggaattgtcttatggtcctcaggttggccaatgggactgtaaagaccgccttagatttcttgaagaagagtacttttttcgatgttggtgctgtggttgttcagaagtgaatgaatctgatcttgtaattagtggattttgttgtgttaatccaaattgctctggagtggttttagacaatcttgtggctaactgtgaaaagcagaagcctaatgttccagaaacaataagcaac

SEQ ID NO: 253878 - DNA, 348 bp, Gossypium hirsutum
aaaataaaaaatattcttttcagtttatccctctttctctttcaattttcttcgaaaataaacaaatgggtctttttggtttgcttagttccatcaactgggactctgagttttacccacagctcactgatttcgtttacctccctttctttgctcttttcttcctttttgtcaggcttttcctagacaaatttatctttgagaatttagctaggagactggtccttggtaaaggccacaccttacatgatgttcagaagcatgataacaggaagaaactcaataaattcaaagagtcagcatggaaatgtatctattttttttcctcagagttattatctatatatg

SEQ ID NO: 253879 - DNA, 239 bp, Gossypium hirsutum
cttcaatgtgcaccttcttagtgttctttcacactcccaagctaatgcttcaactactttcttcctcatctaccttcatttcctcaatggccaattaattttatttcattttccttttttttattctcaaacagctcaagtccaagtttaaagggctttatttcctggtttttgattgaaagagttttgctttgctttggtgaaaatgtttagcttttctcgtatacgcatgaaacttg

SEQ ID NO: 253880 - DNA, 133 bp, Gossypium hirsutum
cggacgcgtgggttgagttcttattaacggaatcatgcctgcggagatggtgataatgccccaatatccctagatcatctacattatggagatggcggttgcgctttcgacttacgttaagctgactttggat

SEQ ID NO: 253881 - DNA, 318 bp, Gossypium hirsutum
aaaacatgtaaaattaagactaaccatttgaatcaaaccaattgaagttaaaaatacatattttggcgaagatcagcaaattgcgtcccaaaagattgaagaaccgttgaaacccccgtccagatatatataattccctgcattcaaaggaaaataaatagaaggggagaagaacattctattgagattctttcttttcttttcttttcttttaacgatgaacgctcaccatgcttccctatgtcgacggacgctggaggagattcgtcaaaagagagccggcgaaagaatcagcaaagcttcttgcggatcggatct

SEQ ID NO: 253882 - DNA, 309 bp, Gossypium hirsutum
gctcttgccactttcatttcttttatatatatacaagtaatcatcttttcttttgcaaacccagaattgaaatttcttcatctcttttttttttttgggggggggtcttgcaaaggcttttctccaagttaaatggacgagtcttggcgaatgtgcatgggaatgtcaactactcatcatcttcctcgacggaaatctatggaaaattccattttttcgttgaaccatgtcactatggtggtgccagatcataatcttgacgtggatgacttttccgatgtcttcggcggtcctccgcggagtgtgctt

SEQ ID NO: 253883 - DNA, 372 bp, Gossypium hirsutum
agctttttaaaaccctaatttcacccttgtcttttagtttctccccattttctctctcaaaatcctaaaagaaaagaccaaccagattatattgtattcaaaacagagaaaaaagaatcaattgctcatcaaccactctctcataaaaagcgttttctattttccatttacttttttttattttgtttttccttctaatttttccttgttttcgatataaaactagggtttgcgctaatggtgggttttgtctgttgaaattagggtatttttggttttcgattcttctgtaagggaagtgtggttgtagtggcttcccaaatatataagcctggtttgaagggtgaagttgggttggaaaagatggcatca

SEQ ID NO: 253884 - DNA, 409 bp, Gossypium hirsutum
  unsure (1)..(409): unsure at all n locations
gtccgatgatgacccctcgatcaacttgatatggtcagaggcatttctccatgacttgtcggagaacttccatggcactgattcttggtggaaagaatatagtgaaattgggacatcttcaaaggaggagacctgtttttcatggttggtgggggatgctggtgacgatgatgggaacttgggatttagtggtttcagtgaaatattagggatgaatttgccttgacatgggtggcaagttttagcatgcaccaattagggactgccctgcctttgtgcacgcatgtgaacaatgaaaagaggcattatgtgttcgttaatagacctcattaagctntatgtctagattaattatttatgattacaggggatcaataaaagtgaaaagacttaagaaagctttcatgtc

SEQ ID NO: 253885 - DNA, 377 bp, Gossypium hirsutum
atcccaagccaaaaaggatggctaaatgctcctgggagtcgggcgcagcctcacaccagctgcctcctccactcagcattccatggaccgaattgtgccctgggtggcctcagacttttgggtattgataagcagatggatttgagtttttctaaagaatattcgtattacctccttcttctaacttgccctatttgcaaaagcacttttgtagtaacaactattgagtcctgtcagacctccacggacagcaaagtggttttaatgcaagcccaaggatcctttgggtcttatctcaagagctctgggaggtggaagcatggggtgtgatcggtggaccaaggtgataagcgtctgtgcatctgcctgtccctata

SEQ ID NO: 253886 - DNA, 398 bp, Gossypium hirsutum
aaagaagcagccttattcatttctctcaatttcccccttttcattttttgaatttgcaaattttatcaatcttgtttgaaaattcgcttcgatttctcgaattccaaggtattgccatttggaatttaatctatttccttatttggttattgatattctctttcgatttcgaaattttcgtaatcaaattagggttctccttaattgccgattcgaatttacgagaattcgatcgataaaaccctgattcagctcctacccatttcaattccgaccaaaacacggaaaacctggttttcgatttctaaaaggaaaaagaacactcgcacttcaaaaatctcggttaccttttccgaaaaccctttttctggttctaattcccaattaatcccaaagaa

SEQ ID NO: 253887 - DNA, 261 bp, Gossypium hirsutum
gcggaaagagaccttccatctttcctctgtgatgcttattctacggattctgtatgcatctcccaattttcaaaaacctaatgataatgtgagagagcgcaatacaagtactcaacaggagcttggcgatggcaacaaaaattgccatcctagaatcatcaaggaaacacgaccactacatagtgaacatgctccagaaattactgcattaccatcagaggataatatgcaacatttcaatgcgataatccttggtcccac

SEQ ID NO: 253888 - DNA, 401 bp, Gossypium hirsutum
ctaatatacacatttctaattttctctcaagcttcttgctggtgtgcgggctatggagagttgataaatccgttggttttcttctttgtttctcaatccaacttcatcaagcttcgttttcctgcaaattcatacgctttcgatctccattatctctaaatccaagttctaaattttgttgctgactggtgaagcttcaggtatgtgggcaggtggctttcgagtcgactttaagactgatatagtcctttacctacaaatttttgtttgagaatttggggtaaaaattgctttaagtaaaagtaattacatgggaattcagacaatggggtctcaaagtgatagtggtagtaatggaaaacagttgcaattccagcagttaactcagcaaaattcgatgt

SEQ ID NO: 253889 - DNA, 425 bp, Gossypium hirsutum
gacttttgcaaggataagaagaatgaaatgaacatctttgttcacacgtacatgcaaaagacaacttatgttacatatcacatcaaggatgtcaaactacagtttcctgttttcaaagaggcaatggtgcgccaggaagatctatttatggaccttaagttggtccgtggaattggtcctgcatatagagcatgtcttgctgaaatagttagaagaaaggcttctatgaagctttacatgggcatggctggtcatctggccgaaaggctggcaacaaagagagaagttgaggtcaggagacgagaggagtttttaaaggcacatggtttgtatataccgaaagatgtactggcttccatggggctatatgatacccctaaccagtgtgatgtcaatatagctccttttgacacttcattgctcga

SEQ ID NO: 253890 - DNA, 217 bp, Gossypium hirsutum
atgcatactagtttatcaggtcgtgtaatttacatgctttctaatataaaaacatatataaagttcgtattggattgcatttgtcaatgtttttatttcattaccctcaaacacaaacatagacacacttgcactgcatttattattactggataagggtgtatcatgggcgtttttaactttatgtatatttatgggcatgtcttgtttcaatttc

SEQ ID NO: 253891 - DNA, 435 bp, Gossypium hirsutum
cggacgcgtgggttgagaaggaaaaaacagattcaaaaccctaaaccatacacatgtgaaagaacaaataccaatattacgacgaacttcgtcatcattttataaggggaaattggggataaccccaatattatgattgattaaaaatatatataaaaggggggggggtcacagactcacagttagtgcagactgctctgtcctgagtttcgtgtttaaattgaaatgctcgtttggtgtattaaaaggcagattgctttagccaacgccaaaaatctgattctgagtctcacttgtttctcatcacaacttactcgcagtgcaggtatgtcttcgatggcagagaagaaagatgtggacaaagataaacccatcactcgtgttcttttttgcggaccacattttccagcttcacaaatttataccagagagtac

SEQ ID NO: 253892 - DNA, 322 bp, Gossypium hirsutum
ctttgacgtcaaggcattaccactccttctttgagctgaagaagatggcatttttaacgactatgggcgaattagacaaagctctgtggagctattaggagatcgaacagttaacgttgccggaacttgcgcaaaaggctatacgtggagggtggcaacgatgaggagcgtgcttgcactgaaggacagctgcagactatcatggaagttcggagaaggggtaaggacattctacggcttagtgcggtaacaaaggatccaactgtagtgaggaatactggacacgatgctgacatagatggaaagaagaatgttgctaaag

SEQ ID NO: 253893 - DNA, 255 bp, Gossypium hirsutum
ttgcaattcaatgagttcatgtgccactaggagtagcgcttccaacttcatctaaatttcatcgctaattgagcggaacctagtgcagaacaccctcgtgggtatgaatctctctcatggacttatccctatcgacggatgcgccaaccaatgtctctaactgatggataaactctttaacttttctgaagctgccattgtcttgatcacgtaaaaagtaggactctatgacacacatgcaactattctaaacca

SEQ ID NO: 253894 - DNA, 431 bp, Gossypium hirsutum
cccaaatgtcacaacggttttaacaacgcactaaatagcgttcaactctcaaagaaccaagtcgtcaactttcacggtgcaagccattgcccatgtttctttttccttaccaaatagcccatagcttataattcacaacatcctttggcaagtcaaagcttattagcaaagatggggaagaagagggttatggtgccggccaaggacctggacttgtccaccgtcaaatacgagcatgaagtgatcaaagctcctcatttgacgggtttgatgctgaagttgtttgtgaggatggttgaagctcctgttttaggctctttgatcatgtcttttttgaaaaaacagaacaaaatggttgagatgtcgcagaacactgtgataccagaagcacccatgtttaaacctgaatttactcctcaagatgcacaacc

SEQ ID NO: 253895 - DNA, 308 bp, Gossypium hirsutum
ctcaaaagaaaaaaaaaacacgcagctgaatttggaggaaaatgggtgacgctttgtttgagcttgagcagaatctacgatcccgattggaacaattgacccgtcaagatgaaaacatttttcaaaggtgtgagtcctctgctcttaatcatttcacggctggtgtaattgctggtggtggtcttgtttgtgcagctacatggaagctgaatatgctacttgggtgaaacctttatgatggagctgtctgaatacttggattcttgaaatttgggtaatcacttgattcgtgtcttgccatatacttg

SEQ ID NO: 253896 - DNA, 356 bp, Gossypium hirsutum
gtgatggcgatgattctgctgagaaaaccagattgcctgggaacgtggtatcagttgatcatgatgatcagacaaggctgcatacgaggaagaaagccagaggccatgcaaaagggtcacccaagagacgcgcatcatttgaccaatggcaaccaagtctagcaagcattactgaaactgaagaatagggaaatcacacacacatacgtatatgttcttaccttttgaaagaagagtatatgtatatattcttgttgaagattctctctatatctgcttgataaacataaaatgctcaaatattcaaaatttctgaaaaaaattaatatatatatatatatcaatttggctttttt

SEQ ID NO: 253897 - DNA, 418 bp, Gossypium hirsutum
acgccgcggacgcgtgggctctcaacgtctgggtcggggcagagctgccatttataaagcatagaaggacgtgagccgagccagcagcggccgggacgggccacctgcatggcccctgacttcacttagatacaaaaaaggctatctcatgcacccagcaccaccccgatgggggctatataattcagcttggtggaatcaggcgtaactctgctaataaagactgctctcgacctggctgtcaccgatctcgggttcatattttttacgccattgggtctttttactagccccatttggctccccggatgcaccttgctctttctcaccgctgccggcttcttgttggcgtgcggcttcagaggcgccggcgcggctggctccacttggatgttccgctacttttggggcatgcacc

SEQ ID NO: 253898 - DNA, 389 bp, Gossypium hirsutum
gatttatcccatcaattcatcaccatctcaactaagttcattccctcgtcctcttcatctctaatcgccaaactctgggttcgccttcttttactgtattcttcttattagatcaccaacttgcctttgctctatagctttcttgtctttcattttgaagctggatcggatcgttttcactcttccttaattctacctttataaaaacatttcaagcatgtaagtttcgactttccctgtttaaatcctattcaaaagaaaaagaaaaaaaaaacccagatattttgtttctatgcaactggctgaagctttgcgtttatctatctaactaggtgtagtttgtaatctggctacctacatacgtactatttcttaaccaagcatttaaa

SEQ ID NO: 253899 - DNA, 407 bp, Gossypium hirsutum
aatagattctcttccccatttttattttctcgatatctcttggatggtgtgagcaagcaattaagtggaagtcacccgtctaattttagttaaaaagctattaaccacttcggaaacccttttctaggtttgtctcttaaatcttattcttttcaaaggttgtataatcgaaggtttcgacatcttaggaagatttgtttatagatatgtggaagctaaggtcgtctggtctgagttgtggagtttgtgcgaatttccaaataccctttccacgttgtttcatgaattcaataacaacatcctccattgatgtaaaacccaaggttccactctatctaaggccaccttccttctctgcctctctttcagagctgaccaaatggcataaatgggctaaaaatctggct

SEQ ID NO: 253900 - DNA, 185 bp, Gossypium hirsutum
ctttccccctttttttcaaaccctaacgttccaattggttccccaatttcaaatttctccaggattatcaaatcgatcttcaatttcaatcttgtctcccacattaacggctcagattctaatatttctctctgattccttcaccaatagtagcatacagctttcactgagtttcaactatggct

SEQ ID NO: 253901 - DNA, 344 bp, Gossypium hirsutum
cggacgcgtgggattggttttaagatctgggtctgaaactttgcttaagctggaaaggtccttgccattatttgcagaacttccagaaaatattaaatgccttatggactgtgaggctgccactatcttagaaggcattcaggatcaaatggttattctttccagcgatccaactattaagctccctgaatcatttggttcgggactgcagtatgccaagactggtagctattttaccaatccccagtctgttagaaaagttcttcaatatccttgaatttctgttttccatggcacttatattatagataattttcctggcattctttggctttatgccacat

SEQ ID NO: 253902 - DNA, 456 bp, Gossypium hirsutum
gaaaattgatatttgagcgaagaatcttttctgcaactctagttagcaaaaaagaagaaaaggtgaaaaacaatcatatcgaattgactcataaagtacaaattggcgacttgaagctgacatttggataatactcttgtttttgaaacttaaagactttagggttgtcaaaattatataaatttaggcattcttaatctccagttgtatgatcccagttaccccactaactgtttccagtgtttgatggatcgtctacgcccaagacagaggccggtcttctctgggtttacaaaagctgaggtttctcagcatgggaacatgtgatattatcattagtagttgtctttatgaatgaatagtttcagaaatcccggtccaaaatatggtgtctaaattgcggaaccaaaggtgccatggaattatttcatatattcagatttctcagtgtggaaa

SEQ ID NO: 253903 - DNA, 176 bp, Gossypium hirsutum
gaaaattgatatttgagcgaagaatcttttctgcaactctagttagcaaaaaagaagaaaaggtgaaaaacaatcatatagaattgaatcaaaaactacaaaaaggcgcttaaactggcattggatatactctgtttatgaaacttaaagactttagggttttcaaaattatataa

SEQ ID NO: 253904 - DNA, 173 bp, Gossypium hirsutum
cgaagaaccagagcctgccggaagaaacaagccttctctgtcttttgtccccttcccctgcccctgtttttctttatggtgttgccatggcggagatctctgggtgtaatggaaaccatgaagtagatgcgaatgttaatggtgaaaccagtcatcatcatgctcctccttca

SEQ ID NO: 253905 - DNA, 328 bp, Gossypium hirsutum
gccccaatgaaaatcaatttgctattcttggtgaaaaataatcttgaccggcttttgattttctttccagaaccacttttcacagaagcctgatgaaaaaatgcctcacatggaccaaattttttacctgagcaacctgtggatgggaaccctaaatttatttacgggcctatgccccatttgtgcgacaccccgattgagcgcatattttccactcctatagagaccactttgatgtttgcatgtaacgcgaagcacattgtgttggctaagatagttcaaggatacattcttccatcttctgatggtcactatatatcaacaaaaa

SEQ ID NO: 253906 - DNA, 420 bp, Gossypium hirsutum
gcttaaggaggatccttccttttacttttatcgtttggcttttgtcagccactcttttcttgttcttgttcgtcaacgcctccaacacatattacttaatcaatattttcttcatctgattttgatcggagcatcagtctggttagaagggatctcatggccactactggaaacaagaacatcaatgctaaattagtcggtatctctctctctctctctctctctttaaaccctctttttgctttcaggagtatttttttttctctttaaagttaatactagtattttttgctctggttctttcttagatgctgaattctaacctgggtctggatgaattgtggatcatacttgatttttatgtgaaatgtgaatatagtgttgtcttaattttgaaaaaactgttttgattttggtagt

SEQ ID NO: 253907 - DNA, 345 bp, Gossypium hirsutum
gttttcttcttttatttatattccgtgtgtaaaattcgtgtcttcgttagtaaacgacagaacccagcatctcttgtaacctttctctcttctcagatccaacccttttatctgtctccccacctgtttggtgagacttggcgttaatggagtggagcttcaacatgaatcataatcggtacctctaatgctatgctgagacttggctagtttatatctataagtttagactgcgatgattcaataagtagttaatggtcctatcaggcaaaactgatttagttttgtttaaaataggagctttttaatagatagatttgataaagaaaaaggacacagttttag

SEQ ID NO: 253908 - DNA, 447 bp, Gossypium hirsutum
aaaaaaacctaatggaaatgggtgatcagtacggcctgcctgatttccagcggcttttaacgaggagaacccattttccggcatccctgctgccccaaccttctgactcgccttaccttgctcatcataggaacatggctctatcaccacctccttaccatgaaccaccctacgtgttgagcaatgggaatattgcaatgcctagtggtttgcttaggtttaacactactggtgccactgattttactgctgctgcttcagcttctgctgctgttggtggtggaggatggagtttgggaaatatcgacggcggaaacagccggtggccgaggcaagagactcttactcttcttgagatcagatctagacttgattccaagttcaaagaggctagccagaaaggacccttatgggatgaagtgtctaggtatataaatatattactat

SEQ ID NO: 253909 - DNA, 200 bp, Gossypium hirsutum
cggacgcgtgggctggatcagatcttcccccagttgcccatcttcttccttcaatcattccattatttcagggttttaatctctccttactttttaaacctacgcattaaaaaaaatacacttgaagggaccacatcatcaaacccttaatgctactgccatagtgctggatacgactatggagatttaatgattacata

SEQ ID NO: 253910 - DNA, 409 bp, Gossypium hirsutum
atggggcttctgggagacctgctgtagcccgtgtcaccccctgctgcagacccacccactttcagcttaggtcaaaagctgttttctaactcatttccgagaataacggaagggctggagttgcagttgagccagctgtctgaaccagatgaggaaacaagcccagcagggtaaaatgattggtccaaggttgcagccatctgacagctgggtcacttctcctcccactataactgctgcctccatgtgacttgaaacttagagctaaagagaggcccaggggctgccaggtctgatggccaatgggcctggtgcctctgcccacgtcagcctggtcttgggcttctgggacagggtcacccacatcttgaacatggcccgggagattgacaacttctaccctgagcgc

SEQ ID NO: 253911 - DNA, 421 bp, Gossypium hirsutum
cccacgcgtccgccctgttgaatttgaaactcacagcaaaacaatttcttcagaaaacactcccacctaactcttcatttcccctccttcttgactctctcgcctcctccgtccaccgcttatcttcagccaccatctccgcaacaccagaagggactagattcaacagataagtagaatctcctttcttaattccttcagatgctagaaaatgggctaccttgttagcctccctgttagtaaagagaaatacacataaactgaaacttaaactcagcttcaaagcctcattgatataaactgagatctcagaactatcattcatctttttttgcagcttccggattaccgactgagagtctccctcaacctccacctctctcaaaccaagttgtaccccaagatcagagcctgaacacac

SEQ ID NO: 253912 - DNA, 289 bp, Gossypium hirsutum
atttgccagtaaaaaaggttcagccgacggcagcacagatcgcccgatacgaccatccaatggcggcagctgtggaaacttcaccagttttagagattttagttccgagaaccggatggatattctatctggaatggacctccattcacgaataataatcaacctgagattaagcttgaaaagttccttgcagtctgctaagtatagggaggatgagttcaaggattatggtgacaaaaactgactctgctattggatttatgattccaccacttgaaagagataagat

SEQ ID NO: 253913 - DNA, 266 bp, Gossypium hirsutum
acggttctggtacaagctagatcgtactttcaaactatctcgggcaaatacatattttcggattaatctaaaaggggcataccgtactttgaagagttgtttgttgactgaactttatattcacctccttaaggatgagctcaatgagattatattttatgccagtattgccaagctagaaacttcagtggcaatgtctgatgacaagttatagctgatgctttatggattcattgataagcttcctgtttatcttgagaaaaatt

SEQ ID NO: 253914 - DNA, 258 bp, Gossypium hirsutum
atcgcattaccgatcagtgaacaagatactgctttctgactacaatgaggggcattgattaaatcttcaaattgatattgtctggagcgaatggtgaatggtgaccaaaaaggtctaacttgcggattacatatggagcaacatctgtaaatgttcttctatgcacgtagttttttgactatgactgaaattacacatttatggtggtctaaaagatgaagaccgaatatttaccaacttatatgtgttgcatgatcc

SEQ ID NO: 253915 - DNA, 431 bp, Gossypium hirsutum
  unsure (1)..(431): unsure at all n locations
ccaaacctgtaaactgtgattgccaggtatcatctactaatcaatgacatcaggaatgacttccaacttgatagatttaccttttgactagttttatgtatgtcttaaaatttaacctcagactcattgtttctggtagtactttggtgctgctttaattggaataaagtttccttgcaggatgtgtcctagtgcagatgcaactacttcagtgttggcaggtgacctgctcttgtcgttgttgtcagcttgaagttatttaatcaaacaggaaatgatattattatgtagaggtattggtgggttgtctcactctttctgtggcatcagatgtaactgtataagggatttttatgattggttttctttttttgaaagatttcccaaaagaaaagcanaattgaagtgtgaaaacttgtacgtgataaact

SEQ ID NO: 253916 - DNA, 453 bp, Gossypium hirsutum
ctcatggtcaaaggatagaagtcagaaatttaaatctgattatgtggatgaaatgcaaggtcgtacgcctttatgtaaggtaaaacctaagaatggcagaaataattttcaggagaggcttggagttaagtctaatggaagtgagaatagatctgttgatgataacaaagaatctatgggaaaactatccagtgagagtagtaaaagagaaaatcaaagaaatgttggtcagtcagatgctaaacctgatgaaactggaggtcaagatgtaatgtgcactgtgaagaagagtatcatgcaggatggcaatgttaaaaaatatatgaaaagattccattctgacaaatctgatcatgcggaaattgcttctgggagagggaactcaccatcattaccacccttcggaggaactcaaaatgagatactgactcattgcccccaccctaatgggtc

SEQ ID NO: 253917 - DNA, 400 bp, Gossypium hirsutum
cccacgcgttcgggagaaaagagcaagcgagaggttttcatttttctacgaacacaaaaaaacctcgtaattagctcaaattgattcgaattaaaagactcagttgctgcattgttacacgattattgaaatcgtaggttcaaatctttcatttcgctgaaaattccaggttgaaatagttctagttcagatcaaagcagttaaacaagtggagaagatctctccgagcagtattttgtcgaattttctcgaggaaattttctggaatctgaagtcgattgtttgataagctttcggaatttgaatgctatgttaatgtggctccgatctcagctcgaggcccgaaattttcccgtgggaaatcactttctcaaagtgtagtggatctgataaaagcata

SEQ ID NO: 253918 - DNA, 203 bp, Gossypium hirsutum
tacacttatagctgaaacagacaaggggggggcttctgtttaattaaaacaaaccattgagatggtccctgcggatgctcacgcaatgtgatatatgtccagtgcccgtgtttgtgcaagagtatagatataaccaggcccgatttatcattttgagtaacaatgactgttttaaaatttccaaatgccatctcatctaatta

SEQ ID NO: 253919 - DNA, 423 bp, Gossypium hirsutum
ctaaactccattccccttaacctcactaaaaccctaaaccctttgaagcaaacctacccccatggcttcaatcaacttcaatcccttcgaaagttggttcaggaaacctcaaaacccaatccaacccatcaaccttctctcactcgctcactcattccgctccaaaacattctcttactctaccaatttcgcttctataaacttctccagccccttcaacaaaaaacccaagaaacccgactcggattccgatacacccggaccgtacaagcagatgctggaccagttcttttgggaatgcgagaacctccctgattacaggcacactccggaggtcgaaaagattttggatgaggaccccgttttcgagaagaaagagaatccaacagaagaggacattaaagagaatgaagaatggtggcg

SEQ ID NO: 253920 - DNA, 338 bp, Gossypium hirsutum
ccgggtcgacgccacgcgcgcgacctttgctatttttattatctccctcttgtctttccctgcttcgattggatcaaatacaccgccatgcgagacaacgaagttgttagagtgagaacatatgctcttgtatacgttttaatagggatcaatacaggtgtattagttgttaacgatccagcttgatacatgctttgctgctttgactatccgaagctagccggagtttttccatggatggaaattgttattccatctttttctccgtttaaaaataacatgaaactgtagatctttatgatccttctggacgtgaccgaccatatgatgtgtatgaa

SEQ ID NO: 253921 - DNA, 454 bp, Gossypium hirsutum
  unsure (1)..(454): unsure at all n locations
caaaataaaaataaaaataaaacaaaagggagactccctttctctgctaggccgacggcctcccaagacctccgtcgcgccaccaacgtgttcggcgaccggtgccggaaagtggtcccgttagcccctgtttcacggtatccttgaaagccaaagctctctcaacccacgggagtcgaaaacaaaggaggtccacgaccgcttggacccgattcgggcgacggaggagagatcctccgacggcgcaaccacggccacccggtgtcagacgaggccgacggctgtggtcagaagcgtgcatgagtgagcctggcagcatgcggcgcttggaggcttgngggcaagcagcagctagggttctctgttgctgaaattttttaatttcctgggctagggtttaggtttgttgtgtttaatgtaactggactgattattttttggtaatttgggctgg

SEQ ID NO: 253922 - DNA, 171 bp, Gossypium hirsutum
ggcatttaatacaagtatagcataagtgggggttgtccaattgacagttcgcagttgctttatttgcgaagaccccacatcggaacaagataaagatgtgcccagcgctatcactctgcactaaaactaactggatgacctattcacctaatagagggtaactgttacttc

SEQ ID NO: 253923 - DNA, 473 bp, Gossypium hirsutum
  unsure (1)..(473): unsure at all n locations
cgggagtgttaactacatcatcagagatactattgaagtgtgatgcaggaatataactgtatcatatatgagataatgctttaacttgtttggaagtatttatatagcatatataaggggaaacatcatctctggcctatcaataatggccagagacaaagaaagaatattcttggtggaaagaaagctcacgaaaagctgagaaagaaaaggatgtattttgccaacagaaaattatctagatgtgctgagtgtttaggttgtgataagggaaggaacgatgacagaagaaaacttaaaaacctgcttgcagaatggaaatagaggcaggtcaaagtgagccctgaatgtcgttattttaaaatttgaatgtttaaaaattgagagccatgaacatatttganaagtggaacaacttttctaatctgtaattgagaaataacttangaagcatttaagggatatattaaagg

SEQ ID NO: 253924 - DNA, 332 bp, Gossypium hirsutum
gtcactcgtttgttcttctccgtttcacttgtgggcttcaaacagtctgaaatctaactttccccagttcaattcctttccggtttcaaatagagagatactgaatatttgtcaacgcttgactttgtacggatcaaaaaggggggggggcatagagattagtgttgatcgaagaaccgagtttatttgtttaaggggcaagggaacaattggtaatatatctatctgatggtggcaaataattaagtcaatcatcataacctgacaaattctagggacaagagtgctcattgtttccggacagtttacaaagtgggtccatacacgaggtt

SEQ ID NO: 253925 - DNA, 438 bp, Gossypium hirsutum
  unsure (1)..(438): unsure at all n locations
gcgttggcagccattgaagctctcttccattaccgcgttgtgagagcctatcatagtggtgatttcaacagtttctcaattgctttagaagtggtcttaattgcttacttatactccaatgtcgttgttcttgatactgttgtgagttccatgctcttcaaaagctgcaaaacaggttgtttgatggatgaggaaagaagggattgttacaggattgaaattgtagcagagaaagatggaaatgcttatgtgaagttgacgaatattgaacaacttccatagaaaaaaaaaaaacagccatcaaattgtatggtcttgaatttctgcatatgtaaattcatttcatactgtaattccaagattcattttctgagaaaaccaggcgatttctgagggataagtgatcaaaacatatgggatatangttcaagaatcaag

SEQ ID NO: 253926 - DNA, 425 bp, Gossypium hirsutum
gaaaactcgggggcgatgcttgagtggagattccgagtttcactccatcatctagtcaccggttacgctggccttgtttcagcaaggaaaatagtgcttcctcttacttgcatccaaccaaaagggcttgagagcttaaagcggtcagtgcatacttcgaacgacgatggtgattttgcggaattaggcttaccggtggaaagggttggaggtgtaattgcgaaactgatgacagaaaggcctcaacattttgtgaaaatcaatggtactaaaaagaagttaaatgggtcaccatttaaggaagacagctgccttaacatcaaggatgtatcacttaaagttgggaactcttttgttccttctctagatcttgagaacaatgatagtggaagatctactttcagaacttcaagttctgttacgat

SEQ ID NO: 253927 - DNA, 331 bp, Gossypium hirsutum
tttactccttgccgtactggacaagctgaaatgggatttggagatacaggatatcgtaccattatatccagaaattttgccactctacactcaatctctaccacgccattcactgacatgtggcgagcttacttacttaactccatcaatgacctaaaagatttcgacatgactaatctctacaactattatggctctgacgccaacgataacaagactggctatgcgtacgtcaacgaatccagaatcgacgattgagaataccaacttctatacgccaagagccttaatgctataagaactgatctcgagaatccagaggaccagctcc

SEQ ID NO: 253928 - DNA, 440 bp, Gossypium hirsutum
  unsure (1)..(440): unsure at all n locations
attaggtccaaaatactccactttacgttttcttcaatcttcttacaagcccattgaggttgttgccgcgatctcttcttcttcgtccttctcttcgcgccgctaggttttaccaaattcaaagcaaagtgaatgaaggtttttcgggcaaatatgaaaacgcgtgccacctttgactgttaattagaaagggatacatccatgagaaaatgcattcaacagcttcttcttcttcctcttcgtcgtcttcctattctattattcagcgtcttcgctctttagcgtcttcaaagctacgtttctttacctttatttctctatatctccatgtccagatttttgacatttgccaatattaggaaagctgcgcaatatgctatttcgaatccaacaacgagccattcggaattangaagtatggaaaacagtgtactatcggg

SEQ ID NO: 253929 - DNA, 261 bp, Gossypium hirsutum
gccacgcctacgacctgctacttttgtttaaaaccaatctgaatacaaactcgaaaacgattctacaatattcaaccacactaaagacgctctctcattcggacattgatggcggaaatactttctgctttgatgtctataatggcctttcactctcactgtctccatgccttaatgcagcattctgagtattatcatcacagcggatgtgtggctgatcgggacaaatggcgcgaatttgctagtcgattgactgcaagt

SEQ ID NO: 253930 - DNA, 301 bp, Gossypium hirsutum
ggtttcaaataatcctcttacaatgttaaaggagttgtttataggcataactgaagttccatttagatgtacagaacaagtctctttgtgggctttggctgcaatgaaagatgttggaattgggctcttaatagaagtctgctgtgatgctatcagctttgattttgccatgagagctgtgaaaggacaaacgactgaaactagattgttcaatggggctggacttgtagctgctgcaggagcaatcacagccgttcaaatgcctgaattattggctgatggggagttattatcacaagtg

SEQ ID NO: 253931 - DNA, 235 bp, Gossypium hirsutum
ctctctctatacgatattgcatatctttggagattttaatgctatgtgtccacgaaggcaacgaaccgcggagtatcttaactgtacccatgtgcacgatcatacatgccgctctgcaaagagcacgtctgtgatgatgcgtctgactgggatgtttgacacgacatttaaaccgcctgtctgagtccttgctcacactttggatttattccatacctgtgggaagcttctattg

SEQ ID NO: 253932 - DNA, 422 bp, Gossypium hirsutum
ataagaaaaaaactctctatctcaatagccacacgttcatctccctcaacagtctcaaagctttgaacttattttaaattttattttaaaatatggaaaccccaccttttccctgttcttctcttctttacactctatttttcctttgattctgccgaattctttagattctttcttcaatttcaaaattagaaagaaaaaccttttatttcctctcaagcccatcaagttcagaaccctaattttactctttttgaaactcagacagtacaaatttcgcggattccttttggacaaaaatactcacaatcatatatatatttcaacaacaaaaataaaatcgaaatcttagagtctgaataataaatccattgccttctttaagtttaaaaatgcttttaaattgaagattttaattatct

SEQ ID NO: 253933 - DNA, 314 bp, Gossypium hirsutum
ctgactatgattgttatttatctagttttgggtcacggaaggccaattaaagaacaaacaccggatgacggctcgctaagagatacctgcgccgacgaggctggacgtgttatcacaattaatgcttctggggtgactgagttctaatatatgaatgtagaactccgagaaaagctcaagggaaagtaggaggggtttgaggacagcgacaaatggatggaactgcttgatcacggattgatttcatgggattgctgcagttcagattcaaagatatcagaaagcgccccagagttacttggctccagcgcttg

SEQ ID NO: 253934 - DNA, 418 bp, Gossypium hirsutum
  unsure (1)..(418): unsure at all n locations
cttgagatcatcggagtcatggagttatcgtcggctccccactcatacagctacctttccagttatcatcaatagtgaagatgaggatagtgaaagtgaggttctaaggacccgtaacaacaacaagaataagaatcctttggaaaatggagacagattggactcctttctgcaaccgaaagatgatcctaatcttggtatttctaaacaagttcgagctttatggaagaagttgcagcagatcgaggtgcttgaagagaagcagttgagtggatgcatccttgatgaccagcaaattgcaaagctgcaaacaagaccagctcttgaaaattctcttgctgagnctggtgtaccagttgaaagatctcatttgaaaggatcatgttcaattctctctgatggaaaaggaaataaaaag

SEQ ID NO: 253935 - DNA, 369 bp, Gossypium hirsutum
ggatcacccgatcctacaaagcttctctcctgctcccggtatgatttccgcttggtttggttgttttggccatcgtgggtcttcttctctcccttcttctttcacaccctttctattctgattttcccacgcaataaacaaacctcccgattcagatccgtcctaaaaggtttcacaattggaaagtacatataatagctattgaacaccttttttttccccgtttgagatcaaggacctgtggagtaaataactacgtagacgaagatgtttggtacaactaatccttttgggcaatcatcaagtagcccatttgcatcccaatctgtttttgggcagaccagtgcaagtagcaatccatttgcacct

SEQ ID NO: 253936 - DNA, 246 bp, Gossypium hirsutum
cttcctctaattttttttttctaagtttgggtcacggaatgcccaaaaaagaaaaaacaccgaaagacgctacactagggtttctctgccggttttggtttttgtgattttttgaaattctctgcttcgtcggtgactgatttcagatatatttatttatcactccaaaaaaaagctcaaaggaaagtaggaaggttttgaggatagtgaaaaatgggtggtactgcttcatcggagattgatttc

SEQ ID NO: 253937 - DNA, 254 bp, Gossypium hirsutum
tagaagtggatgctctagaaaagattaaggatcaccaagccactagtgcagaggtggcgcccatggatattatgtctgcaaaaccaggtatggatcatccaccctacagatctagatagatagtcatggacagggattgaaatcgtgacatatttctaaaatatcgaggcaacgatccttgatatggacctgcatcctgatgaccaagaattgagctatctggaatgaagcatgatgactgagtaaatgtcaaa

SEQ ID NO: 253938 - DNA, 261 bp, Gossypium hirsutum
gtaaaaccaggttcaagatcactgatgaattaaaagctaagaggtcagatcgtgctgagttacttgctcaagtgagagccctgaatgttgattttgaacaatataaggagattttagacgagaaaaagaaggaaatagaaccactgcagcaggccttaggcaagcttcgcactaatagctataccggacgtggcagtatgtgttcatctgaggaagagctaaacgatgttatccatagcttgcaatatcgcattcagcatg

SEQ ID NO: 253939 - DNA, 446 bp, Gossypium hirsutum
atgaaacactagttagataaatattagcctaagcattaaagtcttggagcctcattagaaggctgccctcgagtgtgtgtatcatggggtcattatggagatggaactctgtgttttacataagtaaagtccttggtccaaggttcaagacagtgtagctttctgaccaatttcactaaagtgcaagtagtgtcatggtgaagaaagcaatggtaacaggcattctcagctgctgatgtgaaaattttctcttctccctggcctgtgtctactcataggaagcagttgcttccttttgtagcttggacaatttgtggctattatacctttatgttcttccacaggaccttatttgatagtcatgatagatgggttgagaaatcaccttaattaaatagttggtcattttatatgctcaattaactgtgccatctcattgtctctga

SEQ ID NO: 253940 - DNA, 219 bp, Gossypium hirsutum
  unsure (1)..(219): unsure at all n locations
nacccacgcgtacgagaggaatatttccatatgcgtaacaagtgaaagacaattctgataagcccaggatcataatgtcaaacactaagcgctccttatggcgcgttaattaaaaatatcataagatgaagtttatattcatcttgataatcattaccttataaaaaagtacgctgacttggtgggagaggtatcaaacctgtattacagagaaaagaa

SEQ ID NO: 253941 - DNA, 370 bp, Gossypium hirsutum
ggggctgcttgctggacttggtcctcgtgttggtcgcactggtccgtccgtggggattgttgtttcattttatgaagttgtcaagttcgctttacattacagacacgaagatcatgagtgaaagacttggatttgtgccacaactatggttgatttaatgattcaagtatagtcacccttaaaaaattccatcatgtcgcttcaaaccactttggcaaagcttttcagtggatacccatgctcatgactcaattgattccagaatctggaaatccaagcctgatctttccaatctttttttctttttttccataaggcaaacatattgttccaagttgaaccagatttatggaacttttttttttttttt

SEQ ID NO: 253942 - DNA, 304 bp, Gossypium hirsutum
gacgcctttgtcttgtctctctcacggttcctggaccaaatcaagctaccgaaggccaggctataaacagtacaccccgacgttgagtgttttattttttgattcaccgatcaaagctcttaacaatggcttccaccatcttcattcaaactccgtttcaatccaaatctttgaacaaatccttgaatacccattttgttccttcctttaaactccctgtttccctctctttcaaaccccggaccgctgccttctccaaacgcgtccatatccgagctggtttgatcgaaccggacggtgggaa

SEQ ID NO: 253943 - DNA, 107 bp, Gossypium hirsutum
accctcccgaaattggtaaaccggaccaacctttggaggcagcctttggtaagcttggggaatttaccaaaatgggccttaatgaccttttgccaaatgggcccttt

SEQ ID NO: 253944 - DNA, 363 bp, Gossypium hirsutum
gtaacaaatgagtcgaatgtcaccagctgaggggtgcaggatccaacaacagatgatgtctaatactgacttgatgagaatggcctcaaaaagcatgaagaacatgacgccaagaaacttgttacaagctgcagatacagttaaagcacactaggtctgatgatatggcggagattggtgagaaaatggccaatgcatcaactgaaaggatagctgcattgcgagcacggactgatgctcatatcagttattaattaagtgcaacttgagatgtctaagaattaagggaatgaggttcataaacaaagtaaatataataacgtctttgaaaaaatatatgcttgcaaataaaaacctgaaagg

SEQ ID NO: 253945 - DNA, 376 bp, Gossypium hirsutum
aaaaaaaaaaaaaaaaaaaaagggaaaaggaaaaagcaatgggaggtggaggtggtggtggtggtggtggtgagatagcagcggagacaaggaagaagaggaagaagggaaggccctctctcttagaacttcaaaaacgctctctcaaacaacaacaactgcaggagccgcagcaaccgcaattgcttcctcagaaaacccctaattcttctatcttttcgaaccgccgatccactcgccgccacccaaatctcaacggtgggtccccagtttccggatcgatttccggaggagaagacgacgacgacgacgaccgcctacagaagaagcataaaccattgcttggcttcaattcttctcgtactgatcagtatta

SEQ ID NO: 253946 - DNA, 382 bp, Gossypium hirsutum
gttgccagggttgtcaaggtgtgcgccatgtgggttatcattatccaacaaaaaacgcctcaagacacttccaggctaggtccatttgatcaggtgcatgcctgatgcgcctagccatgccttcttgtagggctataggcataattttctgatttttcattttatatatctctaatagtaagaaatttatccatctcaaactcaatatttgagcattcaacatcatggaccataaaggaataatgcatattgactaataaagaaatagcatgtttcatggataaactagacagcactttagagactgtatatcctaaactttattatgcagacacacatgactttcaaaaactcatacactttcatgaggggtgggctttgt

SEQ ID NO: 253947 - DNA, 163 bp, Gossypium hirsutum
gattggtattgggtaaattggcggtataaatcgaattggcatttgtaagtcaaatttgaggactgcaactggtgaacaaaccactgatttgggcctaacaaggcttaaacagtgttaggatcaggaaattgtaatccccgaactctcgtaaaccctttttttt

SEQ ID NO: 253948 - DNA, 236 bp, Gossypium hirsutum
attcattatttacgttaaggtgctctgggggggggcccttctttagtttgttgcttcttttctttagtttagtgtagttttaatattcgatcctctgtgctttttttagctttagttcattgatctatagctaaactttgaacctttttactgatgaagaaattgacttcattcccatgacgctattcttaatcggtcttcaggggttctgatgtttaggcattttgctacctgaa

SEQ ID NO: 253949 - DNA, 310 bp, Gossypium hirsutum
cggacgcgtgggaaaaacaaggatcgtcattaagcaaaatcttacacgatgggtgaagaaacacaatcaaagaccacttctggtcccttcaagaataaagcctttcagcttgctcaggacacattttctcctcctaaagtgacgaagggggttatggatgattttaatgcaactgtttcatggctggcgagtcaagaggaaacgccagagccccaggagatacagcaagtagctggacaagggatcttaacttgtttacaagatgccatacattgtcttgcgcaaaagcatgatgtgcagcatattactg

SEQ ID NO: 253950 - DNA, 245 bp, Gossypium hirsutum
agcaggagctatagatgcattgttggatcttgtaagatctcaccaatgtgaagaagcttccggaagactgcttgaagctttatttaacaatgtaagggtacgagagatgaaggtttctaagtatgccattgcacccttagcacagtatttgttagacccacagacaagatctgagtctgggaggctccttgcaactttagctcttggagacctctcccagcatgaaggacatgctagagcgagtg

SEQ ID NO: 253951 - DNA, 228 bp, Gossypium hirsutum
ccgaattccgggtcgccacgcgtcgcaactggcgctgcctggaactcacaaggggtgggtcacttagacccgcgaccgacctcattctattcaaaatgcgctaaggagtatcatgcacctcacctaccgaatcaactggacccatgcctgatggggcttaagcccgcgaactctacccgggcggcccggcacggtcctggcctccataactatcacgtcactggggtc

SEQ ID NO: 253952 - DNA, 185 bp, Gossypium hirsutum
aggaaactcactctctgagattctctgaggcgcggcacgctatgaataaccacaccaaaagaatttgcacgcccatgttcttatttattcagatacgccttgggcacctggtatcaccaccgttggtccatttcatctcatataacgtgcggcggcgatccgctggatcgaagatgccgggggct

SEQ ID NO: 253953 - DNA, 204 bp, Gossypium hirsutum
accacgcgtacgtgctcatctaagatcctacggagctcactctgaaactgtttagggagtttaagctttggtttctggagtcctcttgcataaacaaaggaagtctgaagcttgggagcttgtcgaacagcttgagctaggaacttcaaaaaacaaaaaagtcggaagccagattctgatttacactacggctaagcagaatgc

SEQ ID NO: 253954 - DNA, 247 bp, Gossypium hirsutum
agcacgctaacgggctcatttcagatcctacgaggctcactctgaaacggtttagggagtttaatcattgattcctgggtccctcttgcataaaccaaggtggtctgagccttgggggcgttgccgcccagcttgaccttggagctggaccaaacaaaaaagtcggtagccagtttcgtgtttacactacggctaggcagaatgcataggtgtacgaggctcatgcaagctagctcactcaattgaa

SEQ ID NO: 253955 - DNA, 309 bp, Gossypium hirsutum
cgagaagttggtgcacctcttttggagaagttaccttggataaacagttctactcagacaaaaacatggtatcaagaacaggcagtacttcgtgtcagcttggggaatttcccgttttttgctatactagctctaataatgattggtgtcaaggaccaaaatgacagacgtgattcatggcatcatggtggatggattgcaaagatggtgatctggattatgcttgtgatccttatgttcttccttcccaatgttgtcatcacagtctatgaaatactatcaaaatttggtgctggcgtgtttttattg

SEQ ID NO: 253956 - DNA, 359 bp, Gossypium hirsutum
cttttctaaaaggaatgaagaagggtctccattcctgagaagatttcaccgattagaaagtcctttcctccaaatggaaaagttaaaaatttcactatttctttagccaaaggtgcttttgctgataatttccatttttaacctgtcttctccccaaaaaaaaggtctttcctctgattctttgcctgagatatcaagttctttgtccgaaaaaacgttctttccgctggaaaatttcgaatcatgattccggtgaacgctctcccactcccgcgacggggcgctgtcaatcagctgtgcttcacggtcgaaggaaagcacatggaagaatttcactgtctgcattgctcgatctccac

SEQ ID NO: 253957 - DNA, 200 bp, Gossypium hirsutum
catgcattgtgcttatttagctttttggggtgccctctaatctatatttgttttcagtcctttgtggtggtgcattcaagaaaaaaaaaccagtgaaaaattaataactcaaagcggctatttgttattagatggaaattttcaaaacaactattgtaatcacaacatgtataatgctgtagaggttatgcaggcactac

SEQ ID NO: 253958 - DNA, 184 bp, Gossypium hirsutum
catgcgtccgcaccaaagtcttgctcgaactggaatcgctgcatatgtacggacgctgagcactgcaggcaatgctatctcacaagagaaggggctgctagtacaccctacattaacagaagctgctaatgctacactccccaacaactctttcattgctagatgggatatcatagctggaaac

SEQ ID NO: 253959 - DNA, 409 bp, Gossypium hirsutum
ctctagaattcctctagagggagaaaacaaattgatgtcgaatgatcaatcttttgtaaaaagattttccctctcacccttcccttaattcaaatctcttatcctttttctcattttcttttcgtttcattccattcccagttttcttgtttacatcccaaaattttctcgagaaaatattgtttttatgcttttttctctgttttaaatcccaagatctctgcaacccagttcttcttttcacctgattaatccaatttcccatctgggtatctttagttctattttttttccttgtgaagtttaatttttcttttgttttttttttttttggggggggggggacgggtaatttattaaattaatttcatggtccttctttcctatcccaatttttaaggatttaatc

SEQ ID NO: 253960 - DNA, 213 bp, Gossypium hirsutum
tttcatggtggattcaaagttttagccatcatcgagatctttcggtattcgctttcacggcaaggattggttaatgtcgggaagagattgtttcccgatgttccctcctctgaaaatggtgtttagttaatgatattcatttgacatttcattttgtttactgtccttatatccaaacttgttgtcgggatcttcggttggtactgttatctc

SEQ ID NO: 253961 - DNA, 321 bp, Gossypium hirsutum
cattaattatgtatttcataatagaggtagtttcgactgaaaccccaatttcaacaaacgacacttcctggtcactaaaatatataacaaaatgaagtctttattcaatactcaccaacatatatggagagatgttagaagtacacattccgagtatttccaatattagttatattttcagagggggattcatgcaccacactattcgttaccacaggggtagcggagctcactgtgacatctgcaaatggctcaacaccaataagaaatttcttagcttttgaatcaaaacaaacagttttctgatcaaccctaatgaca

SEQ ID NO: 253962 - DNA, 364 bp, Gossypium hirsutum
gattcattttggattacataacatatgacggcgggacagttaccctgattgcgacaatctacactaactgttcactaaaagatataacagaatgaagtctttagtcaatcctaaccaacatatatggagagaggttacacttacacattattagtattggcgatattatactatattggcagagggggatgcatgcaccagactattcgtatccacaggggtagcggagctcactgtgacatctgcgcatggctaccaccaattagagatttcttagctattgaagctgaacatacagatttctgatcaaccctaatgacactagctagagcgttcccagcgaccaaaattctcttggcacggg

SEQ ID NO: 253963 - DNA, 344 bp, Gossypium hirsutum
ccagcatctaccggacagggtttgcgaatcagtgcacgggtagctcgacaagatggtcaaatattttacagtttaatgtttgagagtatctcacagatcacacttgatggattcatgattcagatcaacacgatattcgtctggtctggcagctgatggacctcttcaggttcccccattggcaccgggagcagcagccaggacactgctccctatggtattgttccagaatatgtctcctggtcctcctagctcacttttgcacgttggtgtgaaaaataatcagcagcctgtctgttactttaatgatacaatcttgatgcatgtgctgctttccgagggat

SEQ ID NO: 253964 - DNA, 230 bp, Gossypium hirsutum
actcaatagcctgtacgccattatcattggcggctgttcatgtcaaaacatgaagtctgtccaaatgataacactttccaaaatatctatttatatttgctaccttaaccggctcatttcaccgtccacatgttcagaccgaatattgtggtcatcactattcaggaggatgtgcattgcgtttcaacgcctatccctccagaaacaatacatcccaatgattaatctat

SEQ ID NO: 253965 - DNA, 151 bp, Gossypium hirsutum
tcgacgattttctttagagtgttatatttgatcgttctctttcaaaatcaattcctaagcgagagtattatcccacctataaaatggctaattctaatgacctcaactttgacatgcaccatgtatcgagactattttatgaacaaacaaa

SEQ ID NO: 253966 - DNA, 270 bp, Gossypium hirsutum
gatcgggcggacaacccccgcagacgctatgatcaagaagctgacatgacatctgctgccgaggcaagcatggtgaaccctgctttctgcgtttcctgattccttgctctacttaaatactacgatgacgccgacgacctcaagcatttaagcgaggagatgcatggtgacactgacgggatatactttgacattggcgatgaccacaagggtcgtttctcgaaggggtctgatgcatatgagaacacaaaccacatggccgttgttgtt

SEQ ID NO: 253967 - DNA, 430 bp, Gossypium hirsutum
gcttgttccattagaaggagttagaagacaattccaaaaatacagcagaaagcaaatcgaccccatagagccatctgcaactgactctaaaactgcatcttccattgaggatgtagttgttggaccacagtctcttgaaattcaagagggtactgatggcatctctcttaaaccaattgccaacaccgataattgtgagtcagacacgggatctggaaagttgaccgataaaaacaatggtagtggagacaacaagagatggcatagtgtgccttctttaccttcatatgtaccatttggacagatctatctcttggagaattcgtcagtggaatcactctcaggtgcagagtactcaaaagtgacatcggtcagatctgtcattgttgaattaagagagagacttcaatctcattcaatgaagtcatat

SEQ ID NO: 253968 - DNA, 449 bp, Gossypium hirsutum
cccacgcgtccgatcaaatctttttcattttcagggttttgcctcgctcggactctctgctgccttcagtacgctttgggtttatggccgatttcgagggcaataatcgagaaacattggaagatgacttctgtctacttgaagattcagatttagagggggatgttgatgaacgtttttatgagcttccaattctctcacccaaggctaaagctaagattccggtggattacaataaagccctcaaatatgtagacaggaaggaagcagggttagaagatgtcttgagggaccatgctcttcatttactccctgcaaaaacactctttaggttcaaaactgtttccagaagatgggatcactggataagcagcccgctgtttgcccaccggcaaactacttacttcaaaaacgtatctggtctcttttgtcaagttgctgatcacagt

SEQ ID NO: 253969 - DNA, 204 bp, Gossypium hirsutum
tcttttttcttaaaaacccttttgactctactgtcctcaattatgataatgagaatgataatgataaggaattttctctactttatggataaaatatgcggaagctgctataatggatacgttatggacatggactttaacattaacgtgaacactgtgctttataaacttatattttaagtctttttttgattatacattcta

SEQ ID NO: 253970 - DNA, 427 bp, Gossypium hirsutum
ccctttagtttgggttttggcctcaaccttggagcgccaccgcaccaccatcggacttggtggccgactacgcgcagaagggacacgatgagaggctggaggtaagtattattctccctttcattctcttttgaaactgattttcttttttgatttctttttcgtgtttgataccatatttttttcccctttctccctttggagttcgaaatcgacgagggagggaggagttccagcgacgtgattcggtaaatccctttcctctccctttttatttttcgtatttatgtaaaaaacaaaaataaaaaaaataaacttaagattaaataaataatacgaaaatcactttaaaactttaaatcttttgcttttctattcccaattttcggaagaaaaaccagagagcccctctttatacaatcgattt

SEQ ID NO: 253971 - DNA, 456 bp, Gossypium hirsutum
  unsure (1)..(456): unsure at all n locations
aaaaaaactgagagctccttttaggccctctctcgttctcctttcctcctacctgggcaccagcgagctcgcgcggtggctctgccgtagctccgccgtggctccgccgtgccggagagcaataaaagtttttaaaagatacctttttaaaagcttccaaaaaaaggttttgtttcaaaaaaaaaagagcaaaagaaaaaggcaaatcgcaagtaaaacgaccttcctattcgtcgcactcccctaaccctcgtcgaaacccgaatgggttttgtgacatttgggttactagaggttcccaatcgcgtcggtggatgaaccgaaggtgaggtttttattactgttaatgcacttcatttcgaatcaaaacaganaagaaaaaaaaataaaaataaaagaggcacctttgagagtatttgatttctctggttttttgggaatctgttttcttttttt

SEQ ID NO: 253972 - DNA, 156 bp, Gossypium hirsutum
gaggtttttaattgatgtcctaaaatttaatgaactggttttcacttcccagttcatgtttctcaatcttgaatttaataaccaatccctgagttgtttgtccctaaaacctaaaccccaacttgaaagaaagaaatgaggaaagaggcagaaaag

SEQ ID NO: 253973 - DNA, 442 bp, Gossypium hirsutum
cagagattgaaacagtgtttatctgtttttttcgagcattatgcttctctctcagaaaatcacaagaagtgtttgtctaaggctttcattcctgtcatgcgttctatgtggcctggaatagatgacaatcctggtggttcttcttatacggtctccaacatgcgtaagcatgccatacaagcttcaagattcatgctacagatgatgcaaactcccctatatgcaaaggggactgaagcagaggatgataatggttgtaatggatcaccagaaatcatagatggcccttcacagccttcagtagaatgcggagaagagggacttgcaattcgcatagccacagaggtgttgaggtttccagcaaagaagacacctgcagagaggtcatatgttgcggctctttgcagaatacttgcctctctccatttctgtttatcagaac

SEQ ID NO: 253974 - DNA, 453 bp, Gossypium hirsutum
gttgagattaatggatatgaagagtatagtggtatggagtatcggtctgctggatgtacagaggaatacaatgtcatgcagagagatcttgagcatgcaggagaagaggaatccgttctgttagaaggtgatattggtggcggtttggttcttcagcggcagataaccgttccgaaagataatccaaaagttttgcgcattgaatccagtattttagctcgcaaagttggtgctggatctggcggattttcaaggctggtttgcttgagagttcatccaactttctctctcttgcacccaacagaaacttttgtggcatttacctctgttgatggcactaagcaggaagtttggcctgaaactggagaaaaagtttaccaagggaatcttttgcctaacggtgaatggaagctcgttgacaaatgtctcggtttagtgctcatcaatcgattt

SEQ ID NO: 253975 - DNA, 388 bp, Gossypium hirsutum
ttttgctttctcttgctctgcttttgcatctttcttgttttgatcatctcataccataacttgcatatttttactgctcagggagtcaaattaagatcatctttcatacccagatctctatttttaaggttttggaagggaattggagttggctatggagaataaccagcaatctttttggcattatagtgatcaacttaggatccaaaattccaatctgtctaaagtatttattacctattgtatatggagcatcagatatgtctctataatgcctgatgaaaggaggaattttgatatctgaatctgtggtgaagttaattctggtatcaactttaaacccaaaggcttttattttaatcctttcaacaatgatggtaggaaaatt

SEQ ID NO: 253976 - DNA, 424 bp, Gossypium hirsutum
caatactaaacgtacgtcaatgatcattccactattattagtgtccaaagagttgtataaaaaccagatgcatggatgcatgaacttaagacattggcttatagaaaattttgcatgccaacatttggacagtttaagataaggtagaattgaaacctgtgccaatacttaatagctcatccaatacagactagggctcacgttggctgaagcttttgcattgatttcacgataaaaacagcacaatttctggctcaaaaacttggtccacgaaggggaggaatggattgtgaggaagtttcgctttttgctttctacaagttctggtaggatttaatcacccaatttaaatggttcctagaacagttaagaccataaggaatctgaatcaaaacatgattttttttcccccacaagccttttg

SEQ ID NO: 253977 - DNA, 445 bp, Gossypium hirsutum
gccagcagtagaatcaaaaaagagacccgacaaaagcgggtcaagtaatccaggaaacatttaccgagtttttagattctttatttgtttcatttaactcagtgactcactcgtcaccctacactcttttctttttccacatccaacgctttctttctctctctaccattgaagttctttcttactcagatccaggtgacatattgttttaattagggttgtgaaagtgtggatggtacaacaactcagtgtgcagttatcagccagtctcatcccttaattattaaagtgggggcactaggaagtttcccatagcatttgccagagatatttctacaattggaatttagaaggtttagaaatcaggagtgagcaatggaagaaatacagtctcaatcggacaattataggtcttcttcctcctcagccagtagtcctgcaagta

SEQ ID NO: 253978 - DNA, 332 bp, Gossypium hirsutum
tcggcccaacatactgttaaagaaaaaagctctcacaggatacagctccaatggctacttgtaccaccacaccttcatcatcgttgatgataacatacgccgccgcatctactgtacacgcccaagcccttacttgttccgttctatccttcaagtctaacatgcctaccttttgtattagcctacttgcttctcaagatttctatagacagttaatctcacatcaattgttctaatttatgtccctatagagatttcatgcaccttgtgtaggctgtcttttcttgtttaagctgaggtggctgttgttactctactataatgatggtgtg

SEQ ID NO: 253979 - DNA, 449 bp, Gossypium hirsutum
aaaatagagagaaaccctagaagtttgaatttgtggagacaatatgatactgaggactccaccacccaagaagcaaagagccgaacccatacttcacgagagtccgtctccgcaagtagcttccgagggacgtctcgtcatctatgaggacaatcctctggcggtgcctccgccggagtcgcctcaccagccctctgatcacctcctctgcacttatcaatgccgtcagatggttaaagcagattttatagatgccttgagcaatgcggagaagcaaattcgtgattatcagtccaaactagagattttaaatgaaaacctttctaaagccgaagcagaaaggaaaaagtttagggatcaattcctttatgcagaacaagagctagctgctgcaaaaggacgtgaacagatgctgcatgaccagctcttgaaggaagtcaatgattcac

SEQ ID NO: 253980 - DNA, 440 bp, Gossypium hirsutum
gtccaagtttcatttttgttttttcgttaggcttatattcttcaactgttcaactttgatcgaatactttgttttgttttgtttttcatgtaataaatctgccctcgttgctctatagctcccaaagtttgatttttttttctccttgtttgttttcatgaattactgtgtctcttcttcactgtctcttagtataccacaaatctaaaatctatttttttaaaattatttgatgcaagacttgaagtgggtatttgaagaaaccaccattgttgctcaagtgaagctgcttttatagtagttgaggttatctgctccagtgcagcagcacccaaatatctgcaatgagaaagaagttagcttcagtgcttcttttgtctcttgttacaagggtttttagcaccactgactcttgtgaccttgatgttttaatgcaattc

SEQ ID NO: 253981 - DNA, 299 bp, Gossypium hirsutum
aaatatattagtgttgcaagtttttagtgaatagcaccctaagtaatcttcttgcttgttcaaatgcaatctctaatctcagcatagtaaatctgatctcctcagcgattcatacaacgctcttaactgatacctgttatttttatcccctgatttaatcaacttataaggttttattatttactatatgtagaaacttatttctgtttgtggatactatgcatatgtcttcatttaattgtgtctaactttttatatcttttatcttatcacttattgttcattgtatttttctttat

SEQ ID NO: 253982 - DNA, 415 bp, Gossypium hirsutum
gtggtggtgagatattgaatatcgcacatttgagtagtattgattgatcgagtagttgaatgatgaggagctggaaagtgttgagtgcatccaggtgcttgagagcacgagggcaactaacgttgcggcaagatgcacttgaccataatcccctctttttttccggcgctttgcattttaaccgtgttccaaccccaacaggcggcggtagcagctctttttttgggaaaagtcccactttcatcacctgcaaccctagaaatgcatgctcatggaatctcgtcaaaagatatactaatgttaacgcctgcgttaacaattcttccttcttccccctgtccacgccctgccagcagccggattcgatactaaatgggcgcttatcattctcatcttcaaccttaagtaacaatga

SEQ ID NO: 253983 - DNA, 440 bp, Gossypium hirsutum
attgcaaatgtatgttttaaacacaccaaaacagattatgccaaatgagtagcctgtcaaaggctggagggcaggaggagggcctgggtttgggttccttcctcccggcctttgtacggtgccttgggcccctcagccccagcgccagggcctcccagctgaggccacaggacaagcacttatttatgatgtactaaaagaagccacagtatgtggcaactgcaaaaggatcaggaatttagggtgtgatctcagacacgtgtcctgggtgctgaggggaaaggaagcgggcacagtgattgtagacaatgagggggtttctcttgatgtaatgaaatgcaattttatggtttggtgcaaaaactcctattttccagtaaattaactttatttctaaagcatattttgatttaccatcaagagcaataaagcattaaatc

SEQ ID NO: 253984 - DNA, 414 bp, Gossypium hirsutum
gagaaccttctggtggcagagatatacaaccaccgaattatacgttatcttgaagagctttctgattcgttatccttgattagagacgatgacacgctggttgcttatcgattaaataaagacattgagaaagctcctttagttgtgtttatgcatcagcagatggaggagcagtatatgcttgggaaactgacttcaagttggaaaacatttggaattcctcttgtagcaaggctttctaatgttgtcactgggtctgacatccatggtctatatctcaaattactaaattcatttcagacacaggctgaagatgtcttagaagacaatgatacctctgagagtactgcagttgaagccatttctctgaaagagcatgatgcatcattctcgacttcaaacggcattgaaaag

SEQ ID NO: 253985 - DNA, 418 bp, Gossypium hirsutum
atcgatttttgcacaattgatcaactcttcttcgatctactcctcaaattccaccaaaaactcctgggtttattgaattttttttaatattttcttatataggttttttgtttttttttctctttcaatcgtgattcattgattgatttggcaattctgggatttacccatttcatattattgtgaaatattggtggggttttgattttctcctcgtgatcttcttgtttgcatttatttgctttgattatgaacgaatgttcaaatttatcatcttttttttttatagcttttttttcctttgctggattatactttccttgtgttgtctgtaatgaatttggcatattttcttattgattatgattattatttttaataataactattattttatggtgtatgctcataatctttt

SEQ ID NO: 253986 - DNA, 423 bp, Gossypium hirsutum
cccacgcgtccgcatctttgtactagttcttgtaaagttcattcatttatgatattatcatcaaatttagaatctgggtttcttgtattttctcattttttttaggttgtttttaccttagtttgatcttagtaaagcattggtctttatctaggatctggttttttaaaaattcaatctttttttgtttgtcttacagaagagtagattttgatccttgggggggacttttgaaagagaagaggtaaacaatttagtccctgtgagattccatggctgatgcattggatttggtccttttttactttaacatcctcttagttctataaagccgccaacattatattttgttttccttggtcaaagcaacttggttcaggtctaggttagcttagaatttgggggtgtttttagggttggaac

SEQ ID NO: 253987 - DNA, 386 bp, Gossypium hirsutum
tttttcatttttttcttctatgttattagttaaaagttgttaactttatcctcaaaatcttgaagtagctgaatattgagtgttgtttgaacttggaacttttgctctcaagctatttctttgggcgatttttggaatttggtcttggcattacttgacctttaatattttgtgatcttttgatttgggttttaactgcaaagtgaacttggtttctactattactttgggggcttcctgtttgatgccaattgttttgtttccaaagttttgatgctaagatgcagcctgatcagagaagaaagtcagctgcggatgtagattttttcactgaatatggtgagggaagcaggtatagaatagaggaagtaattggaaaaggaagc

SEQ ID NO: 253988 - DNA, 410 bp, Gossypium hirsutum
cccacgcgtccgaaaagacccaagcggttcctccgtttggtgatggttaatgcttttatccgcgttaccgatagggagaagaagaagaagcaaaagggaaggcaaaattcaaatcgagatttcagcttggacttaaccgtcgttttcccgtacatcgccattttcatgctatttttctcaaccggcgacggcattgaaggtttacggaaatggatcttattcgcggaagctagcggcggcggcggcggcggcggcggcggtggcttctggtcttattactctgtggtttcgccttctggcatagccatcgccgtcactgccatggccggaatccgctctcgctgctaccatcgtttattctcgaaggggtagcctgaaatcaccctgcgcccctagaaaagaaaaatgcc

SEQ ID NO: 253989 - DNA, 290 bp, Gossypium hirsutum
ccttgggcttcattttcaaaagggtggttgcaaaaatggtatctacagttcagagcataggctttggaatctatttatgttacagtgttttcttatttggccttggttccggttatgcttgacccaaacgacctgaacttgatccgatttcattaattccaaggccacccacggggggggtttcacaagaatcaggctatatgaacaggaaggaaatacatgggccagctgtactttactgggtcactgaagctactaacaggtctgagaagaaacctcttgttttttgg

SEQ ID NO: 253990 - DNA, 196 bp, Gossypium hirsutum
tatctaatgattcaatgttgtttgaggagcaagtagagtcaaatgcctcataactcggtattccaccgtcagttgtcaccacaagaacgaatgtgatcttcgtcactacaacttcgcaatgtatagtataacataccttttaaattctgcccatgcttttttcacaaaacatgccaaaagttacccatgaaatgaa

SEQ ID NO: 253991 - DNA, 277 bp, Gossypium hirsutum
gttaaagattcaaaccccaagcttgtcgtcaccgtccctgaattgtttgacaaagtcaaggatttcaaccttcccgtcatcttgcttggtcctaaacgaaaccgacaaccgttcgacgttaaaaatgtcccaaagatcctgtcttttcacgatcttctcgatttagctggtgatgtaaaagagtttcctcgtgtttctgtcaaacaaaccgatacggcagctcttttgtactcttcaagcacgacggggatcagtaaaggtgtcgttttgacacatg

SEQ ID NO: 253992 - DNA, 425 bp, Gossypium hirsutum
cttgcaactcctgcttgagtttgcagatgcccggttgcgttggaaaaaaacaactgtaagatttcatctttttgagaaaaaaatatgggatcctgaacttcaagtgtttttcatttcgattgcatggtttatatactgatgcttctaatttgggttacttagctttactttgtcgttcatttctgaattctgattagaagttggctagttctttatggtaatcagtgtacatttcggaaaagatagctgagatgttgggtaattttgaggttgaacagtgttcatttagcaagttgagacaatttcatgaaagggttttgagttttagtgacagatttgtaaagattcactgtaagcattgtgtttctgaatcaatcagtgcacttattgttattggtttatttttatcgttccttttagcaatg

SEQ ID NO: 253993 - DNA, 268 bp, Gossypium hirsutum
gcttccccacctttttatccatcggggtcttgcaacaaagacactgctttaactcagaagaaagatgtgcatgctgaaagtgtgagcaggaatctttgcccttctgttacggatgagaatttttctgcttcacaatctagttcattacgagggaagaacgtgcttgattctctcagcatggcaaagctttatattgatgatcccagcatgtcagcttctgcgaagcctttgaccaatgtgcagatggtacctttctggatcttcattg

SEQ ID NO: 253994 - DNA, 374 bp, Gossypium hirsutum
cctttatacgcacatctaaggtgatatccgatttataaggagagctttcatcaataataaatctgctttcaacacaagcaacattaattcatggtttggctgagggggttcatatagattcattgtctcccatagtttctgaaggtcctaatgctaatagtttgttaaatattgaagatatagaaccctcagatctcgagaaatggtcagcagaattccctgatcacctggatgttttgttagctgagaagagagtagatgaagctctagcagcccttgatgaaagagagcaggcacctgctgaagcaaaggaaacaaattcattgagtcctgcagcacttacatatttacagactgctatcgtagagcggaag

SEQ ID NO: 253995 - DNA, 246 bp, Gossypium hirsutum
cccacgcgtccgttgacgcatgaacgtacgcgggggacggccatgattgatatgaatggagtgtatcgctaagcctgtccacataaatttaaaacgtacacttggcggacggcatatgcatatcagcggccatattatatgcaaggtctacactaattgagtggtgcgctggcacaaggatatacctctcataatgactcttacgatgctcccatttttactggctgacgtgacatatgtgcaaga

SEQ ID NO: 253996 - DNA, 373 bp, Gossypium hirsutum
cccacgcgtccggaagaatgaagatgagcaaccaaaagatgacaagtgaagatgtgctgaagaagggccagagactttaaattatggtatcaatcctaatctaccttcctattgctataatggttgatgtgtttgtcgatttttaactcggtaaagagttatgttacttcacacacacacctacacacaaaacaggcacttgaaatagacgagtttgttaaaacctttgcagtggactcggttgaacattttcctttttttttttttctggtctaaagcactcgaaagatcgagtgtaggattaatatgttgacattcatgtctctattttcatttcattcaaagcggggaaaagaaaacggatgtgttggtg

SEQ ID NO: 253997 - DNA, 293 bp, Gossypium hirsutum
ctttctccatttctctctgaaaaaggtttgagagtggccataaggggttcaatggctcacagtcgtagccccgtcatggctccgccgtgaaccgcgattgagggtgcacggatccggctcccttctaggacctttccaaaccttttcccctttaaaaatctaaaaagaaaactagatctaggggatgtaaaacagttttaagagaaaaagatgtaaatcatggaagaagcgccttcgttttcgtggcttctctgaccctcgtcagaacccgaacagggttcatgacgtttggg

SEQ ID NO: 253998 - DNA, 196 bp, Gossypium hirsutum
ctctctcgattgctggctggattaaggaagtcagcagtcgtaaaggaagtaaagcttcacactcttgcccaatatactgaatgctttagaaccgctgaatgaagcgaactttatccacgtgcatgttaatatctcttcaaaagaatacattgtttaaggactcttgagagaaaaccgaatataagggatgtccacc

SEQ ID NO: 253999 - DNA, 368 bp, Gossypium hirsutum
cggacgcgtgggtttccttttgtgccccaaaatttctaaagttgaaaacaaaagcaagcaattatgaaatcaacacaaatgaatggttcatatccaaatgagtcaaaggccggtcagactgtagttatcggttcaagtgggttcataggtcggttcattaccgaggcctgtctagactcaagccggccaacgtatatcttaatccgctctagttcaaactcttccttcaaagctttcaccattaagtttcttcaagacaaaggagccatcggtatatatggttctatcaccgaccaagaattcatggagaaagttctgagagaatataagatagaagttgttatatctgctgtaagaggggagagcat

SEQ ID NO: 254000 - DNA, 231 bp, Gossypium hirsutum
cccacgcgtacgaaatagattccatgaccactctatttcacttattcaaagaatcattccagttttctgctgtgagtgctgatcgtatgagctctaatggaccatgtggctccttcacgcacaccgctcattgacgtggctctgagcgagctttgaagtcttaacagagctgtaatagccgaatgtatgagacctatgctttccgtagacagcgccatactcaccgctggg

SEQ ID NO: 254001 - DNA, 390 bp, Gossypium hirsutum
gctcctttatggccgccaccatggatgatagccgtttcaaagacgccacctgctaatatgcttgcttctattactttcgatattgaggtcttagagccgggacccttaagtcatgctgctccactaacaatcctagcgatggccttatccgacgactcagcgtcttccatctgatcctactcggagtgggcggacatatcggtgccggcttattcgttgagaccggaaccgtcgctcgtgatgccggtccaggagtgacatattagtggcatactagcgggagcatcatgtgagctgaacgcattgtgctacgcccagttagctacacgggttccctgcgtagtcagaggcgcgtacttgtacacgtacacggtcttcaatgaaataacg

SEQ ID NO: 254002 - DNA, 179 bp, Gossypium hirsutum
aagaaaaaaacatgaaaaaaaaaaaaaaaaaaaaaaaaatctaaaatattaaaactacaccaagcgcagactacttacgtgtatgaggactaggggtggccctgttggccgctgcaggctatttttgggggaagacagtcaccgaagatgactgcggtgtctccggacttctatgggct

SEQ ID NO: 254003 - DNA, 401 bp, Gossypium hirsutum
gttgatttcaagtctttttaaaaatatctttctaaacaaaaccatttttattttttaatttaaaaacaaggtgctgcaaattggatttgcgaaacctggatctccaaaccttttgtttagtttcaaatcctgatccttccgttcaagattctgtcattcaatgtcgcacaaggctctcccgccattcagtagatgcttgcgccttccagctccattcgtggagacctttccacctccagcaagctctagactcctccgatccccaacttactcctcctaagctttcctcctccaatggcttccatcccaagcgtccttgcctctccgatcgtaccacttctttttctattgatctctccaagctaaccctcctcgacgatgataacaacaacaaccctata

SEQ ID NO: 254004 - DNA, 357 bp, Gossypium hirsutum
ccgacccatggcatccatctccaacgctttctccctttccctcccttgcaaccgcattgccaactcctcatctgacttcaaccccatcacctccggcctttccggtttggataccggtgagttcagaccgggacgagttgctgtgtctaaaccgagtggaatcagggggaggatttgcagccaatgcaactcccgtgatggatcaaccagtcggtgaaaagagctccagagctaccactattgtcgaggtggattggagaaatcggagctacccaatctacattgggtccggattgtttgatcaacccgaactacttcaaaagtgactttattcactaagattagtgtttagatttt

SEQ ID NO: 254005 - DNA, 335 bp, Gossypium hirsutum
atcaaaaatctttgtttattaaaaaacactggttcaggctgtatattactgacgcataaacggatggctgtgaggaccatattactagttcacttgatgaatgctgtttcttatatggggaatgctggaccacaaacatgcactgtagatgattagagaaaatggggtgaagatggataatgggaagggtgattattggatgtagtttgcaagagtaactatgtaggaacttctagcaagaatacacttacatacaaggggtacaacgcataagaagcgtaattagggacgaaaatgtatgacaggctgagatttaaaggagcatatcggcatac

SEQ ID NO: 254006 - DNA, 161 bp, Gossypium hirsutum
aacttactaggtgtctttcttctcgcgactgacagcttacatacacctgtaacagccacatagaactcgactgattgattgggacaaagcggcgcgatggaacgtgcatatgctcacgcattgtgtaatctgccgagcgctctataggtgctagtgatgaa

SEQ ID NO: 254007 - DNA, 193 bp, Gossypium hirsutum
gtgtcgactgcactgaccagtttttctgcttggagggactactatacccatgccggccttaggtgcacgttaggctctgaaacatcacgcgccccagacgaccgtatgcaagcatcgcacagtgtgatgccatccgcagggctccatgaaacctcgtacaactctatcataaggagagaagtccataacagga

SEQ ID NO: 254008 - DNA, 364 bp, Gossypium hirsutum
cctttatttaatgaacttctttttacttttgtttttcccgttgcctttgtatgaatcttccttgcaattctttggtttatgtattgctattattgggcctttagagtaatcaatatcgatttatgccttatttctcattcatatgtaataatttatgaagtgcggtggcagtggaggtagagatggtaaaaggctttgaaattgggtgttagaatcgtctattgagaaacagattttaagctatcagtttggggaaataaaattggacatatgcatttcgagattctcgtgagatacatccccacggttaaatgcttcgcagattttaacatctataaattgttatcatctcttgtcctgaaaa

SEQ ID NO: 254009 - DNA, 425 bp, Gossypium hirsutum
catatctaaacccccatcctgttatttttcaccgccaaaagaagtcactatgaggaaacgcacactttacgtatggggagtcgccattctatgtttcgtagtgttgatgatcgtcactcccgctatccctcagtctcaagagtaccacaatttctctgatcaacgccaattcttaggtatacccaatacgttaaatgtcatttctaattttaccttcttagtgattggtgttataggtcttgtactgtgtttgtataataataatttcatgttcaattggcaaggtgaactatggggatggacttgttttttcattggtgtggctgatgtttgggatggctcctcatactataatcttgacccaaatgattcccggcttgtgtgggatatattgccgatgacaattgcattcacatcaatcatgg

SEQ ID NO: 254010 - DNA, 371 bp, Gossypium hirsutum
agaaaatgtaactggagtttgactgtcgcaggatgtaacttgaattaggaacatttaaaaaaaaaaaaagaatcaggcaagctcatgtttgaaagtcagacggcaatcgcttcttctcacagtcctcaccttcggaaacctggctccaaatctgtttcttctgacctaggggctggtgaacctggaaatagtgttcaagagggttacgtgtttcctttgacggtaggtgaaatgaaggcttctaattcacccatgcacaccacatccataatgccttctcccatctttctatggagatttaaggttatatggtttctgatatgggccttcacttgttgcaagattggatgggattcagtcatgagaatgag

SEQ ID NO: 254011 - DNA, 162 bp, Gossypium hirsutum
ctcttcgccggttcattccgaacaaaatagtcaacgatcgttaattaggccgagaatccttctacgctgaggaaagatggtatgcatagtaccgtactactgttagggcagacattgctaaaaatttaacctgatatatcagagctccgaagctactcatca

SEQ ID NO: 254012 - DNA, 385 bp, Gossypium hirsutum
aattcctttaacagaagaaatggcgtgtacgagcatggcagcaatttctttaaatttccaacattttcgaaatcatagggtctctttcagtagctgttgctgcttcaacagaaaaatcaagttacatgaaaaccaacaaattcttagtcgcaagtacaggaggaagccaatatctgcacttgcctcgggtttggaggcatctatttcagatgcagatgacaaattgatagccttgaaagaagctaagatcgttgttgaatctaaagacgaaaacaagatccagcttcgagtggatgttactggaattgagacacaaaaggtatttaacaaggttttgacggatttggctcgtcaagcgccaacaattcctggttttcgtagagag

SEQ ID NO: 254013 - DNA, 415 bp, Gossypium hirsutum
tgattattgaatttctttgggggggttgtttttggaagttatcggaatttgaagattctgttaggttagttttttgtttgcaacataaaaaagaaaaagaagttgttgttgtcggtgcaaatcaacctgcattgatggaatttggaaggagcggagcggtgtcctattgacggtgtatatgaggagagtggagattgaggttgttactggaaatgtgcaatgttgaagggatagggaaaaagggaggtatgagaatcggggtaataaaaggcggcggacgcggagcaagctgatgagagagagtggataagttgaaaaagagttcgagaatgaaggtcttgatcatacgcgccaccacatcggtgttgctgcggacttgcatagcacagttaacgaccttgggggagacatgggg

SEQ ID NO: 254014 - DNA, 424 bp, Gossypium hirsutum
cagatttcattggccgtctacctggtgcttattcggttaaccagaagctaaattctgcggttaagaacaatttaagtgcaggttcctccttgactggtactggtgataggcaaagttcaaatagagcaggaaatcaagggtctgacctcctttctccacttgtagatcctcgttttatccaatacttacaaagaacttcttatgggacaactgcggctagtcctgattctttgcttgctgggaaccatggtggtactttgcatggggatttggatggccttcaaaaggcatacattgaggcaatactagctcagcagaagcagcagtatgaattgtcgcttttaggtaaagctggtggtctaaatcagggctattatgggaattcttcatatggtcttggcatgccatatgctggaaacccact

SEQ ID NO: 254015 - DNA, 337 bp, Gossypium hirsutum
ggataacagatttacctccgccgctaaggctgattggcggagagatttgggtcctcttcccaacaaaatcctaatacagagattagttgtttctttttcttaattgaattgaatcagtaataatagatggggaatttattggcaaagaaacccaagatcaccgaagtcgatcgagcaattctctcgctcaagactcagagacgcaagcttggtcaataccagcaacagctggaggctgtaatagaagcagaaaagcaagctgctagagacttgattcgtgaaaagaggaaggatagagctttgttagctttgaagaagaagaaagctcaagaagaac

SEQ ID NO: 254016 - DNA, 420 bp, Gossypium hirsutum
caaattttgacattaaaaaaatgagaaactttgacaggaaaagtacgaagaacctaacaatggcgtaagtcttaaataattacagttgtctgtattatgttatgctcctaattgtttttattaacattttattattcttagaaaaagaagaatagccattagaaaactttgcactaaaggaaacatagggtgtctatctcaatcaaaaaactgaaattttatattaaaaaaagattcccaactttggatatgatgttcacgttcacctattattttatatgaatttaatctataaattacattaggaatcagtataaacatttttaataatacatatttaaatttaagttaaaattttaaaaaataatttttaaaatttaaaattcttagttccgtcattaaaaattgaaggattttttt

SEQ ID NO: 254017 - DNA, 410 bp, Gossypium hirsutum
cacgcgtgcgattttcacactaataccaatctaccttctctgcgtcctttggacacattcaacataccgaagttcttttctgaaagacccatgttcgatttgcttgttagtagaaaaaaggatccatcaaagcaaacataatagaaccttaaacgaagcgtgcaataaagattgcatttggtgatatgaagattactttgatgtgggtatcatggacatgaatgtttggtttatttacttcttggatagccaccgacattggagtgcaagccatttcttgggctcatattgttatcatcaccttcattagtttacgtttcattgacatcattaatattatgggaggatttattgggggggctagctttaaacctaatggaactgcttccttctatgctgccggggtcggt

SEQ ID NO: 254018 - DNA, 398 bp, Gossypium hirsutum
  unsure (1)..(398): unsure at all n locations
caaggattctcctggtacaagagattcttatggagaaccccttgtgacaagttacaacaggcgcttctcgggcacggttgattacatatggcgttctgaaggtcttcagactgtcagggtgcttgctccaattccaaaacatgctatgcaatcgactccagggtttccaacaaagaaatggggtagtgatcatattgcattggcagcagagttggcattcacaaaaagcttgaccaatcaagaccccaagagttaagtggctagaaaggggttttttttatggtggttacttgcggggttttctaatctcacttgttgtattattgctgntatatgtcgatctgttttaccgactacaattagatattttaattcatcaggtactaattggggatgag

SEQ ID NO: 254019 - DNA, 390 bp, Gossypium hirsutum
agtatttattctattaaagtctatactctatccttgttttagaactgaattgtgcttatgggacaaccctggttatttatactggatcgaattgaggatggagcttaaagcacacacatacgttaagtccaataatctactgtgcagccacgatagataaacaaattcccgaaaaagcgttggaagatcacagactgaaacacaggaaatccagctctttaaaggcagcccaaacatacgttgctctatgtcccaataatcaatcatatttatactactgtatccatagaaaccaaaaccaaaatgttctaattgaaagaaattgaatgtaatagctcatccatgggaagagagtgaagagaaaacattaaagctgaaaactatacttgt

SEQ ID NO: 254020 - DNA, 179 bp, Gossypium hirsutum
tactgatgtatacatcacacttgctagtattcctacttggagcgtagactttgaccacttgcatattgattacctatgactcaccgagtattggtaaacccggtattaccatattgatgcatatgaacgtgatgccaccactatatgaaccttttggcacccataggtgaaccgatcaa

SEQ ID NO: 254021 - DNA, 420 bp, Gossypium hirsutum
ggaaaaacccaaagaaagtaaagcaattgcagacggagtttgtgaaatttgtatcttgtggggcacattgcacagctgctattgcagaacctcgtgaaaatgatgggactatctcaaaaaggagactctggatttggggacaaaatcagggatcaaatttacctcgtttattttggggtgcattcactcctaacatggtatcgtcttgaattcctgatgtcttcaccccaagagacgttgctgttattgttttgttgctctttgtttttgaacctttctttaattcttcaaggtcctgtttatgaagtttgaggcttttatttatttaaaatttacgattcctgtcacggactatgaaaaggaaacttcatgctaatcacttttagacattttggttctctgggaccagtttttattcag

SEQ ID NO: 254022 - DNA, 286 bp, Gossypium hirsutum
atcattcgtctctctcaccttaagcattgctcaaagcttacttggaactttgttcgccggtagaccaccaaccaatagtggtaaagggttggtcaggcctcagcttattcttgaaggataagccattgagatgaacccgacgcagaagaataacccctttggaggcctttttagaggtattatggatcagatctctctcctgagcggtgctaaaaagagataggtgcgggcatttgacggccgtgatgtaacttgctactggcgaaagtatgttgctgtaactatg

SEQ ID NO: 254023 - DNA, 331 bp, Gossypium hirsutum
atacaagatcgtagcctcagcgaatcacaaaaacagctaggacaatctttctttcgctgtgcgtgcatgtgcacacgtgctctgaaagtactgcatgtgtgacgtatttgcagaatgttctgcccttcgcgatatgggaaaatcaccgggaaaatggattaaggctgtgctttttggaaagaaatcttccaaaactggttatcataaatgaacggagaatgttgccaacgtgaatgaggtgctggtttcatgccaggcatcagacgctgaagtccgtgtggctcctcctttcacttcacagcttaatcaatatgcttatgagagaattgag

SEQ ID NO: 254024 - DNA, 303 bp, Gossypium hirsutum
atactgtatttattattatttgtgttttataaaacattttattatctatgactagataaactcaggccggccaacgtaatattattacgcaaaatttaaaactatacatacaaagctatcatcattaagtacataaaaacaaaagaaccatggtatatatggttctaaaagagaacaaaaataaacggaaaaagttttgagagaacaataagatagaagcttgtaaatacagctgaatgaaagaaaaccatcctgaaccatctaagtctaatagaggctattaagaatgtaaacactgagaaa

SEQ ID NO: 254025 - DNA, 367 bp, Gossypium hirsutum
aaaggaacaaatctcgagggaaaaaaaaaaaaacagaatgtaaaataatatggagacacagattattaagtagctcagaaaaggattctaaaaaattaatggaaaaatgatcaatctattcgattagaatatgcggtcaacaaaacataaggtgaagggttctgaatacgtggatattttaatttgaatagagatataattccgtacaaagctttcttgttttctttttgatttttactgaattctgcgatctttatataatggatcacttcctctgttatgtaaacgttgattggcgtcacaccaccaggtatgatatgtggttaaggctaaatggaaggggctttattgaaatactgattggttg

SEQ ID NO: 254026 - DNA, 183 bp, Gossypium hirsutum
cttaaacgatcaaggaccagttggttcatagcataataattggatatatttgccatatcattacattcaaatacattcgattttgaggtggcaaaatgtgttccctactttcataatgcttaatcagctattcttacattgtttaacaacattacactaatgtctttctctgtaccatgtact

SEQ ID NO: 254027 - DNA, 355 bp, Gossypium hirsutum
tccacacgagcgtgcaagcttaatatggcatgcttcttttgcttcccacgcagagcccctgctgtagcgcaatacggacaacatcgtcggatcacagcagctctcgattctcagatccatgcgatagacaatatcatggtcctcgaatcttacctacttatgctcaccaccgtggaatccgttgaccgatagctattcaaggggtgtatacggaaacttgttcactcgtcttgtttacttataactgttatcttaataactggaatctttgtcagttccactacaggcgatattgcactgcattgatgagaacccattcttgagaagcttattgctgctgggtagcacatgaagg

SEQ ID NO: 254028 - DNA, 354 bp, Gossypium hirsutum
gccgcgcgtccggcaagatcagatgctcacttctactgatggaggcccgcagcggcaccttccatgacccagaattgttccatgctcccttgctgcaccaccctcggaggaggagcggcagacccttaaggggtttcgcagtgatatatgagggcggcgattcacctactctaactggccataacaatcactcaccaaggcccgaatgcattagcatgtgaccccagtgctggaactgaagctgaggctgattccatggcttgccctgctagaggaatagatggatgtactgcagccactgcacacccatctcttaatgacgaagttgtgtataattgaacaaacgctactggt

SEQ ID NO: 254029 - DNA, 448 bp, Gossypium hirsutum
ctctcatatggcttcttcagtaatctaaatctcgctctctttctctctctctgaaattcttctcttttcattgttttaaacaacgtcgtttatgcattgcgatctgtttctttttctttcttagatagtttacgcgttttgcattaggaagttggagttttcgttttacttcctgtttgtttcccgagaaaacggagagaccctggttttgatatatggggcatcagttaatctgagtgtaaagaaaatggatcaacacaggaagtttaagacttgtactggagttctattggaggtcttgtagattcgttgattttagatgataagagctggacgcagcttgtaaaagctgcagttgagaatgttgattattttctggctgatattctatcattcttacgatgagaagtctgttcctgtcagtatcatacatttcatgctacagtct

SEQ ID NO: 254030 - DNA, 445 bp, Gossypium hirsutum
ctcaaaacaccaatacgtgattgtgatgtacctcatatctttgattttttttctttttcttttgaagcggggagatttgattttcatgtttcataatcatccaccaacttttctaatttggatgttgaagacgaatttggattgaaaaaatagaaatacgaatacaatgtttcctcttttctttctcttttttttttgaaatagcgatcccaacttaaacgctataatcgctattttaatttcgattcttttcatcatttatactcatcatcatagtaaattagtaatggctgtcaaagaaacggcatgagaggacggagaggagataaacccggaaaaggaatcaaaatccgaggttgcggagagaagtgaatcattaaaacaaaatgaggagtcgtcatcgataagggaaccggacatttccgccgtccggtgattggattcc

SEQ ID NO: 254031 - DNA, 447 bp, Gossypium hirsutum
aaaattccctccctcctttcctttttgccaaccacctccctaaaatgacgaaaacaaccgtaatcctcttcttcttcctctacatcctctcatccgccacggcggagatcaaaactctgaccatcaagtccgactcccgcccgatgattctcttcgagaaatttggcttctcccacaccggtcacgtcaccatctccgtctcctccgttgccgtctcttcctcttccaacgcccccaacccctccccttccctgctcggattcttccttctatccgaagaatctctcctccaggtccttctcgagacccaacaaaattcccacttttgcgtgctcaactcccgctacatgcaacacctcttgaccttcagagaactcttaccgccttcccttttccgcttgaaccgctcttaccccgcttctttctccaatgaatactctctcttct

SEQ ID NO: 254032 - DNA, 284 bp, Gossypium hirsutum
gaaaaaccaaatataagtcgaaaccccaactgttatttctatgtgtgcttttaccttctctgtttcatatctttttccgtcgacgattcctccatcatagacgacttacgtctatccggttacagtttcccgtctgttcatgcaaataagctgattagggagttgaatttgtttgctaaaggggaatttattgtcatttacgatcattggttgttgttggcggtagggttcattactgactgtgtaatgatttaagattacagctttggaagtgcccggcggag

SEQ ID NO: 254033 - DNA, 244 bp, Gossypium hirsutum
aacacgcgtccttacacttttccttttcattaaccatatgcttaataacaaactcaattaactatcccagtaactctaatcgaaaatcacctgttaatataccatatatttaagcgacgcgatcaacgagctgctcaatgactgactttgataaagccactgctttggttctgatagtgactctgcttgtgaatgttgctgctaagggtgatgatgatggtgatgatgatgtcaagatacatgt

SEQ ID NO: 254034 - DNA, 230 bp, Gossypium hirsutum
gacggcatcatactatcatagcagttggttttctaatatgcttgaatactatcccattgaaacactgcagaaacactcatataaaaacaccttgtgacataattcaattttgacctagggaagcgtgattagctctgttaccgtcttactgatgaccgcagctgtgcctgctatcgtgactgtgaatgttaattttgctcgtcaggttgatgatgatagtaataatctat

SEQ ID NO: 254035 - DNA, 347 bp, Gossypium hirsutum
ggagtgacaaatccataaacataaagagactctaacctgggactgcaccagatgactgctatggcctaagatataacacgagtttgcataattccgctgttcgaagaaaggagcacagaagcccctaaagaagctaaacataactcatgatgctgaaaatactagaactgtggctgcagatcccggctgcgcgcagacacatgatgagagctactcttccaaccacgtgaacggtttgactccagaaatgaaacagggaacacgatgagggctcatgtatacactcaatgggcggaataaccacgtatcacacatggatcgttgggaaggatgaggggactgaccca

SEQ ID NO: 254036 - DNA, 348 bp, Gossypium hirsutum
cgcagacccacgagtactgactcatgggaacagtactttgaagccgcgggccttagttgttcagggtatggacctttaatttaaacggtctgtgactatccaaaggctggagcgacaattaccatatcaacagcggagcctccctagattgcgaagtagacaaccggggattcatcttcaactcgttggaaccacccgagccccatctctgtgttggtcggaccttatagctatgagcctgcactctccttgctggaatgacaaagaggtgccaacccggttgatcttgttgtgcggccacgcaacccattgtcagtggagttgagaccaggactctcgggaaacatt

SEQ ID NO: 254037 - DNA, 456 bp, Gossypium hirsutum
gggtaccaaggattaaattgaactattaaatttattattgttaattagcacgtatatccttttaggcgaaggaaatttagtaaataaagcagtgatctacaattaaagagaagggtgagaagaatctaacaagatatagaaaaccccaaaaaagaaaagaaagggggctataattaaggtgtaatcaagattgaatatgggaccattttgaaaagaaaaaaaagatcataattgagtatgataaggaatctttacctaattcaaagaaggctttgaaacatacgtaattttgaaatgtttagctactcctgttgatctataaattgggattttttggagcttgaaaaaatttatgtttaaattttattttatatttatataaagaagtaagtgtaattgggaagacagagggtgatggtgagcacagtatgaaataattaacaagaaaataaaagc

SEQ ID NO: 254038 - DNA, 255 bp, Gossypium hirsutum
acgaaagtgtcatgcttgatatcgatgcgtaacaataaaatctttatttagtagcacatatttaaaccaaaaaattcgttcgcctttttctatattagactggcatctgtctctatgtatccaattaatgcatatatatgggctgatctgagaatatagtgtctgtgatttgtgccaatttagctaaaactagcgcttagatagaataggataaggctctatatgtactgtaaatggatctacctattttcaata

SEQ ID NO: 254039 - DNA, 376 bp, Gossypium hirsutum
  unsure (1)..(376): unsure at all n locations
cattcaaataatgggttctttctttgaatttgttgtgatacaataagttttttttattgtaattgtattgaaacaaaaaaaatggataacaatggaatgaataagacaggaggcggtccgcaaattttcacttattctatttctatggttttatctgagaatttcgtgtcttttttttattccaatttttgctaatttcgtgttttgattgcctagtgcaattccatttttttattccgattgtatctacatattctaattttttgaggtaaggaggatgaataaggataaatgagaaggaattaaagaaatggggngaaagaagaaaagacaatttaaacagagaaagaaggggaaaaaaaaaaatatcgggggg

SEQ ID NO: 254040 - DNA, 270 bp, Gossypium hirsutum
acgatgaagcgtgggaaaaaaaaattatttggacacagaggagatatcaactacgattaccttacatctaaaacacctggtctcacatccactaaatttaccatgtgtactactttcagcggagatgaaacggctctcttcttggggttactcggtgccgacgacgatctcgatcttctcctgaatgggagctgaatacgggacgcttaatagcggagagggtgttgctttaatgtgagcgatgaggactgacttggagatgaaatgtat

SEQ ID NO: 254041 - DNA, 246 bp, Gossypium hirsutum
  unsure (1)..(246): unsure at all n locations
cggacgcgtgggtnacttaacaaacaactcaactgaatcgtgaaggcagtcgagtctgggcccatacttcaacaggacccggagcaaaaaagcgcatgctagtactagtctcgctccaaaataagaaggggggaggtgttggagctccaaagattccgtagaaagtctagcccaagccatctcctttaatggaggatgcctaataagataacctgggcgagatatttttacaaagcaaattataaa

SEQ ID NO: 254042 - DNA, 265 bp, Gossypium hirsutum
aagaaaaggaaaatctttctttcttcaacgttttgctggaactgggctcaacttttcgggttttttattaactatgggatcttttttgttgggttaggctctctattgttctatttctcttatgagtcactctggatttctcatggtgatcccgttttgcctcaattaggcgaatatctcttttcttgagattttggcgtttacggcttggtaattaaggacgacgtcgctcaatcacaatgagagagaggaagaccaccgacct

SEQ ID NO: 254043 - DNA, 419 bp, Gossypium hirsutum
attgataaaaaaaatataaacattgtagaattaaatttattattatgctaataaaacgtcacggcaatattctgttagtaatttaacggataaataaataaaatatttaattttaataacattaataattaaaatagatttttttaaaaatttaggtgagtacgacaataactgaattactatttatagtttacattctattcagctattgactgaagtccaaagattatttagacgataagtttataaatagcataagtcaattttgggggaagaaatataaaaacaaccttcaccaaaacatgggtgtctttctttcttgcttctctttttaaatgatcagtaaaaaaactaggtttgttatttgaaaattttggttgatttggatggaaatattgatccttatatgattaaaaata

SEQ ID NO: 254044 - DNA, 433 bp, Gossypium hirsutum
aaattaaaagaaacatttaattaattcatattatataaaaaaatatttatacataatttaatttagagcttttatttataaaagacttacacataatatatttgaccattgcatgccagggtcttagtacaggataaaaaaacttatttagtactggatgccaacgttgtcctagtactatattagaatcaacacaaacatttagtactagatgatgtaacacctcaaaaatcattacattatgaaagtagtgaaaaattgagaatttgtccttgataaagagagataaggaaataacagtgacaaaaagagaaagttgagtaatgttaaagaaaattttaattaagaagtatgttgaaatacattaatttaaagtaaggactaaatcataaatgtgagaaaagtgtgggttcaagcataaatattcaattag

SEQ ID NO: 254045 - DNA, 424 bp, Gossypium hirsutum
  unsure (1)..(424): unsure at all n locations
caacaaaacccctagaattaaggcctaaaccttccctcacattaaccgagttaccatgtttgacacctgcccaattttcttcactgcacgacgacccatccactgtccgtaaccaccatgctccgacacctagccaccgcacgcaacgataaatcccatccaacgactatttttgaggaatcaatagttagccgaagaggacagtagctctccccatgccccaactttccataaataaaacaaaacaaacttaacttctcgtatttgaaccgagcataaacaaccatagacttcccaaccataactttctttttgcgcttcaatggggcagcaacatttaaacaaacacgaatatgtaaataattttgaatccgcaaagtcgaaatggatgtatcatactcaagaaactttccacanaaatcac

SEQ ID NO: 254046 - DNA, 427 bp, Gossypium hirsutum
cttttaagtgctactcaaaagatcatttttcattggctggaaaatagatgatgggtgcaaagatctgacagtggatgatgcagctgacttattcttatcaactgctgctttggcaaaagcattgatagttgcggagcccatcatctattttccagccaatgaaaaatgatcttttaagtgctactcaaaaagtagcacttgacaaggctgatgatgtaactactacagcagaactggctcaagctagaggcattcaccacgaactgcaaatgctacattactcaaaccatggtgatgcacatcaccatcttactcatggtatgcaaaagcagcagcagcggcagccaccagaacatgatgattcatctttgaaaaaattggctgcagatgctgctctgagtggatcatcaaattgcatgggtgggct

SEQ ID NO: 254047 - DNA, 427 bp, Gossypium hirsutum
aaagaacactgttagtttgagtatacatactgttgagttgtctttgatgcaatcttttttttcctcattttgatacttgtgcactatgatattcaactagtctttggtgtatcttccaaagctaagtcattattctttattaagaaaagctcactttagatcttggaaattctactgaaaagcaagttattcttcatataatatttcctttcttatttttctgcgtttctttgtgcctcctagactggaataagttacccttcctttcacgcttcccatttttattatctgcatttgttcgtagcatcatctttaaccttttgtcaatagtggatgtctgccttctagaatgaaatttgttcctcgtcttataaagggacccaattatggtccggcagtaccagcattcaataattctgatctcaat

SEQ ID NO: 254048 - DNA, 362 bp, Gossypium hirsutum
aattctcaatttgattaaagcatagaacaaattgcagaatatgacctcagcaataattctaattaaaaggtgaatttttttcgacaaaaaatgtttttgtacatgcagtacttttttgtgctttctctccgagaaaaagatgagatgaggtgaggtgaggtgaggtgaggtgtgcaaccgtagtgccagagatacgggaaaacaagaagaaggcggtttcggctggctggctgctgagacttgagagagagagagagaggactaaacaacagaatagaagaaaagagcttgcattttcctgcattatttacacacatttgctctgaaattttagtgtgatcaaagtgatagtgttaaacgtg

SEQ ID NO: 254049 - DNA, 318 bp, Gossypium hirsutum
  unsure (1)..(318): unsure at all n locations
cggacgcgtgggcgtcagcgtcagcgtcagcgtcggagaagaagcagaagcagacgcaggcgatccgnctgggtcttctccatctaaaccttctgatcaaccctcgattcatcggaggaatataccaaatggatcgcctgcatgatattctgaaagctcatcggcgcctgcgcttgcacgttcatccccatcataacaaaactcctggttcgtccgaagctttcaaggccgtttccaaagcgcttccttgcctaaactatgattaaaataagaaaaactacgatttatttggttcattgaacatgattattaaactat

SEQ ID NO: 254050 - DNA, 228 bp, Gossypium hirsutum
gtcgacatagtgaacatagtggtgtttcagaggatgtgagtgtgagtgtgagtgagaatgagtttgtaaaatggttaccagatcgatttggattgcagaatgggagtgaggattcaagtaattttgattgtgaacattcatctgatttgggggaagttgaaagggaaagggtaagacaaatatttcacgagtggatgaacagtggtggaaagggatgtacatctaatg

SEQ ID NO: 254051 - DNA, 211 bp, Gossypium hirsutum
cggacgcgtgggggtatccactactccagatggaaaagtgatggacctctttttcatcactgataccaaggaacttcttcatacaaaaaaaccgcaagggggaaccattctttacttggaaaccggacttaggtgtataatggaaaggtgggaaaatgaattaacttgccaaggaattactggttggtcacaaagaacatcggttctttct

SEQ ID NO: 254052 - DNA, 387 bp, Gossypium hirsutum
gaactatcaggtatacctcttccccttttgtaagtgcatcttttgcgagagtatgagcttggccattttctgttctttgaataaatctgaaagcaattttctggaaatgagatctattactctgaatatcatgaataatcatcccgataacagatttgtcccttgttgttgattgacatttgtgaataactgttttcggatcccccataatcgtgactgagtctatccccatgctgatacctaacttggttgcctccaaacatgcatatgcttcggcaacaaatggagatgaaatgttgaagtgcaaagttgactttaagggctctaatcacaccatcttgatcccgaacaataattcctgacgctgattctaaagttcctgatatc

SEQ ID NO: 254053 - DNA, 342 bp, Gossypium hirsutum
acgggaaggattccctatcaactcaagagtttaatggaactgatgaatggcaggaagcaactcgatcttctgaattttttagaactgataagtcaagaatgggtttcaagcagacaaacaatgaggaagttttggtccagtgtacgaaatctcatgagcttcggcataaagccaaaaaggcgagcatcagagaattggagcatcaactaaaaagtggtatgaaagtagaagctgtcagggaagaccatgaactagagaaagctgagaaagatatgaaaacagctaaagaaagtcatggaagaggggagtttccttgcaataacgaaaccagctaaagaagct

SEQ ID NO: 254054 - DNA, 298 bp, Gossypium hirsutum
cggacgcgtggagcctatgggaattttgttttggctaatgtttggctgcatgctcaagtaatagctatgaatatgcaagatgactccgatgagaacgtgatgcctgatactgagataagaacaaccggttcacctttatcttggctttatcattacaacctctcatgcaaccctgcctttaggatgattgaacgaactggaatacaccatgaacctgggcttggtggttctacaattcatactactgctgccgcaactgagttatgactcaacagagatgtggggacgtataaactac

SEQ ID NO: 254055 - DNA, 363 bp, Gossypium hirsutum
cggacgcgtgggtgaacctttggtaaaaggacataaaagggtatttgaggttttttccaacccaattaattccttgccacctgattttccaaactcaaccgaaatttaattgcctttccccacaaacggatttgaaactgttggaaaacaaaggaataccttttttgttaagtgcttaaaaaaactggtttttttaagttccaatactagaagttggggtgtccttgataataaaccatggaacttaactgaacctcaactcgaatggttcaatgtggcaaatttcaagtccttaaaagaaaaccaatcttacggttgggtttaacattcttttttccacaagttagccttggaatttttgaa

SEQ ID NO: 254056 - DNA, 362 bp, Gossypium hirsutum
gttgcaattaccttattcccatttcttcttgtcattgtagctatctgttttagcttttgtgatgccaattccaatgtgctttgcattgaaagtgagagaaatgcccttctgaagttcaagaatgatctcgttgacccttcaaacaggttgtcttcttgggtcgaaggtggggattgttgtaaatggctcggtgtcgtgtgccataactcaacgggccatatcaaccaactgcacttggctgctcctcttccagttccccattttgatgcaccagttgctgaatgggaagcttaccatcgatcaaagaacaattccccgctaaaaagggaaaataatttcttcattgctggagttgaaacatc

SEQ ID NO: 254057 - DNA, 426 bp, Gossypium hirsutum
atcttcatcttcatcttctctgttcgtccttccagaaaaagaaattcaggttgggagtattgcacagctttcttttggttagctcctctttgtccaccatttttgcccccaatatgaagatcttgttcacgaaagttctaacgaacaccgatgtagagaaaagattggcggttcccaacaattcactgaagcatttcgagcttgaaaatggtaattgctccaaatcttttgaagttaaagatgaaaacggaagcacatggacttttcgttgctatgttcgtaacgacggtgcctacaagaagcctgttttatccagtggttggcgtcaatttgtcctcaataaaggagttcaccagggagatttgatcacactctataaagatgttgaagcagaagcttcgtataagaatcgaattcagagaaaaa

SEQ ID NO: 254058 - DNA, 471 bp, Gossypium hirsutum
  unsure (1)..(471): unsure at all n locations
ccgtccgcacttctnngctgattctgcnnatgtaatcgnngtttcccctttttctggattaccagcnnttcttcgctcagtcgcaccctgtgnnnccggatttnncttcatttaccagcnnatctagcttnntgtgggtatttcttcctttttgttttgccccatattctatcnnntcctcatttnnatggctcnncagttccatgttcnngctttccttgnngaagccaatgttnngaaaatatagtttggaattttcttccttctggtnntcctcattaggaagaaccctcatcagcaanttgtgtctacctactttaagnctctccttgttcttcttttggcaagcgtacctcttctattctctttgtgtcagaagaatcttctcggctctcatgttttacttcagcatccttgtggatctcttcttcaatattctcaatcaggtttgcaattctgatattttcaccc

SEQ ID NO: 254059 - DNA, 441 bp, Gossypium hirsutum
caccagaccacctcttcattttgttcagtatctatctgtctcagattcaatattgtgttccaagcggggtatgcatgtttcaagttttccaatacaatagcataggagatccttacggacattcataccagttcaaagcaagattgctgcaatcttatgctaatactactaaagcagaatatcttgtaaatagaagaggaaaggaaaattttgagaaatgaaaatagccctctctctccttataaacagattctattgtggttgtcagactctgcatttttagtggagaaagagaccaacagaatactggggtaaaaattttgaccacggaggaaaaccaaaatggaaaaacagattcaaaaattccatccactaaggattgtgtgatttgggtagcatattgtagctaaaggagagtgaaagaaagacttggaaaggtgc

SEQ ID NO: 254060 - DNA, 370 bp, Gossypium hirsutum
cggaccggaatctcccttctcgacccatacctccccttttttttatacacacatcaactgatttccacgggacattcatcattccctggggggagggcatccaaaaacttccatttcaatacatttcctgttccactgctagccctttatgctactacatgaataaccaaactctctcttattaaccagatatttaattttatctaaaccgcattccttcagattattcctctccttaaatccaccttacatcgcatatatccatattaattcagagaccaactattctacttttcctttaaaaattaaccaattctattcattatcatctgccatacattctaaatcttaaccaaacaactggaccttt

SEQ ID NO: 254061 - DNA, 435 bp, Gossypium hirsutum
cccacgcgtccgcgatgatctctccgcacgattcgctgctctcaaggcttccttgtcttcatcttcttctaatcctactgctgctactagtatttccactaacgaagttcgtatcggtctcgaaaaatccgacggcgaagatgatgaggaagatgaagttgaaagagtggtccaatgggccaaggatgctgctcgccttgacccttctcctgcctctgatgaagatgatgatgacctaatcggttctgattccgatgataaagatactgactatgatgatgatcctaaacataaaaaaaaggaatcaaaacttaggaaatgagggtctccttaaagagcagccttgcagcaataatccattgccaagcctgaaacttttaatcctatttttatcgaacatgttcatgttcagattggatgcagtgaatactttca

SEQ ID NO: 254062 - DNA, 399 bp, Gossypium hirsutum
cgactccttatttctcttctcctaaagattcttctcaattgaatctttggcgttatcggttttacacagcttttggtttggaattacgggtcgatcataggatggttgactgaatcggcttccaaattgggtttttgttttgtgttgtaagcaattgagtgaattgggattataaatgcataaatggggtttggattgctttgtctttgttgtttcagaaagtgatttgtttgaatttatacttttggttggtttaaaatagtttaactattttggagtggcatagggattgttatagtttattttaaatgaaataaaacacaggtcatcctgctctactcaattactataaatttagggagacaagatgtttgggagtatgatccagtacttttcaac

SEQ ID NO: 254063 - DNA, 403 bp, Gossypium hirsutum
  unsure (1)..(403): unsure at all n locations
cccacgcgtacgaaatcgccgggtttttgaaccttgcagaaaccagaaaactttgattctgttctctcttttccagaagctaattgttatacttgggttgtaagaaaaattggaggatatgtcaagtagctcaaggggagatggagaaaactccattgatgttgaggaactcttggagatcgaaacaagatgcagagagctacggaaagaaaaagacatgttgaaagaatcacaacctcagggctttgaactgatcaggggactagaactacatgtgaagtctctatcagaagcttgtacccaagacaaaaaacatattcaaaaattggaaagagagctaaaaaattgctctcaaganattggtaatggttctttttttcctttgaaatattgctggggggtg

SEQ ID NO: 254064 - DNA, 434 bp, Gossypium hirsutum
aaaaaaacgatgaattgagaggtggttcaacgttccctctttgaacttcagcttcaggtctgcaaactcaatagctgaaaggaaaaacatatttttacttgattcattcaaattcccacacgaaaagggggaaaacccagaaattttaagccatgaaacagttacacaggcaatcaagcattaaccataggcgagatgaagagatcttaatacctcagactcctgcgtagtcacccaagacgatgaaacacccgacatttgttcttagatccatgaagaatctatctatacagaaaaggcttaccaagcatcttcatcggcattttaatcggttctactttcttcatcctccaaccaactctctctcgtttaggcccaaccgagactcacccttcgatccccaaatctttctctaacaacgtcgtttcccacac

SEQ ID NO: 254065 - DNA, 375 bp, Gossypium hirsutum
ggacatatttctgaaaaccgataaaattgtagacgatcttttctacttcaaggacatgctttctgttggcgaatctcgtctaagtagagttgtcacccaaaaccttctgagtttacttatactccccttgttgcttccactactgaagttaggagagaataaaggtagctacaacatctcagcagtcacttctttgtacatagtttctcgccttcttcaagttgttggtggaaaacacttgataaatggagtggctggtcttcttttgtatcattatatggcattatgtcagagagatgctattgctacaaatggggatattgctggtagcataggtgatgcaagtcctcttctccactcgttgaatgatataaa

SEQ ID NO: 254066 - DNA, 217 bp, Gossypium hirsutum
gtttttgaaaggggagactgtgttgatgaactctgcaatgctcgaggtgtcaacagctaaggaccttatatcaaaggatgctccatagatatgcttgttgctaccttacaatttgtattaaatatatggctttccatattcccatgattggatagttgtttgtgagttgtcaaagctttcatattgaaaaatcaaaataaagtttacaagttatttg

SEQ ID NO: 254067 - DNA, 214 bp, Gossypium hirsutum
aattacaatagatctgacacctgtaaagagaaacaggttacaccacgagggagatcgaattagctgcagtgaaatgtggtccaacattcatctgatcggcatactaaacttcttaacatttttgctattagcagacatcctgggtgtgtgaatatgcgctaagcatgatgagcaacaacatcgatatgctaaaggtgttacagtggccattgat

SEQ ID NO: 254068 - DNA, 438 bp, Gossypium hirsutum
cccacgcgtccggacaacccaaatcttgtcttgtttgtttccgctgttaagctgtttctttcaccaaaaagatgtctgaatttacattggcttgcaagaagaaaaatgatgaagatcatgaattgtcaaggcttttggtgtccgattttatcctcttttgctcttccattttctctcaccctctctatttctcttatttcatcttcttctctccttatttcgtcaagcttctctcttttctttcgcctctcttctttaccactacccttttggttcttaccttgttcatccttgaccaatcagatgcctccatttgccacctcgaatccaagctactaacttccctacttactgcataccaaacactagttgaaacattaaggtgtgaagttgaggatgaaagtgatgggtttgggtgcttggaaccgctcgaaactt

SEQ ID NO: 254069 - DNA, 312 bp, Gossypium hirsutum
gtctggtatcactgccaatctgtggttttatcgataaccccgacgtgcgaagaggttgactatccggggctatttcacatggctacgataactgatcttatcctacggccagttaacccccctaccatgtacctgatcgcttccatcagctaaatccactccaaactctacaagaaatggatgtaaacaacaccggacactgtgctcaccttggacaattacaatgacttgactatgctatcactcttacctaactctgttaataatcatagacatactcagtgacaccgactcaacattaagcacgatgat

SEQ ID NO: 254070 - DNA, 442 bp, Gossypium hirsutum
ggaaattatgatgaagctcttgatttagaagccgttgtttgcaaactctcaaccatgcaccccaatatacctgttattcaagcattggctcaagaagttaggcaaacaacacaatctcttctctctcagcttctccaaaagcttcgttcaaatattcagttaccagaatgccttcggattattggatatttacgccgaataggagtatttagtgagtatgaaatgcggttgcagtttttgagatgccgagagacgtggctcactggaattcttgaggacttggatcagagaaacgcgtatgagtatctaaaagggatgataagctgtcacagaatgcatcttttcgatgttgttaaccaatatcgagcaatatttgctgatgatacatctggaagtgaagaaaattatgatggcgggcttctttttagttgggccatgcatc

SEQ ID NO: 254071 - DNA, 154 bp, Gossypium hirsutum
cccacgcgtccgctttgatttgccccataaaatgttttagaggctctctttgttggttcatggaatttgctgctaacaaagaaaaggtacaacccttattttcctttattagcagcaaattccatgaaaataagggttgtaccttttctttgtt

SEQ ID NO: 254072 - DNA, 435 bp, Gossypium hirsutum
gaacattcgaaaagttctcattatcctaatcagttcttgtttgactatgtatttggctttttgaaatattttgacaggcatttttggcattacaaaagttcaaaagtcatcagctatcttttatcttaaactataatcttgtattcttttttccttggatattacagttaatgtttgcctgtttttctggtcaaatttacttgctagtgctgattgtttttgaaaccaatagtactcttatttgttgcatttatttaattccttgctgttggttgcattactaccaaggctgcctgacattttcatacatgtgttccaatttctccttttcttttctttcaagttctggacctaagtgtaagttcctacaagaggaacaagcagatccttccacagaccactcataatcttctgttggaacggcgacttatacca

SEQ ID NO: 254073 - DNA, 368 bp, Gossypium hirsutum
cccaaatttgcagcataaggtctttaggtttttttaaatttgatggcggatcggacctcagctgctccaaagcctatatggatgaaacaagctgaagaggccaagctgaaaagtgaggctgaaaaagctgccgctgctaaagcggctttcgaagccacattcaaagatgttgataagggccgtaacaaggatgtggtggcagcttcatcggatagtgagtctgaggacaccaatgacttggtggacaaaccggttggatctgtggatcctgctaagtgcatggcagcaggaccaggaatagctggtggcacggcatgtgcagcctccacctttatggtggtaacaaaggatgcaaatgggaggaaagt

SEQ ID NO: 254074 - DNA, 341 bp, Gossypium hirsutum
ctctttctaagttactctgccttcttctccttgagaactacatcgcgatctatgaatctcattcttgtgcacataacaatgccaccaaagctcaatctcatatcataccagaagaagctcatttgcctctgtatcatgagtcgctatgtacatatatgcgcggagatgcatagcaggctaactcgtgaaggacttcaaccctgaacatctcagtagtatcaacctcaggctagtcacatggagcaatgctcagtatgtgaaacctaataagaccatcatttggcagcacgtggaagatgaatgttaccttaacactatacatgcctgcgccatcagcatat

SEQ ID NO: 254075 - DNA, 227 bp, Gossypium hirsutum
cccacacgttcggtctttatgtacactttttcgattctcaagatggggtaatctgcgaaaagtattcgcaaaggggagtccaacaggcagcgcatggattgcagcacatgctgttggagcgtgacaagcatttgtcaaccatggactatgctgatggaactacactgatgcgtgagatgtacatcatgccatgaaccatactagatcaggtcctgaaggcatgaacc

SEQ ID NO: 254076 - DNA, 425 bp, Gossypium hirsutum
  unsure (1)..(425): unsure at all n locations
gttatcagcaaggttgctaccgagaagaatcctgcagatatgttaactaaggtgagccctgcatataagttcaagcattgcttggacttgataggtattcgggattgattagcgccagagaggcgtttggaagaggtgatccagttcgaggaattcactatgatgttcagcttggtaaatttcaagccaaggtggagatttgttaagaaatggcttaaaattggtagtggattgttgttgttggtagtgggttgttggtggtagtggattantggatggttgttggtgtccattttcaaccacaaatctttgccaaagttgtggacaattatgtccttgaactctcttataaacagagaggttcattagccatattcatcatgccaaaccaagagagagcacagcttgttctttgaaagctagga

SEQ ID NO: 254077 - DNA, 449 bp, Gossypium hirsutum
gcagagctccaaaaacaaatcacttccttcaaaaagaattcaccttttcttttttaccatagcctttttgtatataataagttaacctactgatgaaaatataaactaaaaatcctcgtttgtctccaatctctgattcccatttgcctcctctctctcttacttttatttttttcccttatttgattcctcttttttcacattcaggattccttcttttgactcgcttatttcaagttttctttccttgggttcatttaaattcgtttgttttgaaaattttgaagtgaatgaaagaaaaaaaaaaacatgggtggtgttaacaaggtggaagtgataaacagcaaaggttgttcaaagttgtttgttgggttctcatcttcggtgccatcatttagaagtttccaatcgtttgaaccaatgtcccctgcttctacttctcttgggtc

SEQ ID NO: 254078 - DNA, 389 bp, Gossypium hirsutum
aatcaaaatttatataaataaaaactatatatatttttttaaacacacaattacaaaatgataaaatacaaaacgtgtcataattataccctgtcttatttatcacaagctatagtatttgagtatcatagtcatattgttgtgggaaaaaaaattataccctgttacttggaaagtccagcatgaagggctttaagcattgacttcgaaattttcttgcaaaaacttgtaaagctcctcggccaccatggaagggtactcttcatgtggtaaaagagcaccagcaaccttaacaaacttgctgactcctcttgcttccctgagagcttccatctctgcttttgatctcttcggagacccctcagttgacacgaccagaatggggattt

SEQ ID NO: 254079 - DNA, 423 bp, Gossypium hirsutum
cccacgcgtccggcaaaaactacctttatcaccgtaccccaatcccggttgtttctattctgttttacgccttcatccgatttgattccttgattcattgctttacttttctgccgatttggtcccagcttattttcttgcattttactttgttttctttcgttttccctcttaccaaacactaaatatctttccattttcctctcccccaaagtgaaaccccccattgaaaccatcgaaaaggttgtcatttaatcaaatcccctataaagggattattattattttttaaacacgatgatgatgatgttaccgtccctttccaggccgctcgaacgttgtcttggcgttagagctggtggggatgctctcatgtggacgcttcagcacaccctccctcttttacccttccccgatcccctt

SEQ ID NO: 254080 - DNA, 436 bp, Gossypium hirsutum
  unsure (1)..(436): unsure at all n locations
cggacgcgtgggtaaaaaccctgattctattccctttgttttcaccgatcaaaaggcccttctcataaattttctctcttgatggaagagacgcgatgtgcaatttgactgttccaatttccttttcaacgttcaattaaaaccctagcctcttccttttgcttctatcgggggggggggaggaaggaatcatgtctttcgatctcatatgctgaagccgtcctgcagctgctttggatcctcccaagatctgtacggctgaggaccaaaagaagaaagatgatgaggatttggtgagtggctgtttgggatttcgccctcgctggttctctacaccgcanatccgaatcatttcaacttttaccgtattccccgaagcttttgaatgatgctattcacgtctttgctcgcctttgcgattgctcttctcaacctc

SEQ ID NO: 254081 - DNA, 354 bp, Gossypium hirsutum
gttcgatttatgatgctatggacatagacgtagcaagctgttacgcatatggctaccatagcgcgaatcatgaggatgacctcacgggtgtttacttggtttggcatagactcttactagcggtgtggacacactttgcgtatatacacaccatgcagtggattcattgacctaaaggatatgctgagcctgccataatcatgggcattatgactcattcagcacgagtggcacccaatatcgttctttaccatttatggagaggtggcacacatgtggtcatgactggaaatatccttttaaatggtaagaagaagagactagagtatggtgctgatgcttatgtaactcaag

SEQ ID NO: 254082 - DNA, 295 bp, Gossypium hirsutum
cccacgcgtccgcgaaaaagatgactctggtgacgtgaaggccgagcgtggggatcccacgtgggaagtcgaccctctggtgctattccagtgtatgccagaagcttctagagctctcggtctgctgaactttgggttctttttgggttccaaatttgggccatctgaagttgggaaattgggtttaaaaaatgtatctgggttggtataaacttagcttttaacttagtttattatttgggcctgatggtttgtaaagacttggactttaaggaattattatttatttattttt

SEQ ID NO: 254083 - DNA, 307 bp, Gossypium hirsutum
cgtcgtgagaatggggaattgttctttaaaggggtcactgctgagtgtagaaactccatcagggttttaacagatggtggtgaaatcattgatgttaaaggccctaaacttgcccgagatattgtaaacgattttccggggtacgttatttgtaaaagagatcaagctcaagcttcaatgtttccattgaatgaaggtgagtggttggttagtgggggattttattatcttcttccattagccaaagttggggcaccaaagatgtcgatggcagcagctgattttgttgagaatttgtcaagtgggt

SEQ ID NO: 254084 - DNA, 403 bp, Gossypium hirsutum
catacttatagtttacattgatttcctacctatggaattcagacgcatgcatacatttgctgtctttcttctaattgcctgttatttagttctctcagtcgagggaagatttctaaaatcactgagcaaaaataattcaaagcaagtattgccaccccctacaccaactaaagcctcggattttggtgactcaattgaaggttacaaagaggattttcgacccactacaccagggaacagccctggtgttggacattcttttgcagacgttgttgaagatattgttgaacaaaacccagcaagcattagcgtgcaaggaaatggcaagcgttcaattgcggtgcacagccctggtgttggacattcttttgcagacgttgttgaagatattgttgaacaaaac

SEQ ID NO: 254085 - DNA, 411 bp, Gossypium hirsutum
  unsure (1)..(411): unsure at all n locations
gggctttccaagttcctgtttgagtgcaattatttgcctttacctgattctggtctggatgatggtttggtgacgcccgactcggtccttgagccgtcttgttccaccaaaacgtcttctgggtctggtggatacgatgaagtgtggtgccgggcacttgcttgcaccgctgcaacgtcggagattgtgaggaagaaaaggacaagcttgacagcatgtcgtccgacatgtcctccggtatccgaagtttcaggaaatttaatgaaccggagaaagaaagctccacaacgagctccactgtattgaaacttgatttcatctatggaagtgagagaggtaaggggagattgtgacattgntggtatttatatatatttcattttcaggcaatttacggatgaaatctcccag

SEQ ID NO: 254086 - DNA, 407 bp, Gossypium hirsutum
aatttatttctttcatcgctcggcggcgatgcaccacccacagcctcacatttcttcgtcaacctccacttcctttcctgccgccgcggagtttgacttcaaaccggccaagcgccgcggcagttacaattgtggcagatgtggtcttcccaagaaaggccacgtttgccatctcaacagtaccacctaccctacttcgatttccactcctacctcatctccatccgccattactgtcgaaaattcatcatccgcgtcccgtcctccgcccctacgtcagtcttacacgcatctccgacgtgcgctttcctttgacgacatagacactcgcgctgactcgccggcacgcgatttagatgagtctaattctccctacccgggtacagatcttgatccggataataaga

SEQ ID NO: 254087 - DNA, 410 bp, Gossypium hirsutum
gatcagtgaaactgaagatctagggttttttattcagaaaattaaaaatttacaccgaaattgaactggtttgagtcgactcgtattgatagataggtgcaactcgaccatgtatagtgggtccagtgatggcgagagccacgaagccgccgctcaacggaagatcccaccggtttcgtcgatgctttgggttcgaaatcttcgccggtacatcggatccggtgctggactcggatccgaagccttaatggagcttgaaacaaagaggatcttgcttgatatatttaaagaaaagcaacagaaaagcgccgaagctggtacaataccaagtttctataagaagaaacctgaggaaggatccatcagtcatagggttcagaagctagcaaaatatcgttttctaaagaagc

SEQ ID NO: 254088 - DNA, 305 bp, Gossypium hirsutum
ggggcggccaaaaaccattggaatttttttttatactaaaccccatttgttttttatgacaacttttgccggtttacaggaaaaaagaaaaaaattttcccttaaaggatctaacccatgttttataaccccaaaaattttttcctccccaaaaacccatttttgaaaagaaaatttggcttaaataaaaaagagatacccctttccttgggtggattttaaaacagtttggatagcaccagttttgcccttgcctaaggggggggccccaaccggggcatttgcataaaatgcaaattggtttg

SEQ ID NO: 254089 - DNA, 189 bp, Gossypium hirsutum
gaactaagacggttgcttttcctcttgagatactgaaagactatgtgtaatgacaaatggagactttatgcacagcgcaaatgattatgctgaacgtttgagttcgagcgctacattgttaattccattcgcatattgaatggttaaggctgattgtgcaaagtgatggtattgtgttacacagcataa

SEQ ID NO: 254090 - DNA, 414 bp, Gossypium hirsutum
gccaaatctttccctttttccgtttccttcccttctcttagtaacagtcgtttctctgccggatcacaaaaacaaatatatatagcaaaagaccattgatatatatatatacggataatcatttgttttgattgttaaacggctttttaacgggtgttacgtttatagagaagaacagtttgtcaatcacatagatcatgggttttctagacaaactttgggacgaaacgcttgccgggcctatgccagaaaccggcctcggaaaactacgaaagtatggttcattttcagccgcatcatcatcgcctgctaccgctgatactagtcaggttatgataactaggagcattacgattcttaagagcaactctggtttgaaaaacctatctatggacccgggttcagctccgggtt

SEQ ID NO: 254091 - DNA, 410 bp, Gossypium hirsutum
gcggtggtcgccgtgtttggcgccggagaaaattggcgaagaaggatgaaatgttgcagtacaagttggagaggatgccgttcttagaggagcaagttcggaagataagggaaggagggaaactgttgacgatggacattgagagactgttgctatctgaggacaatcgttttgattttgtgaatgatgtagcggctgaggccaaagaatatgttgagaataaccgggatgaatatggaggttcgaagaaagctatacttcatgtgcttagtaaccgtgtcaatgattcggggttttaccggccggatgcttatgccgaatctgaccctttcaagcctggacctacttttttgaaggaagaatttacataaaaggttttaaaggtaacatatgtgttttaagactgtaat

SEQ ID NO: 254092 - DNA, 326 bp, Gossypium hirsutum
ccgcgtccgtccgattccggtcgcccacctcgagaagcagccatagtttggagagacaaatggttctaagacagttcatgcctctttggactacattcttttttcctagcctgctgggtttgctcttacccccctaccaatgccacccacccacaccccctctactcattcacaggagggccctaggatccctcacatagcgttggccgagtcttaacctatccatgcaccgtgttcaccccatgtgccatgctgtccctctaacggccttggcacctcgactggtgatcctttgcaccgatatcagagcaaacatttagcataac

SEQ ID NO: 254093 - DNA, 180 bp, Gossypium hirsutum
gattccaaatttttcccaaaagatgcaatttttggggaaaccctttattggtaaaaccttaaccttgggggtgaaaggtcttgttcttttggttatggtaagggttaaattcaagaccaaagaagggttccttctgaccaaacaaaggttttttttggccgaaaacaactctggggttgg

SEQ ID NO: 254094 - DNA, 411 bp, Gossypium hirsutum
atgctttgaggtagtaagaaggcctaaaaatggatcatagagacaggcagtctattgaacatcaaaagaaagatcctcaacaacacccccacccatgttttactaatttcacaacacaccatcagcagcagaaatgggaagatccttccctattagattacagcaccaggattgaacctcctttccagggattcaacccaaactgtcaaaccaaatcttcatttccatgtaaccccaataaccaaatcaaggtccctgaccctatcatgaatgagttgcttcaagccagcaaagtccaagattgggatccaagtgcaatgctaaacaatctgtcattcctggagcagaagatccatcagcttcaaggtctggtgcattccatcattgggagaaggggtcaagttttggggc

SEQ ID NO: 254095 - DNA, 314 bp, Gossypium hirsutum
gggcggaattcggtgaccacgcgtcgacttcacccgccgtgatttgatcagacgatatgccgatcagaaacatagcgggcggcgaaactctatcaatgcttagcagtagtggttatatcaacgtatttgtttgtggatctggtagctggttaatagctgccgcggtcacactcggtggttgtgcgctttactacggattgcctttgcgtgctatcgggtacattcggggcatgtgaatcgcgtacatcggttcgtggcggaacattactttacgggatcttatggatgtaactctggtaacgcgttgctgtact

SEQ ID NO: 254096 - DNA, 178 bp, Gossypium hirsutum
  unsure (1)..(178): unsure at all n locations
aaaaaaaccggaaggaacccaaagagnnaanacccgcaaagagcaccangagganccanccgnngccgaagaaaaggaacancaccanccaanacgagaagaacccaaggaccacaaggncncaagcggagacccnngggancggcgggnccaacaagaagcnccggaggggacccca

SEQ ID NO: 254097 - DNA, 253 bp, Gossypium hirsutum
  unsure (1)..(253): unsure at all n locations
caaaggggnagnagggnnccaangggggccnganggnaacanggnnggacacgaggccaanggcaagnncannnggcaaagnnnngaccanccaacnganacacncgnggggggncaggcgcnnagaaacggaggggcgacaaagcnngngagccgggcnncngcncaaaacaangnngacggagccnanagcgnggnganggagccnaaacagnnggnnnngcagnacaagggaangaacncnccnaaacca

SEQ ID NO: 254098 - DNA, 378 bp, Gossypium hirsutum
ccgccgtcgacgcaaccgtcttaaatggcctccgtcgcactcacctcctcctgccccctcggttactcacgtatcaaatcacttgctttctcttccagatcatgtccaaacccggtcttttcccctccgtttctcccaaagtccacttcacataattccagcttcattaaacagttaagtctcactccagtcataacgaacaatagaatccagaaaagacacagcaaattaactgtcaaagcggcggcatcaactccagccgccgtaactccgccgtcccagcaaccatggcaaggtgcagcattaaagccattgatagcctcgattgctacaagtgtcattctctggttccttcccgtcccatccggtgtctctcgc

SEQ ID NO: 254099 - DNA, 326 bp, Gossypium hirsutum
atatgacatgatcattgcatgttaggcatgctctcaattacaaccgaaagcgctgaattggaggactaaaactctattaatacacaacccaaaactggtgaacattaaacgaccggtctcacaaccttaatatacatactttaaatacattctctattgtacaaactcgggccaaaacacatgtgggttttaccttatttaaccattttacttcttaacgtcgcgtggtcgtatctgacacaaatgtatgctatagctaacatggcaaactcaactttgatgcatggaaaatactagctgatgcgtatgttaacacaaataaattt

SEQ ID NO: 254100 - DNA, 272 bp, Gossypium hirsutum
ccggaatcggcgacccacgcgtcggaggaaaactgggcaattgttacctgtttcttcgcaggaatggaaacttgtttcgagctgtactatcgtatcttcgaaaccctatcgtactggccttaaatgttgggcgtgccaaaaattgtacaccatttatgatctgggtcaaaggcagtaggaaaaaaagtataaaagctgaattaaatatcaataaggggaccccgaagttaagacgctatctataagttaggccaaaaaagactttgacattg

SEQ ID NO: 254101 - DNA, 421 bp, Gossypium hirsutum
  unsure (1)..(421): unsure at all n locations
caggngagaaaaaacccggtcgacttacgcgtccgcttcattcatacgaaagctaaaacagcattgcctcccttctttatgcgggtcaggcgtgattcttgtttatttcgcaattaaaaattcattgtcaggctggtcttgtaaaggaatgttataagctttcaatataaacattcagaatgaagaataccaaagcgacaactctaagccaacccttgacaaaaaaatttcatgtcgatgattatttgtcatcatttggggaaaaatgtggaacatatgggattgacagtgctgctatcgctgctgtgattgtacccatattgctttcctctatcatgagaaagaaaaaggggaaaaaaagaggagttccagtcgaagtgggtggtgaaacaggttatgctgtgcgcaatgctcaaaccac

SEQ ID NO: 254102 - DNA, 411 bp, Gossypium hirsutum
attttcttctctatcttaaaccttgttgttttgttgcaaaagatgagtaacaacagcattgcagaaagctcaaacacccaaaacccaatcctcaaattgctagattgttcccttagggtttcagtgattccactaagtgttgcaaccatttggttaactgtaactaacaagcaagacaacagcatctacggagatgtcaaattcaacaatcttttgggtctcaaatacatggtttgcaccagcgccatatgtgctgcttatgctttatttgctgccattgcctcttggatcagatattttgtcactaaagcttggctcttctttgtctctgatcagattgtagcatatttaatggtgacatcaagggcagcagtgatggaaatattgtacttagcatataatggggacata

SEQ ID NO: 254103 - DNA, 157 bp, Gossypium hirsutum
ctagattctataagcatttcccacttttttttttgtaggctatggatatatatatatcgagtgatttaagtattggagtattggcttctatgtaggaggtagttgcctttgtacaatgtaattctgccttttttaactttggtagaatttttgggtc

SEQ ID NO: 254104 - DNA, 394 bp, Gossypium hirsutum
gcagaaagggaaaattagaaaccctaaatatctgcccctttattcagtccaccattcagccaccactccaccactgggatcgatggacgatggtctatggtggttcctttacttctatgttcaaggttcgtcaattttaacctcaaagtcccccccaaacttcgatgacaacgaaggagatggggatttcagtggctcattcacgaaggtatggagcgtgtgctggcactcggagtagggtgcacagaggtcgctcgtggtggtcgtacggtgctgggggttggggtttggctgcggcgcaaaggggagaaaccctagggtttctttttgtgctttaattttgggccatttgggccttgtattactaagctaggttttaggtttaaagtcgcat

SEQ ID NO: 254105 - DNA, 239 bp, Gossypium hirsutum
  unsure (1)..(239): unsure at all n locations
gggannngcgggnggagaagacgagagcncancncncngcnncaaagcggcgggccgggnagaanncncgnacnacccccgcgnagnngnacnnngangaacaancgccanggcnncaaagcggannnngaaggaacccaaggannngcagaaagaaccacccacnncnnngagngcnggncccagagcngaagacangnngcannggcaagcaacaancangggacccncaganagcc

SEQ ID NO: 254106 - DNA, 411 bp, Gossypium hirsutum
atcaatctaagttgaaggaatgtagtggggagtcaagttcttttgttagcaattgtcaaattgctcataaacctgccaccatttgctgtgccgtagaagctgaggataattgcaacagggatggtgatgcaaaacacagcaaaatcattgaggatattcaacaaccaaggttaaattttcctgaaaaggagtttgtggatgtagaatttggagaacagttggattctcaaactgtggagacgatgttcctgttgggcatgagctcttcttgtggttcagatattattgatataaagccctgctccagttcttcaacacaatataggttggagcgttttctgaagcaagttcaaattatgaagaagtatcgtggtgatgcaaatgttcagcatgcttggcttgcttgctcta

SEQ ID NO: 254107 - DNA, 419 bp, Gossypium hirsutum
gaaccaaaagctatatctgtcctcacagacaacatgatgcagaaagctatgatggctgctacttcaagaactctgctttctgtctctcttctttcctctcccaaacatttctcttactacccttttctcaaaccctctagggtttttcgagggtttaaggctttctgcagtgccccatccccaatccccaccaccgttgatcctgacgacttgaaacactccatgctacttgaaaggcttagaaccagacatcttagacattctacgaaactcccatcctcatcaccctctaagcctccacaaaacctgcctgttttgggtcaagagaccgaggcttatgataaggggaaagggaagaagaagaagaaaattatggccgatagttttgaggagttgggtttgagtgaagaagtgatggg

SEQ ID NO: 254108 - DNA, 311 bp, Gossypium hirsutum
gttcaatgtgatctgcactcgcacatggattatacaacacctacaatactgtgggggcgcttacgacatcaacgcacaacgctagcttaaaaaggtaatcattttaaaattgctgaaccgaaactctccttgctgacagaaaattagggaatgctgagacatctagctgcgcctcctaatgagttatcttttctgtttaacggtcgttccactcttaaaactattctatcggaagtatgatcctaacctagaaagagcaccgtacgtcacttaaagttttttgcgcccccaacgccccttgtaaattcaga

SEQ ID NO: 254109 - DNA, 417 bp, Gossypium hirsutum
tttcgataaaaatatatatatttttttctcaccattttcctcttcttccctggcatttttctttccttttaatctttccttttctcttttcggaaaactcaacgacgttggagtatgagcgaagaagagtgggtcaaagaagctttgaccgattccatgttggcggcaaaggtgttactcagcctctaccaagcgtcgtctccgccgccacggtcagacagtgcttcctcccaggctttgcaagtcgagtggagtgtccgtcaacgtcggtctaagcaatctcttaagaagaaaagcgaaccggcacgagccagtcccaccacgccgctttcttggagtggtggcatttctgttagtggaggcggtagtgctgacggatccgaggagtctagccgtcctcctttgaagccggttgat

SEQ ID NO: 254110 - DNA, 376 bp, Gossypium hirsutum
cttccagcagcagtttccttggggcctatgcaacctcctgtaattcctgattctttggctactttgtctcaatatcttagccatatgaagcatgaatttgatggcattgcgaggaggagtggagatagagattctattcctgcatcaaattcaggaactatacgggaaggtcttccaacacctgcatctttggctgaagtgttacaatctaccaggcaaatgctcattgatcaagctggagaatgtctacaacaacttgcaaggcaactagaggatcaaatgaatgtgaccgacacctcagcacgaatgatcgctcagtcgaatgcatggagaattggagttctgctacataacctaagctcacttttacttgagc

SEQ ID NO: 254111 - DNA, 409 bp, Gossypium hirsutum
ccaaaacgctgtgctcttctacgaacccattactcttcacttccaaaagagcctatcgtcccaatgaaggacagcgcccctactacttcatctaggccagccaagtctggaggtggcaagcagaagacgggcatctttccattatatcttatgctatatatatagtggggtcgatctctctgcttttcaaaagttaaatatgaagcggtggggtctctgtcgttgaaccacacaattccggagtcagggttagcgtggggagcaagcgaacaacacgggtctgtttgctcaactttgctaggacacgcacatatcttgctctcatattaccaggttgatcacttccttaatcacctacacttgcctgtgtggtaacggaacactatcagggtaggtactgctagtgtta

SEQ ID NO: 254112 - DNA, 422 bp, Gossypium hirsutum
ctaatacatatgtttttttgttatcttatattactacaagactgcagtagtttcagaagaccagtagtttcagcttggcttggggctttcatttgatttcctttcaaatttttttcctccttcctattatatgttttagttaacccagaaaggaactgagtcaaagtgacagtagcagtagccgcagctaagctaacagaaaactcgcaatctctttcagtatagctagcagattaatggcagaaggcaaaggagagccaaaaaaaaaaaagaaataaacaattctgcttgctgtgctgttcactaattggaaagccacccaacaaagatctctttctctttctttttatcttcttctgttacaatttcagagattcgaccccaccctttcccccttctctccaactcatataacacctaaa

SEQ ID NO: 254113 - DNA, 293 bp, Gossypium hirsutum
ggaaaatcaaagttattcgctcctttgtctcagattcgagacgacaccggatgagtcggtatcactaggaaccacaaggcttacaacttttagggaagaagaaacccggccccaaatgggatagatgggcaacgctgatgcactcgtaaactacagtgtacggactgtatctggtacgggtaggaggggggatgatattgcttacacggtcagtgtgaggacgggaaaggtgatgaagtgtatgggctcaaaggctctggttgaggtatcgacaagacagggatggctgatga

SEQ ID NO: 254114 - DNA, 316 bp, Gossypium hirsutum
gaaaaccggcgcgcccacacatccgtacaaccataatttattcttcaacttctttttcttctacactccctttaaaagttgttttttttcttcaacatacacaaaactaaataatgctcttctacaccatctctcaaattttaatcaatccataatatgaattttaatcgaacaaattattattaagataagagaaatggctctctctctctccaacactaatcttttctctactcttgttctcaatcgaatctctaaccttatcttcacactagtatattcttctccatcacaagaaattgtcttcaatgtaata

SEQ ID NO: 254115 - DNA, 372 bp, Gossypium hirsutum
taatttttcttcactctgttctcaagactttgaaagatcagttcttgaggcgggtcttatgatggatggagtttctcttaataccgatccggttgttgatgatgatgctgatgctgatgaatttgaaattgaaggagactgtggaatggccaaatgtattagttaaagtggtgtaatacaaggagagaatccgcttactccttgttgtcggaatggaatttgattcgtacgaggatgtatattactcttacaattgtaatgccaaggaacaaggatttggtgttagagtaagcaatacgttgtaccggaagaccaaagaaagatactgtggcaaactaagctgcattagtgcaggatttaagaagaagagtg

SEQ ID NO: 254116 - DNA, 417 bp, Gossypium hirsutum
gtgattgggcaaccatcaggtagtgaggttggtgatagagctgcttcttatgaatcacggggccctagtcctcgcaagcgaagcttggaaataggtgccagttcagatgataggccacagttatgcacacaacaggctgatagtgttgaagaaactgtgattgatcgtgatggtgacaaattcaatgattgcagacaatattctgctggcccttccaaacgtgcccgtgattcagatttttttgatacttactgctcaccatatccaagagattcctctgaggcaggcccaagccattcggtgggttttgaaactcatggagatggtggcaatagagttgctctgtttaggcaaggaagtaaccaggttattgaaatcccgtcagtgagagattcaatgcgtgcgtcctctgtcatt

SEQ ID NO: 254117 - DNA, 187 bp, Gossypium hirsutum
cgacccagcgtccttttttatatacaattaatacccatttaaacccccacactcacagccagggcgaagcttttttcctacagaaaacttactctgaaccttatccaatattaaagaatcttcaatttataatactctgcccactaaactaccaagcctgatcttctatataatcgtctacagaaaa

SEQ ID NO: 254118 - DNA, 348 bp, Gossypium hirsutum
taaaaacttaaatattctctctcccaaaccaaaccttcaaatttcagcaagagagggagattgaacttacatagctcacacttctatcatcaatttaaggttatttaattatattcctcgtttacccgttaccccaattctacagatcacttcatattgttctattctttcccctgattctatcctctaagtttcatgtcttatcttgacatccatattactactgcctttgatccttttgctgatgcaaatgcttaatacacttttccttatgccaattgaattccttcacattcgtattcaacatctgaactatttgaaaagccataccacttttcatgcatataa

SEQ ID NO: 254119 - DNA, 394 bp, Gossypium hirsutum
gaagcagcatacacttactaagatgtatcatgtcggcgggagaaaaacccaggtcccttcttagttcttgctacctagactgaccattggagtgttaccacggtggagccattacttggcatgtgaagctgctctcctaatagttaaaaaggacagctcttgtatatgatcaacacaaaaagaaaaaaccgggtctatcggggcttccagctccataagaaggagcagcatttatacatcttgacaaacacatctgtatctatatctattgataaaggcgtaaacatggcgagccttcgctggggcgaaaatcatctgacacaaccaccatcggagaacactgaaaatccctcagaagcgaatgaggtgcaccttaatacttctgaaagacaca

SEQ ID NO: 254120 - DNA, 206 bp, Gossypium hirsutum
gacttactttctctctaaccgtttaatttattatagtactgacaaatcatggggagagtatattcataagatctgattataaagtacatgtatttacatattgctcattgtcttagttatagtgttcatggacacccttctgattcatacccttcacctccttactaatattcacctgctagtatttacccatcttaaggctatcc

SEQ ID NO: 254121 - DNA, 424 bp, Gossypium hirsutum
tggagaagcaagcaaccattagtttgtttgtttcattcctttttcttttcttcctttaatggctccttctatttcttctattttcatttcccacactttcaatgctttcgcttccttcactaactgctctaaaaacaacaaaaaccacactactccaccttcacaacataaaaatcatcaacttttttcttcttctccaggaaaagtgtctttcgccgctgcaacaggggagcttttcttgggaattgcatcaagatttattaaaagcagttccaattatgaagattcaggctctacaatccctgttttcagcagacccagaaagagaatcaatgggagtgaggctggaaacaatgataaggacagaattgggttagtgatggaggatgaaattgagccagaggtgatatgggaacaacgagtc

SEQ ID NO: 254122 - DNA, 406 bp, Gossypium hirsutum
  unsure (1)..(406): unsure at all n locations
gttttcctcaatttcctctcatctcctacaatttattatgtactatttttacaccgccattgataatatatataagtgtaattgcttttgatcactggttcacgagtagagtattgactgatagtgtttgcttagagagaaaaaaaaaaaggaaaaggagaaaaagctgtgctttgattttttatttggaggaatttgattagatatggttgagattcttggtgagattgagcctcctagccctgtttatgaggcggagctaccggaggaggatgaagaacaagaggagatcagctacgaagagctgaagaagcggatgtggaaggatcggttgcggatgcagaggttgaaggagacacgagagagttcaagttccgatcatcnagtcgnggtgaggcaagaagcg

SEQ ID NO: 254123 - DNA, 222 bp, Gossypium hirsutum
aaaaaaaaggcgatcatttctgtcaggcgaattttggttctctattaaatcctagatataaaccgaactgtaaaaaggaaacacaggatttcaaagatcggagtaattgcaagcagcgcagtagcctaaccgcactgaaaaaataatggactatcctgaaaattcacaagatatgtctgccccaccagttaatgttgctggggggggacacacaatatatgg

SEQ ID NO: 254124 - DNA, 276 bp, Gossypium hirsutum
gatccgttggtgagacgaacgatgcttgccataaccacctctcacgcacatgacgtgttacgaagctaaagtaacatacgtctgatgagatgtgcgctgatcataccaacatgtggatgggtggttcatgttgatcaatgctcatcgtgtgaggtctgattgttcctttagatgtccactttatgacagcctgttccacttgtgacgctgcacatactatgccttatgaatgggaggataagctttgcgcaagcagaggatatgtcttttatttca

SEQ ID NO: 254125 - DNA, 419 bp, Gossypium hirsutum
caaatttagattataagtatgagcagcaagtgccctgattctccaatttgttcccaaaccaaaggaacactattttcaccaatatggacccaaatatgccgaaaaaaaacacaaacagctgttggacaaataaccatcaatgtggcatgcttagactctttcccttgtgacaaaaaaaagtgatcaaagctatgctgaatcatcttagcaaaatggatacctatcttaatgtgaaggaaccattgagctttggagaaggaagttcagattagagctatttatctgaagtttggaattaatgcctaaactacatagtcatggttgtataaagttaaattacaaacttagggcatatctgtttcccattaaagcatcatacacttgtttcataatactttaatattgatcttaaactggaa

SEQ ID NO: 254126 - DNA, 418 bp, Gossypium hirsutum
ttcatgcaaaccatgtgctacggaggtgctatgactatgacggctccgccggcgagcggaggctccgcgtttgcatatactattaaggatgtgatgctcgagagagaaagcgagctgataatcgaggtgtgtaatgaaacgccgcttaaacttctattactaaacgggtcagccgagattctggtatgctaattgtgcccctgagatgcgaattactttccccactcacctgaaatgtcgctagttgacacttcgtatggtgctacaatctacatggatggtgctactgaagactgattatacagcagatgagacacctatggtcagatacgtgaatgtacatgctgtactacaaggactaataagccgttctgaagctcagtcaccaaatgactatgacgcatactagggacccaga

SEQ ID NO: 254127 - DNA, 358 bp, Gossypium hirsutum
gtgtgttttgtatttcatactcatttagcccctttcattagcatcgaaatcactccagttttctttatcactgaaaaatgtcttgctgtggtggaaactgtggctgcggttctggctgcaagtgtggcagtggctgtggaggatgcaagatgtacccagacctgaacgttgccgagatgaccaccactggaacttttgttcttggtggagcaccccaaaaaggcccctttgagggagctgagatggaattcgggctgagaacgctgcagtgtgagacactgccctgcacctgcaatgaatgtagagccaagccagctctgagcaaacccttgcttaaaatattgttgtgtatggttta

SEQ ID NO: 254128 - DNA, 255 bp, Gossypium hirsutum
gcgaaacgtgttgaaagcctgctggcttttgccccccgcagagaggtcggttttactagctactccttctttacctaaccaacttctggatcatgagcttcccagggggaggcctttcctagatgtgaagcaaccacaacacaagccattccatgcacaccgaccgacaatacacactggacctgccggtctaggtcaggagccaccacatggtgaaacacctactcatagaaacttattgagtgtggaagttgc

SEQ ID NO: 254129 - DNA, 398 bp, Gossypium hirsutum
ctttgtatgtatctcttggtggaggaatgcttgtcacctactctttttttagttggtcagtccctttaaaactttctctcacgacacagtccagaattcacacactttcagacatacacagacctgtagaactgtgttttctctgtttatcccactccttttttctgggcaatggataaacataagtgtaagttgtgtttcaaaagctttgcatatggaagagctttgggtggtcatatgaggtctcatatgttgaatcttccaattgctcccaaacttgcagaacaagaacgatcgggattaccacgaccaacgaatcaactcagccaagagtcagagtcagagtcgggttcggcatcttattccgcgtcttcatcggaagaagaagaagaagggga

SEQ ID NO: 254130 - DNA, 422 bp, Gossypium hirsutum
gttctagatcgcgagcggccgctcgcgatctagagtagatcccatccaacctcatggttgacacaaaataattacattccaaagtttttcctttttctttctgaatgttcggcaccgtgaaagtttctgtttcgagcttggcttgatactttacggcgtcgggatcgttcaaaatccaaccttgacgttgtttaaattagggtttcatcgaagcgaatggaggtttagttttccctttttgtttctgagaaatttgaagtgaatcaggacgtggattagccagcagtatcagatgtgaagctcctgtatcgcgggaaattttgaagctcagttcttttggaataaattagaatcaataagaaattttaccaaaaacaggaaaatggcaactccaattgagccccctaacggtattcattacc

SEQ ID NO: 254131 - DNA, 435 bp, Gossypium hirsutum
cccgcgcgtccgaagaaccctaatcctaaaacatctgcagccagatactccattttggtgcctccatgtcttctctacaaacaattcgtcatttcagtgctccggaggatgcccaaatcttctccatgaaatcaacagagaatgccccttcagataagtatttgaacttgtaatttcagatcctagcaacaagatttcgtggatctaaggtttcatggatagaagactaaacccctgcatttccccctgtctccgcagtccgttcctctacaatgaccagaacccagacaagttttactcctatctttaagcccctctttagccaagggtctatcttatgcctagactggtccaaacatcaacagcaaaagggcactccctaaagacatgctcagtgtctcaagacagtcggagcattgtatgcagttagttgag

SEQ ID NO: 254132 - DNA, 383 bp, Gossypium hirsutum
ccgggattcgcgcctcgccccacgcctgcgcgcgtgttttaatagatgttctccccccttttccttttttctctttctttgctattatcaatccttatcttcttcttcatccaaacgaacccattaacacatacttcttttttcccttggatcaaactttgttttgaaatcttctgggttttgcatgaaaatagtgttttcccaataagaatcatctatgacggtggaaactggtggattggtggagcaaagcaaaaataatatcacgacgactgtaaagcatgtaaacaacagggttaggtatggtaacaagacggagaagaagaacagatcatataagaagatgagaagaggaggttgtgtttccaagagttccggatgta

SEQ ID NO: 254133 - DNA, 137 bp, Gossypium hirsutum
ccgtttgaatggatcattgtagtctaggctagtcagcaaacagaatccgtgtcctggggaaaaggaacgactctgaggactggacacagcagtaccagtccaaaaatcttcggctgtctgcgcacgtgtaaagctgc

SEQ ID NO: 254134 - DNA, 391 bp, Gossypium hirsutum
atcaaatcttttgttttagataagaactttgctttaagaccaaatttttatttttggaacacaaataaagggtctttcttttttctcttttttacagtggggttgtgtttgtgtttgtgaatttggagttggtttagaggctgaagaaaagggtactaaagaaaattgggtgtttttgagggagagaaatggaggggaaagtttgtgattttacagtgttctgatagattgaagaaaaggatatccaaaaaagtttgatttttttaatgaaagatcaaaggtgcaagtaagaattgattccaaacccctttctatatctttttcgtttcattttcctagaaattttcagagagaaaatatggcaacgcttgtggagccaccaaatggggtg

SEQ ID NO: 254135 - DNA, 425 bp, Gossypium hirsutum
gaaaatccaggcggcttgctgtcggagttgacggctaacaaaaattcatcccacgcccccccttacgaagatttcgaagctgctcctagaaaacagccacaacaaactcccccaaaacaatatcccgattagagaaaaaaaaaggagggaagatgggcgtgaagcaagctattaaaaatctggatgcgttttcctcgcgcggaggaacatctgctgcagaagacgcaatcgggagcattagtgtccatcgttggtttagtgataatgaccacgctgttctttcacgagcttacctattatctttcgacgtacactgttcatcagatgtctgtagacttgaaacgtggagaaacacttccaattcacattaatatgacatttccttcattaccttgcgatgtattaagtgtagacgccattgacat

SEQ ID NO: 254136 - DNA, 241 bp, Gossypium hirsutum
aaccatactcactgaagctcggctgtgattgcgccaaatctcgttggtttgagtataatgaactgaagacactcagaggcgtgaaagaagagggccaggtacgtcacattacgtcgttctgttgttatctactttgctccattagctggtagatgtgtatatgatagagaccgagctcatgtccgtaagctcggcggattttagggctatacgacttacaatggctctaagacagctgttg

SEQ ID NO: 254137 - DNA, 407 bp, Gossypium hirsutum
ctctctttagcactcagttatttggtttcgtctcatacattttcttttttctttttcgcttttttctctttggctgggcccgatctctgccacagccagcgatatcaacagggctgcaactgcttattatattaattcctacccttaagcgccgagctccctactctcaccaaatgctcccttcttttcccttctaataacctctctttgctgcttttcttttggcctttttttttcttttttttttctcttgctggttatggcggaggttttagacgacggtgagttttggctttcgtcccagttcttaaccgacgatgattttttcgccgacggagttaagactaccaacgataccaatagtcttaaagatgggttcgggttagagcttgatggtaacaagtctt

SEQ ID NO: 254138 - DNA, 307 bp, Gossypium hirsutum
aatgctctcaacttcctttcctgactgtctcgagacacttcttcctcttttctgttcataaacacttaccctctgttgcaacccataatcgtcgagatgacctgcagagtcaccagcttaagccctgggagggctagtctcctttggaagatgcgcggctttttgaccaacaagcgtagtcctaagaagcttgggtgtaggcacaagagatcgggttgcgcgccaactaaaatgcccgatggtgctgagactctcgacactgagaggaaaagttgcccgttctttgcagcggtatgggtgaggatcc

SEQ ID NO: 254139 - DNA, 317 bp, Gossypium hirsutum
cgaaatgaataccaatactgttaacggttttactactccggaatggacgcacagcacgggccgtttttatacccaaggcgcttagccgccgatccgggcggaagacttgcaggaaggagtttggtccgcacacatctttaaaagatacaaaggtatctaagatagctcatcggtcagacatctccgcgaacatagggtgaaagctcattcgatttcatgcagctcaatcgaccggaaagctgcctataatcatttagaccttgctattgaatctagaggcgtagactagtaccacaggtgactgcttgatgcagcca

SEQ ID NO: 254140 - DNA, 421 bp, Gossypium hirsutum
ctcttccaactctcttaaaactcaataaattttcttcttctttttttgttttttgttgtatttgtattctctcatcaatatcctttgcatgtttctaccaatgtcttctctcaaaacccttgctttcctttcaatctttcttcttttgcatcttaagattgccaaaactgactttctatccccacttttatcacccttatttgatgatgtatgcaaagaagtggaatgtggcagaggaaaatgcaagccatctattaatggaacattgcctttttatatatgtgaatgtgatcctggttggaagcaaaccttttctgataaagatgatcatgctcatctcaagttcctcccttgcattgttcccaattgttcgatgaacaatgtttgttcggcagctccatccccggcgcaagagaaggca

SEQ ID NO: 254141 - DNA, 343 bp, Gossypium hirsutum
ggttcacggtcattgcactttgttttctcttttgtgaatgattatggaagcctatccgatagcaattcctgtgcgagcttctaaatgatatctggttattagtgttgaacgactacacgataattgaccgaaacgattgaaatttctaccactcattcttgaaccattgctttatcaatatttgaggttaaactgcctgtacacaatagtgacatttaattactatgtagggtacatcatgcagaagagcacgactacgcatcgtaataagacagatgcaatccatctgtatttactattaaatatgctcatggggcttgcgtaccacgttggactaataact

SEQ ID NO: 254142 - DNA, 427 bp, Gossypium hirsutum
tcccagtgtaggtgatctcctatcgcactacaccattatatgatgtacataatatctcttctgaaatcaatgactgggacctcaagttcatgtttcttcaagaaactggatttgcttcgctccaagaactgcatcaagaaactggatttgcttcgctccaagaactgcatcaagaaactggatttgcttcgctccaagaactgcatcatcgtttgcaaatgtcatgctctgccagtttcttttgaacataacaggatctgatgaatggataatcaagacggatcagtaaccttaggaagatcatgctggtgcatgatatgctaaggaatttcggtcgaaaatttttatcgttttcagtaaccaaatccggcttgactgactaatttttagggtgatttttgatgttgtccagcagcattccaagttg

SEQ ID NO: 254143 - DNA, 420 bp, Gossypium hirsutum
ggtggcttgtgttgtgagtgttcgtttttgctgcaggcttcattgagatgtttgtttattgcatcaatctacggttggtactgcatctgggaaggttagacatgttaacggtgggcaatcgaattatatggattctaaatccatgcaggcatgtttctatctgtgaaatctgctccagaagagtagttgcatactgaaagaagttagttcagaggacgtggaggatccgagggaaacaggaactacaaattttattatggatctctcaaggtcgtaatatgcctacccctaaacatgattcaccctcttattggttactaattatggtgtagacggttcaatagtcaaaactgttgatgaatttattcctatttgtggttgcaccttttatagcctctttaattcaaccctcttattaca

SEQ ID NO: 254144 - DNA, 227 bp, Gossypium hirsutum
gaaaattgccagaggagtacatagtgtgcttttcaaaacacttaacactgacaggtggctgatgcataaaacggagtttgcttcacacttcacaggattgaagaaagatggggcacaatggtgggtcgataacacagacatcaaactttgtggacttgattacctatcaacttgtgcttatgttgatgctgccacaactcatcatatatttgtaatgaagagggaaa

SEQ ID NO: 254145 - DNA, 339 bp, Gossypium hirsutum
atggattaaggtgtcaagaaaagagaacatgagttctgttaccgtatcttcgactggattacttcacatggctgatgtcgagtgccataccaagcgatctaaatcaactttcggctcataccttctgcctcctgctcgatgacatcacatgattgatcacactgcttgtgtcctgatcggctgcggcatacatcccggatatgtaatgggtcttactttgcgaaacaccggggagcttgcaatcatgatactgtctaaagtccggggacagaccaccgtcgatcacctgaacgtaacttattctgaccaggaatttgacttgtacgttactgattcaga

SEQ ID NO: 254146 - DNA, 240 bp, Gossypium hirsutum
  unsure (1)..(240): unsure at all n locations
caaaaacagtgttcatcgcatctaactgtttgaaacctgttcaattcagataaagctaaagcattattcgagcctcttaaatggggaacgaaactgttcctaccatccactcactctttctttcgcatttttgactcgtccgcgcttggggtcgtatccacccggtcccctgctgtgctaactatngctcgcgtttactatggggtaaaagagtcgagcgttaagtctctactctggtcc

SEQ ID NO: 254147 - DNA, 399 bp, Gossypium hirsutum
ggaaaaatcaaggccaacgaagtccctggtctgccgggtgggtgatatcgatggcaccacgtccatgaactcgtagttcccggcggttagaccaccagaagaaccccacttggtcttgcagatcgctgcattgtagccgacctggcgaagattagccattactttacgcctgaaaatagctttatccgtcttgaaaaacgaaagcatttctattgcattcaaaacggtatccgcgagccgatttaagtaagaacccgtgctgttaagaaaggacgacttgatcatgatctggagggagtcagcagcatcaatgttggagtcgactagttcagattcggatcggtaaccggtttgttcagcggcaccgtgatcatctcccaagaaactatgaacgagttc

SEQ ID NO: 254148 - DNA, 301 bp, Gossypium hirsutum
atggagcttgcgtgtttgcctaaagaatcctgaacttgacttcatagagaaaggaaaaacttacgcagggagcaaccgaagatctatctgaacgggctgatctggctgtaatgacggagagaactgctcaatatacctgatcctgagatgctctgagaagacatcgaacactcagaccatcctatcccgagccgcgccaacgaagaagacatgtcgagtaccagaaatgggcactaccaaagcaggacatgcgtgcaattggagatcgagcatgaaatgctattcatacacctgttgcaaa

SEQ ID NO: 254149 - DNA, 398 bp, Gossypium hirsutum
ctttttctcctaaattctctcaccttcactttctttcaatcatcttacctggggtaacaaactgctgctgaaaactatttctttactattttgattttgtttttattccagagaaaaaacagaacaatttttcttatttaatttgattcattgttttcggccaattttttcccagccgttatcttttatttgattgcatatagatgtttgattttgcctgttgattactcttcttctctagtcaatgtagctgggttttttttttccttttctgaattagggtttcagttttaaaaaattggggattttgctatcaagctgtgtagttgaggaaactggaggagcctttctgataattataatgataaaagtttgtttttttctttgttgtgcttaga

SEQ ID NO: 254150 - DNA, 283 bp, Gossypium hirsutum
ctgagagaggtaaattaggttgttgaacaaggctaatttcatagcacaaaaaggtgttgaccctactgttcattggtttttcaaggccctgccaaacttaattcctttattaaggaccccttttccaaataaaacttaaaaaaaacccctgttttttgtttccccattttttcaaaccaaaccaccggccacttgtttaataaaaacaaaaccttccattaattaataaactcttccaaatgggaatcgtttaattcccagcagttatgaccagaatacccaa

SEQ ID NO: 254151 - DNA, 262 bp, Gossypium hirsutum
ataaaacaataaaaccacaaccttattacttatttataactaatctactttgtttattattattttttataacacctttaacacacctaataataactttatatatcatctaaattttatacatactttataccctaccacaccatatatatccaattaaaaataaatattactaccttctttacatactttaatcaccatttcacttccctaaatctacactctctatgactccatataaaaaataggttactcactcaca

SEQ ID NO: 254152 - DNA, 245 bp, Gossypium hirsutum
cgcaaaaccctacaattggactggttgtatttattgataccaaatcatcccgggtggctctcaataaaacgataccgtctaccgcgacaattcatttgatttccagtaagaacggcatttttaagcttaagtatccggttactgcaatttgtattttgttgcagggcatattgggaaggcattattggaagcatacaaaacatgctcgtcctgagccacccccggtagcacaacaacaacttaga

SEQ ID NO: 254153 - DNA, 366 bp, Gossypium hirsutum
gttacttcctcacaaactaacaatccttcaaaaatggctactcttcaactggcgtccatttccaaattttttttaacaacccacccaacacagaacgataaacattccaagacctatactatcattctctcccccaccaaataagttactgtccaaatccaaattcaattactcataaaacaaacttaataatgataataatagcattggacaagtactttccatcaatgacatatataataataaccctaccaagaacaataattattatatatgtctcctctaccaaacccgaaccagatatcataacatatacaaataataccccaacactactctaaacttaactcttcaacaaatttacac

SEQ ID NO: 254154 - DNA, 399 bp, Gossypium hirsutum
gaaaatggaagctagaaattttggtaaaagataaacacaacaactcctcccctttggctctctttcttgcttctgccaataattttagatcgaatcccaaacgtaactctattctcttttgtgttttttattagattatttttttgtttcgtttcttagaaggaaaaaaaaagtcatttataaagtcaagtgtttgggaactttgggttgtttacgaaaaagaacatgagcaaagagattgtaaaggaagaagcgccttcctcgtcccctgttgtttcgggtagctttgcttctctgagaagcgtccgatggcgtattagtctcagtattttgccttcttcttcttcagatgatgatcttcgcagggtaactgctgattctcgccgaagatatgctggg

SEQ ID NO: 254155 - DNA, 403 bp, Gossypium hirsutum
gtaccctacagtgacagcaatttattcttcttctttttattatatttgggttgtgtgtgacgtataagcagctaaataatcatcttctgctcttcattgattcttacaaatgctaaatctgctttgtttgaactctagttcttgcaaattgtagaactgaaagaggtaaaccatgaatccaacaatgttattgcaacaatggtggcaactgtttaattcaactgatgtgttcaaccctctcaccttagttcctcttctcctcaccattagttttctctttaagcttttaagaacttggaagctcaatctcccaccatctccacccaagctgcccatcattggcaacatccaccaagttgggaaatcgccccaccgatctttccgagccttgtctgagaaatat

SEQ ID NO: 254156 - DNA, 323 bp, Gossypium hirsutum
  unsure (1)..(323): unsure at all n locations
agaatgttcattcttttgggaaagtagtatttatggatacacaatctcgtaggtggttcttanatctgtgaaactgtcaacccacgactctttattggcgtttcagggaaaactcgcattgatgcgcttaaggatccaaataccgcaagatgcactgattgctatggcagattgattgaacagatcgagatatcaaaatgaagatgcacgtgcgattacacccgcggcagctcacgctaatcctagtcctggaaccgatcatctgcggctgggacatatgagagcaaggaatcggcctgctattaaccttgatatagggttag

SEQ ID NO: 254157 - DNA, 402 bp, Gossypium hirsutum
cacgtttcaatggcgttactttctctctcctctctcagtcctctcgctccgcgatgtccgtcttttcctttgcaacttcaaacgcgaatctctttctctcgtgccagaatcggagcgtcttcgacttcgtctccgtcgacttcgcaagtgattcagcatgcttcttcgaatccgaaagtcgtcgtcaccagggaacgaggcaaaaacaccaagcttattgacgctctggccgaacatgggatcaattgcttggaacttccccttattcagcatttacaagggcctgactcggataggcttgcttctgttttaagtgaaacggcgtttgactggattgtcataacttcacctgaagctggttcggtctttcttgaggcatggaaggcagcaagaacaccaaat

SEQ ID NO: 254158 - DNA, 339 bp, Gossypium hirsutum
ggtgagtttaccctttcttcctctgctttgatcttgtttttcatgtaaatcagagccccattttgtttatctgcctaaaaaattcatttcttctttcttaagctgcaaacgagaagttcaactcgatgatcaagacctttcctttttcactagttaatgtttgggatggttgaataaaatctccaaattcttgatcttaagtcgataatctgttgaatttcctgttggggtatcctttgtttaaatctcgaagcttttcagctggatttctgttatcatgaataactatccatttgggtcaaatagccctaagtccttcaatgcctatccaaggggggc

SEQ ID NO: 254159 - DNA, 216 bp, Gossypium hirsutum
gaaaattgttgtcgtattagtatgttctgattgctttatctataatcttcctgtgccttctcaatttcggtgagcaaagtttcaatcgacaccacctccaattttcctttttacaaaaatggcttttactaatgaagggcctgcctggcctccttttatggtttcaactaatatactgttacaaattctggcttttgcattatataacaacttggg

SEQ ID NO: 254160 - DNA, 396 bp, Gossypium hirsutum
ctgcaatctatcttctaatttcgagtcttccttgaattttctttgccctgtggtgcttttaaagttcaccagtaccactctttatttttttccttcgttttcactgggaatttctctgccacaagtcgagatttcatttccaagtaatttgttttccttctttactggggttattctagtattcacttcgcaagatttgaagcaaaatccgtttccgtgtgatggatactcacgaccaaattgaagacaaaacatcgcccaatgcttttaaatctggcatatgcccccaatctatgacattgaaccagttgcaggagttatacacatttaatcatgatcacacacccaaggctagaaaaccctacactataactaaacagagggagaaatggactg

SEQ ID NO: 254161 - DNA, 401 bp, Gossypium hirsutum
agcacgcatgggtgtctctacataaagagctagctcagcgccaattaaacaacgagtatcagtccaattttgcacacccaagctatctaatgtacaaaccagactggtactctccttttaggactcatatgtgaaaagtatgatcctacctgcacacaaatatgtgtttgctactgcatgcttgacaacaatctatcaaattcatctgcagtcaatcaactttacaaaggaaacaacacacccgcgattaatgctgatctatccaacatcaacaagcatatacacgctctatagaggctccaacatacaaataatattacgcgatcaaaatgatcaactacaaaaccttgctgaccccaacaaagcacaatcatagttccaatcaaagagctgagctcatt

SEQ ID NO: 254162 - DNA, 128 bp, Gossypium hirsutum
atatgacatcgttctatcatatcgaccactagatacaggcactgaatcagaggtggttaatgccgattaggtatcacccacatcatcaatgtcctatactggaccaggtttcgttgtatcttctctta

SEQ ID NO: 254163 - DNA, 404 bp, Gossypium hirsutum
gttgcagaaaactgcaaaccctaattatcaagaaaattgcattccctacaaaggatcttcatggcgaagaagggcaaggccaaatcagcaaaatttgagatcgaagagaacgaatcgggaccattagattcgaaaccattgatggtactaagcattagtgacgacgaggaagccaatgaagacctaagcttgaagatcgtggagaaagcactattggtgaaagcgacgaggtttagtgaaggatgccacggcgtttccgatgacccaggcgtcgtttctgtggtgggtttggcttcgtcgtcacgcgggggatctgatgtagctggtaccagtggtggccgtgaacaggcagatttggatttggaaagtaagaaaattgttagaaggaaaaagaagaaaacgaa

SEQ ID NO: 254164 - DNA, 340 bp, Gossypium hirsutum
atcgaactctacttttcctttacacgttccttttcacgcacccttcacagttgtgtgcaaaacccacttgtccttttctatttaaatccctttctccgtttcaaactcaactcacggccaactctatcccatctgccagacctgccttttttccattcccactcttccaaacctcacacgttcagcacctaatttaccacatcctcttgaactactgctctgtgtcaccagcatccaacttcgatgtgaacaacgaggtggactcgatccacctcaagtttgcagaggcaccagcaccaatcccgatggcaatggactctaaaaagaccgtttatttcaa

SEQ ID NO: 254165 - DNA, 405 bp, Gossypium hirsutum
gccatctttagcttctaggctgagttcagatacaccaacgatatcagcatcacgcaggatcagtgtcggatcctccattgtcccctttccaaccattatcacctgatattgctcctttgttgccatctcctggtggagtggtgcctactactggctcatctatgccaaccatccctttcaccccaagtccccctaaccccgacgacttcatcgcccccggtccaacctccgcgttcccaccgttcggaccattgccggtttcttcttcatctccaatatttttgctttcgtctctacacttgacaactttttcggttctggtagtaccttactacttactgcacctactgtaaattcatttgttgattgtaatactttactctttaatttgctcatcttccttca

SEQ ID NO: 254166 - DNA, 407 bp, Gossypium hirsutum
gcagatctgtagttgctttgcttttatcgttcacttcagcttcgactcaaaggcgtgactcaccaatacattggctttctccaaggaccagctgcttgatcgtttaaaggagctttcaaatagaattttcccagtatgaacatcccgttgttttgacagttgagctcaggcaaaatatgttgggaatttgggaggtgcattgagcaaaaaatttgttcttgaaggacaagaaacataggtactatgttgtctctgctcttgcagatacaaaagtagatttgaaagttttatctcagaggcttggtttagggaaaggtggtctaagaatggctgcagaagaggcactggttgagatacttaaggttccacttggatgtgttactccatttgccgtggtaaatgaatct

SEQ ID NO: 254167 - DNA, 191 bp, Gossypium hirsutum
  unsure (1)..(191): unsure at all n locations
tgcctnaaaataaataattaaataaataacggctttttcttcagaaaacaantaagggtggtcgctctcttcactaaatggtcactctctaaaggcagtacttaattttctactgctccaagtaatatcgcgctatgtaaattctcattaagcaacaagatgagcaacgaccttttttattggctgatact

SEQ ID NO: 254168 - DNA, 147 bp, Gossypium hirsutum
tatttaaaccctaactttcctttaactttgaacccgggattaacaaaatcctctttcaaatgggaaattgaaggagaacccatggagggcacttaagggaggatccaggtcggtttattaccgaatttaaagcgccatataaaggtt

SEQ ID NO: 254169 - DNA, 414 bp, Gossypium hirsutum
tttatcaatagtgtttcaaactccagtttgcttctccttttgctcataatttcatctgtgatctcttctttttctttgctcttttagccctattttcctaccctcaaattgttgcagtctcgtccatctgaaacaatttgctaaatattattatcaatatgttccttctctaaatggagaaacaaatacaaccctttttcggtgtctctctagtttgattgtttctttctttcaatctctttgttattttattcagttatctgttatggaagccatgcagaatcttgcatttcatcattgcttgagctatcatcgtcacccatatacctgaagttcgaaaaaaaggctttgaaactgttctccctccttaattatctatctaggttctgtgaggtaatcctgatcgggttattt

SEQ ID NO: 254170 - DNA, 335 bp, Gossypium hirsutum
gccatttcgaaaaccttatcttttgagaacgaagtttaaaggaaccacaccagccatgtctgcaacatctgcctcatctcttattctcccatcgctcaaacccaaagttttatctttatccgactcaactcccaattcactttccctcttctccctttctccaaccccccatgcaaagcctctcttttgttctgctcttccaagtttccagcttttaaccaaaaagtcctctttttcttccaggttccttacaaaagttgccgtttcttctgagtatgaccaggaagaggacttatttggcagcgatgatgaagaaaggtctcctactttctccc

SEQ ID NO: 254171 - DNA, 320 bp, Gossypium hirsutum
gctttatttcctcttttgttctttctctaacttttgctctgcatctaactatatatattttgctcgaattatttccatccttcatacattatagaggcttttttgtttctgtttgcttatttcgattggtggattgatggtagctggcctatgtaacgtgtgccacattcacagatctaagtttgtagtcatatcaccgacaactgtcccgggctggtaggggctttatataactataccgaactctaactgaatagtgaatgaatgagcgcaatatagatcccttaccgaggatccaatagaggtcgagattgttgcca

SEQ ID NO: 254172 - DNA, 395 bp, Gossypium hirsutum
ctcgtaagtaataaggataaacaaaaacccttctgatcattaaaattagggttttagcaacaaataaaagcaaccatcaccgatgattcatgcagcagttaagctatcgaaatcggtcatttccctgtctcgaacttcctcagtagctgcaacttcatcgcagcctttgagattcctccacgatggaaccaacggtcccagttccaacccagtcgctgttcagatgatcaattacgctctgtcacatgccaggtcccagaaatcagatgaatcatatgctcaaggcatgttgatattggagcagtgtctttctactcagtcaagtgaaagtgaaggtcaatttgctcaaaattctattggagcggtgttacttgcaatgtctaatttgttatatg

SEQ ID NO: 254173 - DNA, 232 bp, Gossypium hirsutum
tcggtggaagggtagcctctttcttattggttcaagaactggttttggtctgatccggtccgattaaaatatgaaaacatttttgggagagcacccaagaaaagcgattatacccaattcttttagattttgggaggttcgaaaaacgcttcttaaggtggtctaaagaaaggttattgaaaagccggtattaagaattattccgattaagggcgggattcttgaaaggtta

SEQ ID NO: 254174 - DNA, 197 bp, Gossypium hirsutum
tttctttccgacaacgtctgtgatgtctgccagtgctacttagggcttcgtcttcttcttcttctttcttcatctccatctttatcttcatttcagggttgttgggttacgtttttttcctattggttgggacgaattattgaatcatgagataaccttcgccgctggaacggctgaggcagaggtacatctctgca

SEQ ID NO: 254175 - DNA, 394 bp, Gossypium hirsutum
cttcaatcctcatagcaattagctatggcgactaggactttttttctctttatttgattcttctcctctcctctaagcccggtcttttctctttatgaagatcaagtaggtctcatggattggcatcaacaatacatcggcaaagtgaagcaggcagtgttctcctctcaaagagctggtcgaaaacgagttgtagtttccaccgaagagaatgttattgcttcacttgatctccgccacggcgagattttttggagacatttgcttggggctgatgatgttattgatggaattgatatcggtcttggccaatatgtcattaccctttcatcgggaggaagtattctaagatcatggaaccttcctgatgggcaaatggggtgggaatcttcac

SEQ ID NO: 254176 - DNA, 397 bp, Gossypium hirsutum
aaaaaagttatacatacttcccctttcttgcggttctctctctcttccactaactttttttttttggtccacagctattctgatcgaaaccaattaaaggaatcgcaggtgggactgatagaggtttgtgtattgcctgcatggagacacccgccatggctacgcagacgcaggcaccaaaacttaatcagaaattgaattattccatggttggtaaagagaatgatatgatgatgataggtggtctaatttctaagaagtctggtattgatttgatgcaaaactgtgatctccctccacctctcaaggtgtttgctgggttggataaggcggtggagttgatgtcgttgaataacagggcggtttatagcatcatgggacaagaggacgattaaaa

SEQ ID NO: 254177 - DNA, 155 bp, Gossypium hirsutum
gcgcgaacttcatcttcatcttaatcttctctggtcggccttccaggaaaaggaattcaaggtcggagtcttggacaggtttcttttgggtagctcctgttgggccaacacttttgccccccatatggagatcctggttacggaaggtcttaccg

SEQ ID NO: 254178 - DNA, 267 bp, Gossypium hirsutum
aaaatccccctttctgaatctcttctctcaaaagtgtgaaaggaaaaagaggagggcaacagagtctttgaaacgatgtctttttcgtctcccatgaggaaaacctcctgcctgcccccaatatgaagatcttgttcacgaaagttctaacgaacaccgatgtagagaaaagattggcggttcccaacaattcactgaagcatttcgagcttgaaaatggtaattgctccaaaatttttggagttaaagatgaaaacggaagcacat

SEQ ID NO: 254179 - DNA, 222 bp, Gossypium hirsutum
ctacttaaccatttcccaaatctcctccctactcttctttaacgtggtttttatttccgctcatgcagcgcgctttgaaatccgtaatgagtgcttctacaccgtttgggcacaacctcttcttgcggtagccgtcccctagacccttatcaaagtttgaccattgatgttcctgctggcactgctatggcttgtatttgggggtcaaaccaattacaattt

SEQ ID NO: 254180 - DNA, 217 bp, Gossypium hirsutum
aattttcagtcgtcttctcttttagtcctctcgatcccaaagcaagctctcgagtccgaatctctccgagaggaatgcagatcttggtgaaacccctacctgttaaaccaataaccctggagggggaaggttccgatcttttggttatggcaagggcaaaattcaagaccaaggaggcgtttcttcaaaacaaccaaagcttatttttggccgaaaa

SEQ ID NO: 254181 - DNA, 200 bp, Gossypium hirsutum
gaagacgggtaattatattcataaaggtagcgtttgaactcgatcttcaatccagagtaactaactcagatcgaacctgaaccaagccctttctgagacgctgtacatttttataacctatgaccactcagaacttatactgatcggaaggggtgtatttatatgacatacaacgactacggcggatagtttcaccatac

SEQ ID NO: 254182 - DNA, 105 bp, Gossypium hirsutum
ctcacatccttgtttcatggcaacacctggcagaattcccataaagttcactgatcgacgttgcgaaccaaagcttgtcgctctagctcagcctacgacatctga

SEQ ID NO: 254183 - DNA, 265 bp, Gossypium hirsutum
gccgaactgagctatgtctgtatatctgtctgtctctctctgtgtctactatgcccctgcatgggcggctatggtaaaatgcgcgcgtgtgtcggcctatgggatattattatgcgccgggggctcggaagcgaaggtcagttagacgagccgtaccgactctgatgagctatgcatcattacatctatgacggagagctccttaagctcaaactactcaactcttcaggtgctggctttgcctatactagcaaggatctatttg

SEQ ID NO: 254184 - DNA, 425 bp, Gossypium hirsutum
caagaatccattttccaaatcccccattttgcctctcaagccctccaagaatgtcttcaagcatccctccctctccctctctctcaaagctgtcctctctcagaaccctgctaaaaccctcaacccaacttttcaacactgcttcactaaatccccagatgggtttctctactgtgaggataccaaggtccaggatgtcatggaaaaggtcgaaaagaggccgttttatttgtatagtaagcctcagattactaggaatgtggaagcttataaggaggcccttgaaggcttgaagaattccattattgggtacgccatcaaggcgaataacaatttcaagattttgcagcatttgaggatgttgggttgcggtgctgtgcttgttagtggcaatgaactcaagttggctcttcgtgccggcttcg

SEQ ID NO: 254185 - DNA, 156 bp, Gossypium hirsutum
ttataaaaccatctcatataattttcacttttttctttcaagcccaccaagaatgtccggggggtattcttaacttgttctgatctcttaaagcacccctatcttcagaaccctgcttaaacctttaacccaactctttaacactgctgtactaaa

SEQ ID NO: 254186 - DNA, 337 bp, Gossypium hirsutum
caacaattaggggagggattaacatttcatattacaacaaaacgacaaggcgcggatgtttggcgccaaacgacagcgtcccagattgacctatcctttatccttgcctgccgttgaatgtacttccccaaatcgtttcttgcaatcatgcttgtttggcaaatgaatgtttagttgattatgtaacactttaggctgtgatatctagctttgtctgcctctcactaacaaatgcttaaagctacaatggggccgacgatgaatctacataagctagggaaagaatcggaggaatgcgcaacgccgcttaaccatctgtaggtcacatatctttcgg

SEQ ID NO: 254187 - DNA, 419 bp, Gossypium hirsutum
ggttcttatggcgtgctagacataaggattgaggagactgaaatgccaatcatagggcagatactatagtcgatccgagaagtaaacaatgctgcgacagtcgctcaaggagtgctgtactggaaaccacccaaacatgcatcggattaagggaaagcacttgtagaggatatcttcagatgcagtgatggtgctggtgaaggtgttcctagaattagaggatcattgataagaaagttacgtgaggagaacaatgtgcataggtctacacagatggtcactgcagcgagcaaatgaagcgataccgagaactatcggactagacactgacgatgcatgggactacaacgtgatggaacctacatactagtggaatggctacatcaactgctagatgacaggtccaactaagacatgag

SEQ ID NO: 254188 - DNA, 275 bp, Gossypium hirsutum
gctctctgtttcttgttagttaatcagccaagtattctttcaaaatctcctctctctctctctctctctctctctctctctatctctctctctctatctctctctctctctctcactctctctctataattagaggatcaggctttaggccaaaaactttggtaatgtccgatctgtgaattggggcaagtgtctgcgaaaaaaaaaagccgctctaatgatcctgcgtgcacaatgagcatccgatatccctacgcatcgcatccatattcttc

SEQ ID NO: 254189 - DNA, 429 bp, Gossypium hirsutum
acgaagttgattttggaaagagtacagggggaaattcgaaacttatttcgtgtgcaaaagggctgcaaagtttggccaagagaactatcgaaagaagcactgctggtgaagcagggaattttgaatgggatgattttcgggaggacgaaggagggggtgacatctatcggagaatgaaggaagaattctatggtaatagaagccaagcacggaaatcttctaccaacctacggaagcctaaaggaaagaaactaaatgaatcttgtaatgtagaccaaccaaagtccggtgataaaaggatggttcattctgagtcaaaattattgttgtgcaagttgaaagataatgacatgacgttacaagaaggtcaaatgaattttagaaaaaatctttccaatgagtttgatgaacagtttaactcagattcct

SEQ ID NO: 254190 - DNA, 382 bp, Gossypium hirsutum
gtaataatgaaaggaggtggtgctgttggttcagcgaatgatgacccaatgaggggtgtactcaatgctttacaggagaaaggcacaaaacttatccaatcgtggttaaactgcgggagtgactgatactatctgaaggtaccaaagtgcctctcacatctaacaacggacgccgcaactatgaattaacttagagtagaaccggcatagcatactatgatataaaccgcatcctagggaactgctttgccttaatcagtcttgaaagaagatcgagggatcttgactaataggcggctgcagaaactgacaggagaggcaacagagaagtcaaagctgttggtccaacttacaataccaatactgctgacgctactagact

SEQ ID NO: 254191 - DNA, 400 bp, Gossypium hirsutum
ctttcttcggccgatgcagtttcttcttcaagagacagctctattctttttgctttacttaaatagactttctgggttttccgtgctgatcctaccactggcccctcacccgaaggcctcttgatttatatacacagcaagtagctttaggcggattctccatcatcagttaacgctttttgtttacggacaatggaggtgtacagcaaaaccaagactcgcgcccctgcaatgaaacagatttcgatactattctggaccatgacggtcctatacctgctcacaaacgctcatgcgaaaatcaaaactgacataatgccctcaacagctatcgtttcgtactaattggaattacacacatcggtgcccagtactgcaacccgcgcatcttgaatgaaaa

SEQ ID NO: 254192 - DNA, 251 bp, Gossypium hirsutum
gttactacgacatatacaatttagcccaactttggggatttcaatcccggaggatgcctttaaaaccttggcaaccctttctttccttttcttaaccctttttaacttaggccaaggcagcaaatttgatttaagaaaccactggccttacaccggttgggctggcgcatttacgggtggtggcaagagacttggccaaggttaagcatgtgaaattactgtgggctctggaaccacacaagaccgaattt

SEQ ID NO: 254193 - DNA, 423 bp, Gossypium hirsutum
gctccggtcattggtcaatctcttcttctctctctccgttctgaccgtttcgatccaatcttcgttaaagagtaatcaagattttatttatgggaacatcgtcgggttctaatattaaccaccagcattcatcgaagatgttgcccccacggcaacaaccacgaccagggagcttacaaacttcgttgtccttagtctcctctgaacatcgcttgtcacctgatgctcaagaacctagatcgaactcagataacgttcacgaatccccaactgagagtgctagctcacaagagacttggcctactgctgatgctgtcacagcaaagaagatggaaaatgggaaaatagaaaatgactgccctgagcaatctgtcattcgtcgtgtttctagtgctgataagataactcttagagacatcgcaa

SEQ ID NO: 254194 - DNA, 382 bp, Gossypium hirsutum
ctctaccggagggtgcttatgctcgcgacctatacccgggcgtctgggtatgggtcactttttctgttgacattggtttgtcccgatgagcaaaccctgctttgcgagtacaatcagagtgtattgccactcaactcaccactattgtgatctgaccttggatattaatgcttcaggcctttctgtgttaaggtttcttgtgtactgttgaagctcatggttcaacggaaaaataaatacaagagagagggagagcccaacagagtcaactgaagcagttttggtgtatgtcagtaaattgtctggacacttactgcgggggttacggcgagcttgcagactctttacactggcctgaggtaataaaaaaacgacacttttt

SEQ ID NO: 254195 - DNA, 430 bp, Gossypium hirsutum
gtgtgtggactccccattttctcttcaaaaagaaaaacaaacactgtcgaaaatttagggttttcgatttcaatctcaatggatcaagaactagacccatatatctgcggttgcattattgaattccttgtcaggtactcacccgacgatatgcatgtaaagaaagttattgaagctttcccgccattgaagcccaggcctcagttgaaaaaagccgtgctcctccgtaccatgcgaaccgaagtctacgccggtgacgtttccgagaaaatactcgacgctttggagaagattgggcgcattgacagcaaccaagggctcccgattcccgattccatgaaggaagcctactgcgccgtcgcattggaatgcaccgtcaagtacttgcccggagatactgacacgtgcggcggcaagtacttggatgcgg

SEQ ID NO: 254196 - DNA, 355 bp, Gossypium hirsutum
agcattcggtggctgctattgctcgaactggataacaggccgcaatcaatcgggataactgctcttttgtcactctgcacgcttattggactagaaaatgccaccttagtatctgtcacacttcaatcaactctggaatccatgggagttctcatggctagccccatgcactcttacctcgaacaacaactggagaaccgtgtacagctattgaaattctggacagcgcccctcaaataatgctttcgggcttctgacaaggactcaatccagggcgtcgtaagaaactcctttgccggtgcctgtgctaagctgatcgaggcgtcggccaagttggagattgctgccaccttca

SEQ ID NO: 254197 - DNA, 430 bp, Gossypium hirsutum
gcgaacattaaagggatagaaagagaagaagacagcgctaaagtcccactaacatatagattagcgggccatatacatgttggaacaaatatattgggacgcttcgtataaccggaaagactgtaactatctattctacgtcgtgacaagacggctaaacagtatatcccatgatcggggcttattcttgttggatcatgaaccgggagagtagatgcaagtgcagagtcaagcatgaaacttatgacgtacacaaagccatgagaggctgagggcatttgatgcttaactacacactaaccatgtatagtacactggtaggacatacaaggagcgcgtatataggacgtaagctgtgcactacaccggccgcggttgcgtatccattgacagccacggcagaaggcatggggagtgagatgatggctta

SEQ ID NO: 254198 - DNA, 420 bp, Gossypium hirsutum
tactaaccaaaaaatccaacgacatagataaacacttcactttttccgatagtcaccctttcttcgtctccgccgtctcctgaacttgacgtcatcatcgccgccatgggtgccactgaacatgtggtggtggaaggcgaaaataaggaaggaaggaaagaagatggaaaagaaagggtggatgaggtggtcgagcacgagaaggagggagagaaattggacttggagaaaggaccagttggagctgttgttgtcgaagacagcaagggcttagagagatttgaagacgaaagagaccattttcatgtctcaatgttgcagaggttgcaccctacaaatcctttaaggattgtcagtaatggtggtactagagtcgctacgccttccccttatcagtcttctcgggttcagcctactcct

SEQ ID NO: 254199 - DNA, 462 bp, Gossypium hirsutum
gctggcacgcctgcacgctgcccgtgccttactggctggacccacgcgtccgctccgacactccaaacctcgacgaggaagattccaacagtccacccacttttgattccgacgactgcgactctgattgtgattccacgcacttcactgatctctccgccggtcttcgtgtcttctctgattcgattcttaggatggagctggccgggatggagatggtcaaggcaatggaagcttcccgatgtgaggcggagaaacggagggcggaatccgaggccgaattgactcggatgatgttgcgaactcagtcccagatcgcttcgtttgtcgccggagatgctgataccaggaaaaggaagcgtggagcagaagacgaaccaagggattcctctgttagacaaggagctttgctgctgagcttgttgcagtgcaacttaatcttctgaagtttcactaaaatta

SEQ ID NO: 254200 - DNA, 401 bp, Gossypium hirsutum
  unsure (1)..(401): unsure at all n locations
atacacaaatgattttagacagttgaaaggagcacatattcatataccacactcgcatctgctgatatgccattgggctttaaactaacctattttgattctactgataatctgcatcatttgggcttatttgccccctatgaggcgaaaagtgttgtaattctatctctgccaaaggcattttcccccattttaggggtaggaacgcagcttgtgcgatacacagagcgcaggtgttgtcataaagagaggcaccgttgtcatattcgccagagacttggggagaccgtctagatttgcgcatgagacaacacgggccgagaaaacacangtgtttgcaatcataatagagtggtcggatcctacaaacattagggtagcatttgaaggagccctctcac

SEQ ID NO: 254201 - DNA, 301 bp, Gossypium hirsutum
gtccaactgatcgctaacctaaaacccacaaagggagggggtggattaacacaggtcgactggtgggcatggaagacgaaatccgctagggagtggctaacatcttacctgcataataaactagccgttagaatggatggcgcttaagtgcgccacctataccaacacgtcgacgcctgggccaggcccagatgacgtaggagggcagcggccatcgctgaaaaccacggggcgcgagccctttcgtggacggcgtatgggcacatacaggtgatgggggcatatatacaaatgagaacct

SEQ ID NO: 254202 - DNA, 402 bp, Gossypium hirsutum
gtcgtacggcccgttgatcaatctctcggaagcttctaatcatatgggtcatttcgtccagcttctcgttttcgtccatcgctctactcccgttcagtataaattgtccaaaggcggagaaataatcaggacagacattcaggtgggcgatgacactcgaccctttttctccgtatctttatggaagaaagaattgcggtctattgttgctgctggcgacatcgttctattacgaaatgtcaagattacaacatttcgagatgttttcgaggccagaactgttgactggtcatctttactccgtctagtccacccttaccagtcccttgtttcaaagagtgcaattgaattagtagcagaatgtagaatggggattgtggttaaagaaaagctttccaaggt

SEQ ID NO: 254203 - DNA, 376 bp, Gossypium hirsutum
ggcttcatgtgaacggcactcgcacatgggttagtcgatcctaagagacgggggaagcccccacgacagcccgtccagacccagcttctaaagggaatagtattaaaattcctgaaccgtatcgcggcagctgacggcaacctttgggagtccgtaaacgtcggctgcggccatacgaagagttatcttttctagttaacggcctgcccaccctggaaacagctcaaccggaggtgggagacaacggccggaagagcaccttacgtcgcgtggtgttcggtgcgccccacaccgcccttgaaaatgcacaggaccgagtgccgtccgagcccgcacgtactcataaccgtatcatgtacccaagtgaacaccctct

SEQ ID NO: 254204 - DNA, 272 bp, Gossypium hirsutum
tcgatcgtaaggactacttgaatcttgcttttaaaacaccgtatttttccagatggggcttttaatatgtaatgaggaaaatctgcattaaatttaatcaaatatacccgcaaggcataaaataacttaacccaagacgccttaccacctcatgattgattacaatgggtcattgcctcccataggacgtattatcaattattgtttcattaatgtggtttcagattaattatacctcttcttataaagtaattttcattctttagtaaaaa

SEQ ID NO: 254205 - DNA, 395 bp, Gossypium hirsutum
ggcgttctaatttttccttcttcattcggccaatctccatagccccttattctcatattcttgcttcaatttgagcagtggtgcaggggagccatggagaacctcgaggactctgttttcaatttcgaaacaccgtccctactttgattgcgacgaagaagacgggtctcgactactaagcctgttgcaggtatgaatggagctagctggatgatggcgcacgtggggctggcacggaggcagcagcggtgttggaggctactgaaagttgctgcggcgcaagtgacctaggttttctgccgaaaatttcattggtgttttgggcttgggatattttgggctgtttgggttagttgggttaggtttaggtttgggcttgtaatgggtattggatc

SEQ ID NO: 254206 - DNA, 295 bp, Gossypium hirsutum
caagttttgaggtagaaaagaagagaccatggcaagagggcgaaccattctgacttgtctcatgtggcttttactcgttttctccattactttgtgtgcaagtgcaactgccggtgctcgtctaggaacatcccaacaagttgtttatccacaagtatgctgcggtgatgattgctgttagttatgttagcatgagatttaaggttgaatcattatgtgtatcatcttttttcccctttgttgaatgtaatgtaattgtaccaaaaagaaaatgaaagcaagcatcatccaattt

SEQ ID NO: 254207 - DNA, 409 bp, Gossypium hirsutum
cggacgcgtgggtcaacttcctggatcgttgagggtaaggatgtggaatggggaggttctcaaggtccaaaaaccctcagtcttaagatcagctggaaattgaaagatggatggagtagccgtttcccaagatacaatatctatgttgagaaactaaagaaacaagcagtgagaccccaaggaagaaagctagagatccctgctctagcaccacccaatgctcggaatggcaaaactgaagtcgcaggggagtaccttggagaatcacaagttgaagccttctatgtatctgactttatcatcccttctgccatttcaagcctcaagtatattattcaaccatgtgattctggtggtgctagccaagttcttgatgatgccccattttttcaatttaatgttgaaggtc

SEQ ID NO: 254208 - DNA, 404 bp, Gossypium hirsutum
ccaaaggaccctctctcgctggctgcgtttctattttctggaaactttcacggtagttacacgtgttcgcaatttatcgtccggtcacttcccgcgtgaagaccttcccgactcgggacttgctatcatcttcaaaaacttcctaagactcttcttcttgaacggcctcattcaacggctttaaccaccaaagtgatgaaaatgaatattatgccctccttctcagacagtaaacaccgacggagtccccgaggagaggctctcctcccacaaaagcagggctaccgagtactcgagactcccgaagccggctttgatggggcttcaacttcaggagccattttcaacctctcgaccacagttgtgggagccggtatcatggcgctcccagccaccgtcaatca

SEQ ID NO: 254209 - DNA, 375 bp, Gossypium hirsutum
gaggggaaggaaggaaggaaggataagtttttatccaatggaatcttatacgggggcacatctcaattttgtttattatccgttcacttccctcttgaataccttccctactcgtgacttgctatcatcttcaaaaactttctaagactattactcttgaaccgactcatttatacgtttttaaccaccaatttgttataaattaaatattatcccctccttttcatactgttaacacaaactgagtcctctaggagaggctctccttcaactaaagcagggctacctgtttctataaactcccgtatccgttttttatggttctttaatttaaagatgccattttcaatttctctatcacagtttttttatgct

SEQ ID NO: 254210 - DNA, 394 bp, Gossypium hirsutum
actaaaggcaattgtactgtctccctatcacgtaaactttcacttgtatttatggagagaaatatatttggtagagcccgaggacgtaagcaaaatttgctgaacctcgttaaaattctagtgcaatgtattttttgatctgcatatttggcaagtgtcattgtagtgatttattgagctatcaaattacgatagagggatattctacctaggaaagatctggcatgtaagcaatactggtgatccacctatctttcctgggaattgaacttagtgtgatctttcagaacaataatgctactctttcacacgctgacgcacatcaataaagtacaagaactactatgcacaatcttgaagtcgggggagcagaatgcactgccactcatagtac

SEQ ID NO: 254211 - DNA, 189 bp, Gossypium hirsutum
acttaatgcaattgttctctctaactatctgtaaactttcacttgaattaatggggagaaatatattgggtagatcccgatcacataacctaaattggcctaacctcgttcaaattctaatgctattaatttaatgatctaaatatattgcaagtctcattatagtgatttattgagcgatctatttac

SEQ ID NO: 254212 - DNA, 406 bp, Gossypium hirsutum
attgaaccttgtggagtgtagtcagtctttcggtacccatcatggcacaaatcacaccatcatctgatcttgatttcgttgatgatttttactactcggcactctttgatgaagacgaacatgaaatctttccaccatctgacgacaagtatgccgaggagttgcagtttcaagaggctctcatgtcatccaccgtcttttccaaaatgggtaacaatgacatctgcaacccatgcatcgcccatgcttcatcacccctgttaatccaagccgtgcctctgcctgagttactggagatggaaacagaggaaaccggtgaatcctccttaagcttctgcgagatttgcgccgaaaggaaagaaaacgatcagatgttcactacgcaaagctgcaaccactcttactg

SEQ ID NO: 254213 - DNA, 124 bp, Gossypium hirsutum
ctcactcctccatcttcaataatttcttccgttgatctttgttagagattagctttttaattctccattatgggatcgatcatgatctttccacaatcgtatttacatggttcaactctttttt

SEQ ID NO: 254214 - DNA, 305 bp, Gossypium hirsutum
aatgatggacaaaaccctgtcatgtgtgttgtcagttggccttggttggagatagctcttatttattttcctttctttttgctgtcttgaatctgccctgcttttttcaccgtatgccattaaagaggttctgctagttgtttatggaggtctgcatcaaacgtcatggattttagggatattttgcaaaccttcatggtgtcttgattggtggaaattagggattcggtttgatatactgcatacatagaatcacggttttgttggtgggatgttgacacccatgttgctgctcatgtctcagg

SEQ ID NO: 254215 - DNA, 365 bp, Gossypium hirsutum
atttcttttttttaaggaacaggccaaaatatgtttaatggcgcggttgtcgttataaaacccggtgctcgagccctggcatagcgtgcgcttgatcaaagctctgctgttggatcttataaccaaatgaaaactccggacgcttacatggaacacggtaccatgtccacgagaacaagacatttgctacaacatcctaagagaccactaaagcccagctgaccatgaccaacacgatggctacgcaagagactggattagtaaactcgaaccactcgctgcgggtgaccttgctgtcggtagcccagagactttcctccaggtctcaagaacagacataagccttgagtcatgatcacaaggga

SEQ ID NO: 254216 - DNA, 323 bp, Gossypium hirsutum
cttccttcgccgtctactgctcttgttacctccacatcaagtcggacagagtggatcttttaaagtttcacattcaccctaccttgatcttcttagtaaggttctagtgaaagcattcctgttggtacctgaaagattgtgtactataccttatcgttgctaatctatattatactcttttatatgcctttatctatactgacttttaaatctttattcttacttttttatatttttctattgactatattaactttctatatttcttgttccttttcgaattttaccttatgatatcatttttttttttatctatttcttat

SEQ ID NO: 254217 - DNA, 381 bp, Gossypium hirsutum
  unsure (1)..(381): unsure at all n locations
caaacgtncgaaataatctactaatggtctaggtcgaggatgcgtacttaattagacatgctgccacacactttccatcgtgtaacctcctatcaggccaagcttccttcccatcattcgaagcttaaatcctcaaatttatctatccaatccattggttgtcatttcttcggcgattctctctcaccctaggtatcttttcaacgttttcctgtcattctattttagcctggggtatccacaggcaaaaaaaacacacgctatagtaggaagagagttttcgggagaaagaaaccctatgttttctatggcgtttctggtttttgcgattttggaaattttttgtttaaccggagactcattttaggatgtttgggttaa

SEQ ID NO: 254218 - DNA, 393 bp, Gossypium hirsutum
aaagaaacgaaagtcgtcttaccattctgtgcctctgcctgagtttttatagcttttatgtatttactgttattactatctttcctagttcggaaagcgttttcttttactttattgatgaagtaatctcaggatgaagacaataagagattgtgttttttaaccactcgtagttttcagttctttctgttccggcgatttacgagcggtgctgttagctctcctcccattctaagggatcgattattgaatttagaagagaagtagaatgattattggaaggttacgccaatggttaagtctactggtctgtgtgcttgctgttatactactcaaatctgaaggcgctagtgtagggattacttatctgcaggatgccgtagcgaaaggagc

SEQ ID NO: 254219 - DNA, 387 bp, Gossypium hirsutum
cagaagattcttctgtcagtttttgttctgctgtggcatctcggttgaattcagttatccttcctttgcttgacatgcggatgctgttggtcattcctcttattgcttattcaggattacagcaagcttttgtatgggctagttacaccaaggacattgtaaacccaactcttggagaggctggtgtgggtggtgcaatggcagtttatggtgcttttgatgcaatttgttccctggcggctggtcgactcacatctggcctcagatcaattactgtcatagtttgtgggggagctttttttcaggcattgatattcctgtggcttttgctaaaatacagtgcaactagtggagtgcttggcgtaatataccctcttctcatggcgg

SEQ ID NO: 254220 - DNA, 297 bp, Gossypium hirsutum
gaccgaacaagcaagctgctgcaactatagaaagaaacacatctccaatggagcccattgaggtctgtgactaccaaccgcccaggatattctccgatttaaccgcgacaaataaaaagcactataaatcaactcatgtttggacagtcgctaaaaaggctgaaactggatggagctctcgtggccacgacctacagtggaaacgggtacgatgttaaagtaaagatcgaaaatgcgcgtaagcaaaagtctaatgtctttgacaaggctattcacgttggctcagatgatcttttt

SEQ ID NO: 254221 - DNA, 305 bp, Gossypium hirsutum
gttaattttcagaacatatttcagaggttcactgcaaagtatgggcataacatgttctttgtcatttatgatcaacaggtcactctccctcttctttgcttcgaaatttttcagatttttatacacatcagggtttctcacgttaaactaagctcaaaaaaggggggatactgttgaccagactgacatttatacaacgttccttcattcatgtacaaaaccataatcttaaaccctgttctttaatgtcttaaagacccaccttctcagtcctttcttttgaccgatcagttttaccggctttt

SEQ ID NO: 254222 - DNA, 212 bp, Gossypium hirsutum
gcggaactaatgggtcaagccggtgtgttaggttatgaggaacttatatatgggttggatactagcacactcaatgctgctgacaaatgcgcttggccataacaccagcctattgattgggccaaaactcgagcaactgggctaccaatggcatactttgcaatcgaccgaacgatcataagtctatatcacccttgctgctaacactgtta

SEQ ID NO: 254223 - DNA, 397 bp, Gossypium hirsutum
attctttatttccagttttcttctgcttattccttttaacttaacccctttgtatttctaacacacactttttcgaggcctacatactttgaaccatagctgtagaaaaaaaccgtacttttcttggaaaccgaacacctatgattaatttatacacagacagtggccaagaaaaaaaatgcaccaccagcggctgaatctacaggaacaagccttgatgcaccaaggttttattgaacagcagtatgtctattatcgaggcatattagctactgctgagatagagccaattcccagtggaaatgtgcctgctggttttgctacacgcacttgccgaagcgagtatctgggaaatatctatacacaagtgactgaaccactacttaaggaggttttt

SEQ ID NO: 254224 - DNA, 322 bp, Gossypium hirsutum
gtttaactaaaaagttaaaggagcaacagctgtgacgaagtattttttcaatggagaaggatctttacaagagcaacaactgtgattaggacgttgcatgtgttgctataaaaaacgttgttatattgagtggtgaaagtttttataaagggcatgatctttcaatcttaaatgtcactaaaacgcattaccttttgtaaaccgatcaccaagaggtgaccgatttgaaaatgcagagcatcactattcaccaccaatactacagagcttgagcatgctattacctcaaccaagctgttgtgttgagccacggtaaccaatg

SEQ ID NO: 254225 - DNA, 247 bp, Gossypium hirsutum
gtttattatcgatgtgaaaccgtattaaagatctcattcatgacatcgaagcgctctgtcatatgaagcccagcttctgatcttgcatgcatgaaaaacaaacaaaaatgcctggagagcactcattgctggataatatagcggcgtgcaagccaaactggctgagaaacatgagatgggtgacgacataagacctctgatgacatgaagatgaaccctgggaggaatgtgccacgtgtggaaacac

SEQ ID NO: 254226 - DNA, 388 bp, Gossypium hirsutum
cttgagctcagtcctcatatgaaaattaaggtgtgggtttataaaaaaacacaagaggagaagttttctactctgaagaaatactcagaaaaagcaccagcaagtaataagcttgcaacacatcaagtcaaggtttcttatgagtacaaaagtgttgatggctccagtactttagttataccaccagagcaaaggattaaaggctaccgttatggacctcaagtagttcctatatcaactgctgaatgggatgctgtcaagttcaaaccagaaaagggtataaaggttctgggatttactgatgcttcaaaaataaagcgacactgctacatgaaagatgtttatctttttattgctgaaccgggcaatacaagagccactcttgctg

SEQ ID NO: 254227 - DNA, 399 bp, Gossypium hirsutum
tgggaatcctgaacgccaaaaacttattgatgagatacatgaatatatgttaagcaagacaccccctgtccctcaactcagcccttcacaggccttggaagagcaccctactaacagtgacggagaagctcaggctaatcaacaggattccgctaccatggttgctgggaatgggctaccgaacccagtagtaggtgacagggctgtcgaagaagagcctctggttctggccaatgctaatccaggtactgctgaaatgggagtgagggctgcaagagagattcctgcccgggaatcaagtaatcatccactgcaaaggccagagatgagggttcaaagatctgccgatgaccgcttgtttacatgggctgccgttggacttactatagcaattttggg

SEQ ID NO: 254228 - DNA, 393 bp, Gossypium hirsutum
gcagcctccttttttaaaagtcattgttttagcggcgattgctccaaccttcaattttatcagcgaaaccccatcgccttcctctcccctgaaaccctttctatctctcattttagcaatggctcaagtggtggccactagatccatccatgctaacttcttcagcaaggcctccggatcccttcaggacccagtggagaagcttaagcctgcgtccttcgcttccaaagtactcttacctgaccacaggaagagcaacgccgtcgtgcttactaggaactctaggattactgctaagagagccgcacgtgccgagcctgaacttattcccgtttcacctgaggatgtacctaagagggaggagcaatatgagcagttaagggggattcagca

SEQ ID NO: 254229 - DNA, 244 bp, Gossypium hirsutum
gcctctccattggatgctactgcaggcaacctgcatgtctgatgaacaataggatgcattgcttatctcggccttacacacagacgtgtggtcgcaggaatagaaggtttgcagacagattaagtgttccttgaaccttcaaatagcctgcttgtacaagaaaaagttaccctgaaacaggtgccgtcttgaacataatgcaaatcattgggagagtcttgattgattaatatgttgtagcaac

SEQ ID NO: 254230 - DNA, 366 bp, Gossypium hirsutum
ttcaaattagacatgctaaaatactgggaaaatactattatagtttaagaaacgaatctcataactttaggggaaaacatggaggaaattaattagttataccatactgcccgaggtgtgacttacccgatgtggggatattttagatagtgaaccggaaccggtgacggaaccacatcctaacattgttggacccagaaatgcaagaagaaccgccagagttttggctgaccctgacgatcaaccaggcgtctgaaaacggccgaaaacgtcagaagcttgatctcgatctccatcgcccgcgtgatgatcgtgactgcgataacactgctgagagctccactactaacaagcggaacggagatc

SEQ ID NO: 254231 - DNA, 388 bp, Gossypium hirsutum
  unsure (1)..(388): unsure at all n locations
gaaaatcatgtgaatcagacatttccattgtcgcattgatcactaaaatccaatccacggagcccatcgaatttccctatcaattatcaagccaccctttttggagatagaaaataatactaattatctgtttttagcgtttcatagaaacagaattatgatatcttagctactcttctttttctttttttccccttacgattaagctagcttaaccctagcttttctgttaattttaatttttttttggcctaaaaccaagatgggattctagatctttttctttttatttccttttgatttgttttaattctattacgtgatcgaaaattatgatgtatatgaattgttggagcgngtgatttggtgttcagtgtctcaaaatgat

SEQ ID NO: 254232 - DNA, 386 bp, Gossypium hirsutum
aaaaaaatatacacttttcgtaaggcaaagacgggccatggaggtggaagagctagagaagagaaagtccagaaagattacgtcttcttctccttcttcagctcttataaataaccttgatgatggctgccttatgcatattttcagcttcttgtctcccattccagatcggtataacaccgccctcgtttgccacagatggtgttatttggcgtgtcaccctcgactgtggctgcgagtagatagatctgttcaggatttttctgaacctggtgttttccccaatattgaagaagctgtgtctgcagccagacctggcgacactattctaattgcagctggcggcagtcatcttgcctctaatattcagattaaaaaacctctct

SEQ ID NO: 254233 - DNA, 408 bp, Gossypium hirsutum
aaatgactttctctctctttttctctattgtctggtcttcttctcggcaagctcccccgtcagagaacccaagggttctccggcctccagtagtggagcacggtggccggtatactaaaaactttatttgaaatttttttgtttcttttatttcgtttctgttttcatttctttttcggtctttttgttcggtctctggcgtagctccgttaccggagaaccgtcctgtctccggcgctggagctccttcacggtggactcaatataaaaaagaaataaaacaagccactatttaaaccccgcactcttctttcttttaaaaagaaaaagccgacatcgtcaaactctttttcttccttatttctcttcttcgagtgaataccttcgaaagggcctctttcttcgctt

SEQ ID NO: 254234 - DNA, 413 bp, Gossypium hirsutum
attcacatgaaaaaactctgataaattcccataagagctccacaaaaaagatttcatattcactcaataggaatctcctaaaatccaagtttctctatcccccccccttttttctttcatttaagctcaaggatttgtgttctttagtttactagtaacctgttactggtttagtaagaaccctggatttcagctctttacattctgttgtttatttctaggattttgcaaaaaaataaaaaaaaatgggttgtagagtatttgaattgctggtctgggtttctttaattttgtgtttagcatgtctggttagaggatttacacctgcagataattaccttattgattgtggatcatttactaatactaccgcgggtcatcgagttttcatggctgataatttagcctcaaag

SEQ ID NO: 254235 - DNA, 265 bp, Gossypium hirsutum
atccccctttaaaaaccgccttttaagcgctgggctatctctctttttttatggatgggatcatctcctttccttctccttcatgaaggtttagatttgaagaccgcttttgatttccttttgcatgccaataaagccttttcgctataaacacatccccgaaatatctcgtatcgaaaacgcttctactttgtggcgttttctgaatttgattctatggataacaactgggaattttgaatgccttggccgtaatatgggatat

SEQ ID NO: 254236 - DNA, 262 bp, Gossypium hirsutum
  unsure (1)..(262): unsure at all n locations
gaangnaaggggcgacccacgccacccgtctatatcatattcttacctgcatttcaagtgactagctaagctacagtggaagttgtggggcatcacaactagctttttgcacgctcgctataataatagacgtcaaatatacttaccataaattcatatacattccaatcactggtgggatttgccaggcgttgaattgaaaggttcaagaaagaactctttttattactaaaagttccttcacgcttgcttttttgctgca

SEQ ID NO: 254237 - DNA, 413 bp, Gossypium hirsutum
catacatgcccatttctcaaaaaaaaaaaaaaaaaaaaaaaaaaatttcccagaagattgattccctggaagggggattattggtgtgttttgtaatggatcaagatttggttgaaacagagaaaagaaggaagagagaaataaatatagaccctggtttgcagtggagccaatggcaactccttgattcgattcttcctacaggtgggtttgctcattcctttggtcttgaggcagcaattcaggcacgtttagtctcaggccctgatgatctccaaaattttgtcatacatttgttagagaatactgggagtttactcctcccttttgtttactccgcaactatgaaccctactttagacaactgccagaaacttgacagaatcttggatgcaactttaagcaatgaagtc

SEQ ID NO: 254238 - DNA, 347 bp, Gossypium hirsutum
tggcacaccgcctttcaagtcctctctaccgccgccgcctctcttcttcatttagcaccgccaccaaagacaaagttcctcttctttacaaaagcccagagatcaacgaagacaacggaaatgaagccgtgacactccaagtcctttcatggggcaggggagcatcaggccaactaggtggtggctttgaagaaatcagtaattacccttcttttgtagccattctttctttaccgcgggctttctttttccttttcttaactcttgtgcttaatccttaaccaaaattaaaaggttcaatactttttcttggttgggttattttgctgggttgtctattttgtttt

SEQ ID NO: 254239 - DNA, 378 bp, Gossypium hirsutum
attctcttctcctccaagcttcttcttctttttctcctctctagttttcatcttccttgtattattctcccattttcagtttttattgttataaggtttatatcgataaaaagaaaaaagaaaaaacaacacttaaaaaggtgatggctggtcgtttcgatgaaaacccgttcgctgaaaaaagagaaagaaaaagttaatcctttcttcgatccagctgtgagagggaaaggcatctggccaagctaaaattggggggaggcttattttaaaagaatgttccagggcctcaatttgcttaaacttaaaaattttaacaattacttcctgaaccggttggtttaattattggcaataaggcaccattgacatttcttt

SEQ ID NO: 254240 - DNA, 320 bp, Gossypium hirsutum
acagaaaatagacaacagtctctggtgagaagtaacacttacgtatgatgtaggcgctccggacgtagaacttaacgtggtctacgcccggtgaagaagataaacacgcaccccacccttgtgcaccaaagatgaggcttcatcaatggccatgccgacgagtccgacgccacctgggacaccatcgacgccggtgtcggctcgtagggacaacgtgtggaggagcgtgttcaatccaggtagcaaccttgcaaccaaaggtattggcgctgaagttttttacaagccttaagtcagctcttcaacaagaaatgtgtggc

SEQ ID NO: 254241 - DNA, 111 bp, Gossypium hirsutum
gacaaagaataaaagggctcataccatagcgccaagtgtgtgcgtccaaacccatttgatatgcatcgcatagctattaaacaggggcttttatccccgccggatctgcag

SEQ ID NO: 254242 - DNA, 151 bp, Gossypium hirsutum
tcgggagagcagtggcaaatttcatttgggtcttttagtaattcatgctttataattgacacgataataaacgccattgccgacacccgatttctaggttactttttttttttttgctctactagtgagagggagagagggaggcgatggc

SEQ ID NO: 254243 - DNA, 409 bp, Gossypium hirsutum
ctagaagatgctcggtggcacagccgagaagatgtaaggaaggcattgagatttgccgaatacaagaaggcgcaaagattggctgcagctaaggtagatcagatgatcaaaggagttaaaaagcgatggagttcatcggcaggttatcttgcgaaaagtggggaattcgctcccatgtttgttccgggaccgttcgcgatcacccatcatctcatctcggcctgggctaatcaagatccaccaaccggcgccaaagctcaaatgaaaaaaccgcctagcggttttgttttgaaactatagccgtgccaattctcttccgaaagctgcagaagatccgccgtatgcctcgttctagtgcgtctgttaaaaggcaagtttatccttctatcctttcagataagaaagcaat

SEQ ID NO: 254244 - DNA, 183 bp, Gossypium hirsutum
gatgatggctatcaaaagccaccattgctgcttcagatttatctttttgatattacgattactcctacagcttgattgtgtaaaaggcgttctccagttcaactactatgcccaaaggtgccccgatgctgaagagatcatccaacaacaagtctttaagctgtacaacaaacatggtaacac

SEQ ID NO: 254245 - DNA, 282 bp, Gossypium hirsutum
gcgagatcaatagcgctaaaagcagtgaataccgccagtttatggggtctaaatcggagtcgtttcgggggtttgcccaaggtccaaaccgtgagggcattgtcgacagtcatgtctccgccgtccaaggcagtcgtctacgagcaccacggtccacccgacttcgtcaccagaatgatagagctacccccagtagaagggcaggagaatcaagtttgtgttaaaatgttggctgctcccattaacccctctgatattaaccgtattgaaggagtatattct

SEQ ID NO: 254246 - DNA, 410 bp, Gossypium hirsutum
  unsure (1)..(410): unsure at all n locations
tcgcccacgcgtncgcccacgcgttcgcccacgcgtncgaaaaggaggagaaaatttttggaggaaaactcaaacaatggcagttgcaccccatatggcgaaactgagcttttttcctctaaaccgacctgggtttttctctcagctttcctgcaacaaattccttcatatataaaaaaacaaaaaccttacagagaaccaatgtggagctgggtacaatgggtcaagggacctaacaaaacccctgtgtattttaggggtggggttctcttttgggtcccgggaagatgatagtgtttccaaaaccccgggttataacccagttgttgtttactccaagagttggtgcccgttttcgttcgaggtgaaatcttttgtcaagaaacttggtgtggagcctttggttattg

SEQ ID NO: 254247 - DNA, 215 bp, Gossypium hirsutum
agaagaccctggtagtttcactagttcgttcatgcgtggcgaaaaggaagattatatgttgggggtgaaatttatttggtagttttataaatttttatatttaaattatttttattttaaaccgacctgggtttttttcttagttttcctgcaacaaattccttcatattcaaagaaacaaagcctccacagcaaccagctggagcttggttaaa

SEQ ID NO: 254248 - DNA, 319 bp, Gossypium hirsutum
ggctcctctgtctttcctcctctttaactctacgtgataaactctttcccctgcgaaatctcaaaccctaaaataaaaaaaatctcaatttccccatagggatttcacatttcttaaatatttaatcacatattctttcctttttttattctattgttttctgggaaattgtaattagtttttgatttgggatggcgatgctggtggaagatattttacaatcggtggagatctggttgaagctgataaagaaacccccaccttacgccgacccgaatttggacccggttttattagttccgggtattgacggcttgat

SEQ ID NO: 254249 - DNA, 216 bp, Gossypium hirsutum
ggctactctggcttttcttacttctaactgtacgtgggaaactctttcccctgcgaaatctcaaaccctaaaataaaaaacatgtcgattttcccatagggatttcacatttcttaaatatttaatcacatattctgtcctttttgtattctattttattctgggaaagtgtaatcagtttttgatttgggatggcgatgttgttggaagatattt

SEQ ID NO: 254250 - DNA, 407 bp, Gossypium hirsutum
cagtactaggcaactaatgttaatgtcgttcctttcctcccttctataactaaaacaataacacctcaaatttctcaacccccaaaattgttgcacggtgtgcagtattcattctcatagatagcatttgagtattgaggaactcatttcttcatatccccatccgcaatgcatcgcaatgatggcgtttgtttcacctcctcttctttcaaaatccctgtcccttctccctcccaaaccctagcctctcccctctccagagctcgtcactcccttttccaactccttcactccctcaggaatcgctccctccctcctaccacatccactcactctcccctactatgctgtgcgtctctctctctaacagcccagacctacgaccttcttaatgcgcctctgctatg

SEQ ID NO: 254251 - DNA, 310 bp, Gossypium hirsutum
aaaaaaaaaagaataatggagttgaacatggatgtggatttggtttatgtaccagaaactgtatctgagtttttgaaacaagcttcaaagatcaaaaatgggtttcaaagattatgtaagattagtgattatgttagaagattggaagatgagatgaagaaaattgatgccttcaaacgcgagcttcctctttgcatgcttctcttgaaagatggtattttatttgtttattttttttcaatactttccgggattaaatttgatatttttaatgggattttagcgattaagagaaaaaagagagagcgtg

SEQ ID NO: 254252 - DNA, 334 bp, Gossypium hirsutum
gggggacgaaagttatggctccatccttgatgtttagggctacatttatgacgcggaggtctaccgatcacacaaaggtgagtggtgtggagcaactatgagacttgaagcttaactgtcctatcctttaagatccaatcgaaagacacgtcaataaactccccactgctgcatgggaagctgcactgaattctagattttataattacacgcataagcgagtacaagcaccttgttggagctaaaccaacacctaagaaagaactcttgggcgtcacctattgtaacttatgacaaactgctcaagttaggcaacttcttttgatgctagaac

SEQ ID NO: 254253 - DNA, 384 bp, Gossypium hirsutum
gctgtggaagcatggacttgagaggtactattcggagcttagctattggttgctgctacaacacacggcgggtgcatatatggaatgggattatcggacacggaaaacttggggcattgccaagagtggggccaatatgttaaggggttggcctaccttatgcacacaagggtgctacactggatgcagtacttgctagagcatctgacgctgcgtgacagacgtggctcgcactgaggacaataaaaattcttggggactattgatgatggttcaatgacctacttataagtgcataaggtcttaaagttaacggtggaattgaacctaatgcataccttgatgcagagtttagcaaacaggttcaagaccgaatatacaggt

SEQ ID NO: 254254 - DNA, 256 bp, Gossypium hirsutum
gaacggactagaaaaggcgccaggcgcaaggaagctaattggcggcatacctcgcggatgcactgtcgaccgacctttatcttatcagaagggttcccgtgagagcatgcttgtcgccacattaaagaggaccaactatgcctgagcgtgccgaaagcagaggaaactgttggggaggctcgcatacactcttgcgtgcaaatcgttcgattgacttgggtattggggcgaatgaatactcgaaccgtttagtagc

SEQ ID NO: 254255 - DNA, 413 bp, Gossypium hirsutum
cggacgcgtgggcgccaccaccaccactcttaaagatcgacctttgggccatccgttctgggtacagccggataatcaaagcccactcccgccacttcctagctctctcactcctcttcctcctccctttctctttcttcttatccatctaccccttcatcgccattgaatcctacctcagcttccttcagcaagatccctccatcttccccactaaaatctttatcctaaatgtcctttacaccatccccatctctatcttctccctgttggccaccggttccatcacttatagcattttccacggcttttacggtcgacccatcaagcttttatccgctattaaggcggctttcacttccttcttccctctcttctcgacttgccttgtaacccagcttatcgtttctggg

SEQ ID NO: 254256 - DNA, 230 bp, Gossypium hirsutum
gtcttaattctggcgaaggagaacatggtttctgcacgatgaagaatgtctaacagatgtagccttataagctcttaattagagtgacattagaatagcccttctgggagtgtctctctatgtatcaactttataggggggtcgctccctgcacttatagagctatacatatattgtatataaggtttacatgatctatgtccggtaactaaataggattatgattactg

SEQ ID NO: 254257 - DNA, 228 bp, Gossypium hirsutum
attttattataccagaccggtgaagcccttccttcattacgtacagcgcgagcttggagggggaattggggtaaaattcctgaaccttgacactttttctgacttgcaacttatagggagtccttagacatttttaaattctctgagaagtgttaacttttctgtttaacggcctgtctactcttgaaactgtttagtcggagttagggttcatcgtttttaatagct

SEQ ID NO: 254258 - DNA, 370 bp, Gossypium hirsutum
gcatcattatccttctatttcttctctcttttcacaaaccaaatcaactcttttctctaattcaggcagtggcagctcatggttgcaacataatcccttgcatcgtgatgcgagcagtggtgttggatcgaggcagggtccaatatattcagtttctcgcacgaaacctgcagaagttgcctccgtagaggacctcttcgagttcatatgctctggtcctcttgtcgacaaaatgggactgacccaggaaaaggtggcagagtctattgacaagtggttgttttatggctcgaagctttgtcgattgtttcagctggatgaactttaccttactactcctcagaaagcaaggttttatcactactacata

SEQ ID NO: 254259 - DNA, 412 bp, Gossypium hirsutum
cgaaaatctcaatttccatgaaagttctggggacacctcgtcccttaccccttgctttagataccaacgactctcgtgttctctctcatacacactcttctccatcagtactctcatccacgaaacattctcacaagctttccaaatccatggctacttgtatcgacacctcaagaacaaccgagccttcccgagtttcccagcgtccaaacaggtctcaacctgatgaaatccattacaagtatgtaaaattctgcagacccacttttactgaccatgtttcaagcataccctttagcgaaaaccacacaaatggcattcaccaccagaaaattgctgatttatcttttgaagaagaaggagaagtagcagagattggttctttatggctgaaaatgaacgaagaggcaag

SEQ ID NO: 254260 - DNA, 302 bp, Gossypium hirsutum
gttaaatgctactgaatccttagttgagagcatagccaaattgaaaacagcgtgttgggcatgaaagatatacggtatcatggctatccgacgtctgcgatcgacaattacctcatcaacagcgttgccttcctcgattctggtaaaaacaaccttctattcatcttcgactcgtcgaattcacccgattcccatctcttttctggtctgaccttttcgctctttgccggaactctccttcctggtctgcctcaaatctaccacaccgctagggtttttaattctccgtcgaaatacgtttt

SEQ ID NO: 254261 - DNA, 228 bp, Gossypium hirsutum
ccttaatcgaatagagaaataactgtgagaggaaaatggggaaacagcctgataagaggggtgcggctgacaacaaagacgtttgtaagctatttattggaaagcacaaccttactttaccaattactttatttttttagacttgggggtcattacaaaatcacagttctacattttttactaaattttttgaaaagtattagctgtgacatctacggcaaatggttt

SEQ ID NO: 254262 - DNA, 144 bp, Gossypium hirsutum
tctttctattgctctccttagagtaaatctctctcgcatttctttgtatagatccatgggtgctcagcctccatgtcccgctcaaatcttacaattccataccaaccaatgcattttttctttccgtttccttatccttttctt

SEQ ID NO: 254263 - DNA, 269 bp, Gossypium hirsutum
gacaaaggcaacttgctacacgtgcataaagagagtcgtctctggcctattatgctgtggatctataagcctatatgagatttggaaacgagagctggagcgaactgttaactatgcttgtgcttgaaacaaataatcatcttgttgattcaagatctgctggatatgcggctcaagaatctgaacattgagattgcctagtagatgcagggtgatcaggatccaattcatcgaatctggatgctcatgatgatagaactcatggcgtt

SEQ ID NO: 254264 - DNA, 399 bp, Gossypium hirsutum
tagcagttcaattaaaagcaccaaattcctcaaaatgattcgcccaaaaccctaatttgaaaccgtctcccttttattttacctatcagaaatgattcatggtagcgatgatgatgcagcagccgcagcatgcgacaccgccgaatcctcctcttccttccgactcttcacttagatcccctacctcaactcccactcaatcccctctccctctccgcccacgccagccccttgagcatgtcgcggttccaatctccgccgctcatccttccggtgagcctctcgtaaccatggggaccgccgcactttcactcgccagagttaggctatccgatatttccccctatgatggtgccccttctggttcctatgtgagggccgaggaggctttttcgggtt

SEQ ID NO: 254265 - DNA, 393 bp, Gossypium hirsutum
cgagctttctgttttggctaaaccaagactatagcttgttccatactgttggtgggtctgtttgtttccaaagataacctcactgcattttctctgtttgcttttttccaatggatgttttctagcttcttttcttttggagttaacataatagttaatacagtacggtggaagtgagtgaggcccttacaattgatttacagaatggaactgtgcttcggttggttcttacttgtggcttcgattcctgcgatttttgctcaagatattagtcatggatcgattgtagttgatggaactatgactgttgctcaaactgatgataacttcgtctgtgctacgatcgactggtggcctcatgataagtgtaattacgaccagtgtccatggcac

SEQ ID NO: 254266 - DNA, 397 bp, Gossypium hirsutum
agtttgaaattgtatctttggaagcatggacttcatagctactatcctgtttgtagctcgtgtgatctcctcccccaaagctttagacccttgcagatctaaagcagatgactggctccttttgctcatcccaatctatggcaaatgttcaccattcaacccacccaaacctgacttatggttcaacacagtcttgaacatggcatcataagacccaacaagggtcaagtgcttgtagagccttctatcccaaaacaccactggaggtcccattgctttacgccaacaagtactaaatattggcaactatgtgcgtcgagtaaagattggcactactgtcatgtcatgttcataggatgggacactaacaatgatgtgacttgcgtcccatgctccg

SEQ ID NO: 254267 - DNA, 399 bp, Gossypium hirsutum
gccgccatcacccaaaaaatccccccaaaaggaactaggcttgagccatgctttcttgcaatgcgcagaccttatccttccatggctaacccctcaagaactggctaatgtctccctcacctgcacaacccttcaccgagcagcccagtccatcactctctaccgctcccttgacgcttcaagatcctttgaaaactttcccatcccatttcacaacaccgtcgatcaatacccttatgcctatttcttctataccccttctcaaataatcccttcttcttctttttctttaaaccgccaattttggggacccaactcgccgcaaactctggtccttcccgagtcgggcttgttggatgctgaaatgggttgtgctcttgactcaatggatccactcgg

SEQ ID NO: 254268 - DNA, 381 bp, Gossypium hirsutum
cggacgcgtgggttctcatactaagtttctactcgatttccgagatttagagaactaacaaaaaaccacttccttttaggattatcccatttggttttttatgatcctctcttttagagtcgaaagctactccaagaaacagcactgtgttccagtttgggggcgccaccagaattgatctgctcactcagttgcaatgacaatatttagaggtggcattggcagatttagtggtggagttagagctgcagttttcttcttgtggatcgttatcttgttcttttcccagttaggtttgcattttgctgttcataataataacagtaataaagacgccagtaccagcagtggtagtcatcagtcattcacgtttcatccccc

SEQ ID NO: 254269 - DNA, 345 bp, Gossypium hirsutum
ggaaaacaccattttggtttcagtttgaggcaaccattttataatttgactggccagagagttggaaccatgtttttagtaaggcttgcacaaccatctactgcgtcggtacaaatacgatctctattcatactgatagcagtgatagcccggcatgggcattccattgtttggtctgctaatcataacctgttatgtatggatcttacagaagaagagctacaaaaagcaccgcttgttctctacatagagcgatacattattagcttggaatctgggaaggtcgtagcctacaagatagtgttcttgcaaatagagattacttgcaaattcaaggcagatcac

SEQ ID NO: 254270 - DNA, 317 bp, Gossypium hirsutum
cggccctcataaatcattatcctttcgaaactcatggttaaagctttgattcccaggtttttgattttaaaaaatggatcaggcaagaggccgtgcaatagcgatggcagagggggcggcggcgggcctctgcttgtagctgagtcacttcaagtggcttcaagcaccaacgattactgttgggggaaccgttggtggggcctttaacgtgggtgttgggacaaaaaatatcctttttagggctggtgttccccttcgatccaaatccagcccatcattcgccattgtgggagtggtaaccaggggggttgccattt

SEQ ID NO: 254271 - DNA, 396 bp, Gossypium hirsutum
gagatttgaagctatctttttcgccatcttgctgtttgtggcaaccatggaagctgatggaaaacgaatgaccctggagaaggagccagagccaagtaatcatcagctgggtcgaaaggtcgacgtcggagctaaagatggtatagatctaaccgccgtcgacggtgccggagaagatgactccgatgtggcccttttggcttcccagaacaaagttacgacagaatcacgtcaccatttcttcccaaacgaaagcaacccttatagacacaatagaccttgaaactgatgatcaccttgcaaattgctaagcaatttggtttgagctttaccaaataaaactggaaattaacatgttagaataacctaaaagcatatatgtatatgtatatgcat

SEQ ID NO: 254272 - DNA, 390 bp, Gossypium hirsutum
gcattcttgaaatcaaaggcagagtcagacttgaagcattcgagaagttcctccaagagcttccattgtctcggagtcgtgctgttatggttattcatatcgtttgcaaggagggatcgtccgagagcgaacggcagagcctggtcgagacggctgattcatatatttcagacgggagagctggtcttgctgagcctgcttgcggggtcgaactttattgttgcccacccgatgcaaaaacacttgaaatgctcaccaaggtactttcaaaggaccaaattcaagctcttaatgcgttagataatggtctaattggtgttgttgtatggagaagaactcaattaacatcaccgaactcaacttcacaccataaacacatctcgaaaaagc

SEQ ID NO: 254273 - DNA, 405 bp, Gossypium hirsutum
gccatcgcagtccagcttgtcctttgtatctcatagatgtttatcttctggcgtcaacttcttaaatgtttatacccactgctaggtttcattacctgaaaggcggagcatagtctgggcccaagaaaaaagaattccgcctttcttctgttggccgcgccagctgattagatgttacaattatggttggactcgtccccaaaccgtattcatttgcttttgccctttctgttgtttgtttgttggaccagattcttagccgtgcgcttggaggaaaaacagggcgggccgtttcgggttgggacattggagttacgacaattcatttatcatcgtcctcatcgaagttcttttgatcacttgagatccccaccactcttcccatcatatagtgccaccgagatg

SEQ ID NO: 254274 - DNA, 399 bp, Gossypium hirsutum
aaagatgtcaactgggaagaaagctctggtggccttaatttatggaaatggagtttgactggtattggagccatctgctcttttggtgttgctgctgctaccttttgcatcatcatttttggaactcaacaaaggcacaaacaacaacaactgaaccaaaaactgttgttccaacgttacagtgatgacaagaggatgaagcaagtggttcatcacacaaccaaactcaatgaagcaatttcagtggtgagaggagtaccaatcaccagagctcaaataacattcgggggttactatgatggtatttaaagcaatattgcctggagaaatctggaccactcgtctgctgttattctccaagtgtcaaggatttactatgccagttctatacaagaattt

SEQ ID NO: 254275 - DNA, 387 bp, Gossypium hirsutum
gacaaactgaagatcccatacccctcaatcccttttctcaaccgctccaaatcgccgccatggccggtggccggcgtcacgcgacggagttcccggtctgcgcagttgaagcatattcagagggcctgaacttttggaaggggagtcgaggagaaaacaagacctttggcccctctcgagccgaatccgacgacggcaaaggaccatcgccggccagtccaagggccgattcagatggagcaggtacacggcactggtgcagatgggacgtgcggcgatgggacaagggcggtggcaacaggtcctagcatgcggcgccctagggttaggttttttaatttttgctgaaattgttttaagttaggccatggttggtttgggtctggg

SEQ ID NO: 254276 - DNA, 394 bp, Gossypium hirsutum
acggcataaattgttttctttgaactcaaagtcccctgtagcattagggccatgggcgtcgtgacttacaactatgactctacctgccctgtcgctcccgcctggcttttaagggcacttcgttcttgaagctgacaaggtctgatccatagctgcccctcatgcaatctagagtttggaggttgtatcttatgctggccctccatgtatcagctaacgatcaacttggctgtgagcactgcattccaatatatagatacatcatatgctccaggccgatgaaatcattctatgcttcattgacagctatactgcatgcaagactcatagtgacaggccaatacctaatctctacagcattcattctggggttgctattggaatcattaccctg

SEQ ID NO: 254277 - DNA, 334 bp, Gossypium hirsutum
gtggtggccgttcgataaaagatctatacaccttttcgtttaaggaaaccgattggaaatcgaaccaagctctcgatgagatgaataaacggttcttggacttgacattactcgaccttctcaggacccatgatgggaagagggactatcatggcggacaaacaaagcaacatgtgctgtgactgtaccgtaaggactcctggcattattattacttgatcatcccatatgtgattgactatgcccatcctttacttgaaaagctagcctcggggggatacaatcacaggtttgagaaaactgatcatgacttgtgtgatatcgacgaaggatg

SEQ ID NO: 254278 - DNA, 392 bp, Gossypium hirsutum
cgaggagttcattatttacaccggccagggccaacacttcaggatcttggttttttcattcttccagagcgtgggcatgataaaggctatatcagcgagacagcgttcacctgtgtctctttatcatttgtattgtggactttgcatcctttcatcttcaagaccaaaaagatctacacagttcttgtttggtgcagggtgctagcatttttagttgcttctcagattctccgaatcattacattctattctactcagcttcctggtcctaattatcactgccgagagggttcaaagcttgccaggttgccgaaaccggagagtgtgctagaagtcctcttaattaattttcctcgaggtgtaatatatggttgtggtgacttgattttttc

SEQ ID NO: 254279 - DNA, 269 bp, Gossypium hirsutum
tttttcttgcgtcaaagcatgggcctttccctttttattaggaaggcgcggtctgtcgacttataacccgtttggcgagcccagtctgagcggtcatatgtgcacatcttggtggtggtaccaaaacaatatatgagatcttttgaggccgtagaatgaaacggttacatgtgatctgtccttgctcatcggttagtccatcctctcagacagaggaagtccgtgctacaagtcgttctgggcgtgctgctgaagggaatcgggttaaa

SEQ ID NO: 254280 - DNA, 397 bp, Gossypium hirsutum
gcttgggcacgagaagaaagagaaatgaagttggaccaaaattacacatcacaaaattgatgtcaatcagaagagaatcatccatgagaaaatgcattcaacagcatattcttcagctacttcaattttccaccgccttagcactgtagcttcttcaaagctccctcttttaccttccctctctctatatcgccatgtccagaattttgagatttgcaaatattaggaaagctgtggaatctgctatttcgaaccagaggtcgaaccgttcgggatttaggaagtatgcgacagtggtttctgtcgggttgcatttgccacagtatagagtgttctcccattataggttcaacagtggaggaaaggctccaatcttgttgcagaatacaaaggaagg

SEQ ID NO: 254281 - DNA, 207 bp, Gossypium hirsutum
ggttttctttcgccgctcttaatcacaaaaagctttgaagaaaaagcgtttgggggtgcaaaacattgggccgaagaaaggtgggaaggtgggtgttcccccccaaaaaaaacaaaaaaaggttgtgaatcccttgtttgggaagcgtccaaaacaaatccgcattgggggggctttaccttctaaaaaagaattgcatcgattttt

SEQ ID NO: 254282 - DNA, 309 bp, Gossypium hirsutum
cgtacgcgtggatgctttgaagaaaaatgaagcgatgcatgcgtaagtatgtacaacttcagactgtaaacctgggaatggatgattaaattacatctagtgggcgtgcgggtccttgatactcgaataacggtagatgttctagcactaaatcttcaaacctacgcaccactattggtagggatgtattgattagatataaggtcgagccacgcttacggcgtcgatctgatgattcatgatagactcgacagagcgcactgcctctgtgccttcgtctcatcaatgaaagaactgacctatcttctt

SEQ ID NO: 254283 - DNA, 285 bp, Gossypium hirsutum
aaatatgtggaagcttgggcgccgctcggaactgagcttgctgaattcgcgggagcacgggggaaagaaattcacactaaagaaatggtcgggggcttatcattgttaacgcaagggctctactgctggaggggctaaaattgctagtacttaaggtgctggagccatgtcttctcctgatgctgcagcggttgggcgtagccctcattatgagccgctttcttggctgaaaacttaattgtgacatgtacgccatgcggctgaacattgttgaggccctaagaa

SEQ ID NO: 254284 - DNA, 339 bp, Gossypium hirsutum
gccttttgccaaaggcatgccaagaagcaataaaataactgttgtaggtggtgtgatcaacatgaaggccttgtatttcatacccagttcaatttgctggtaaacttacgtgtttaccaataaactattcccttaatagtaacatgatcccctgtttttgtgatcatgcaactttttcaaagatgctagcactgggttttggaggtcaactgctttactttgatattcgaattatggataaaacaaggatgctgcacaagttgtattaaacgccggctattattaagcgtgtaatgcaaatgtgactatatcattcgcctctccttcacaaagagacac

SEQ ID NO: 254285 - DNA, 267 bp, Gossypium hirsutum
aactcaaaacacctatattgttgaatgcacatttcatactaatcactactgcggctttacttctacctgcttggctgcttactcaatgcatatgactaaatttaatgcccttcaattgtccctgctatatattgagacgatgaatattgcaaaatactatgaccactctattgaatccttactgggggaggctactgatatgatacacggatgtttttaaggctatcttaagattacaatctgtgagacgggcctaaacagacaggg

SEQ ID NO: 254286 - DNA, 296 bp, Gossypium hirsutum
gtaaaggagctggctggaaggttaataggaggacttaatttgttgcctaaagatgctattaatgctgcctgacattagcatctgctgttcaaacatgcatgagggtagaaacataatcctcgtttctagtgctaggggaacctaggactggcattcaggaggtggcacaccctgctctgtactatactcttgcacttgctgcatctacaaggctggtataactgttatttgtatcaccgaccactatgaacgacaccgtaaatacttgactgactagaggttcaagaagcacaacg

SEQ ID NO: 254287 - DNA, 412 bp, Gossypium hirsutum
ccctctcccagtctcttttatttctctctctttctttcactgctgttgtttttggttgctacagtactgcattttgctttgggggtcagtgaatgaaaaaggaaaaccaaaaagcatgagcttcagttgagctaccaacaagtttttctatacagcccgacttggcaaagcctttgttttacttctcttcgaagaagccaagggtttcttttttattcttctttctctcttcttcatcattgaagatgcctagacctggtccaagaccttatgtctgtgagagaagagcttggcacagtgatagacaccaacccatgaggggttctctcattcgggaaattttcagagttgtaaatgagattcatagctcagcaacaaagaagaacaaggaatggcaagagaagctccctgt

SEQ ID NO: 254288 - DNA, 413 bp, Gossypium hirsutum
attccagttgtcaaaggttgaaggacgaacgacggagaaaccagtgcaaaaatcttctactttattttctttgaaatttattttcattttcgttttgtaatttttttttgttttagactcttagttataaattgaagatattaattttaaaaaatataattgtacagagaaaaaataagcaatctctctcctcttcccgaccatatcgtcatcgacctcttcctgagaacgctgagagctggaaagttaactgagagagttctcaagttgtttatagataccggtaaggacgaggtcttttctcttatacaagcactcaacattcgactcacacttacccctgtccttcctaccagatgttctgagaaattctgagattggtttaatcagtggaacacaaagtacattggact

SEQ ID NO: 254289 - DNA, 443 bp, Gossypium hirsutum
cgcagtttcggcctagacccacgcgtccgaccccgtactcggacgccgcacggtcccgtgaagccattgcctgtggaaacggtgacggtggcttgccccgatcaccttgttatcgctgaccttcccgttgccaagagcattggcgccgctatctcgtcctcgctcgtcaagaccgttggtcgtaagtcacgccgccagcttggcgagcgagttcacttctgcgtccgctgcgatttccctatagccatctacggccgcttgagtccttgtgagcatgccttctgcctcgattgtgcaaggagtgattcgatttgctatctcacagttgtgatgaacgtatacagaagattcagacaatcaagataatggaggggatcttcatctgtgcagctcctcactgtcttaaatctttcttgaagacgacgtgatttgaatctcatatc

SEQ ID NO: 254290 - DNA, 415 bp, Gossypium hirsutum
ctccaacagctactgtcactgccccaagctaccccaaactcgccactgtcgccgttcttcggtctaaagtttttattttaaaccgacacaaaccgagatataagtcctcggttgttacattaagctcaagtttgcgggccaatcctatgttgtcaagcaacagtggttcacagggtttcttgtcttctacaggcgcacggtgtaaggcactttcggccttatcatcaccatttttaggcgaagatgacgatgacttgtggcgtacaacgaatgttttacctctacggtcgagatctctctctttaccaagagcatataaggatgacgtattcaaatttcgctaccctgtaataaccgagaagcctgaatggtggttgaggactttagcctgtgttccatatctattagctttgca

SEQ ID NO: 254291 - DNA, 365 bp, Gossypium hirsutum
gtcgctcagaggacaacctttggtatgtttatgcggtaaacatatagcagctgctacctttctttgggatggtctcacttgactgaaaatagcttttaatgctctatgcgccataatccaaattctaacaagaaactgaaccattagagttacattagatagatatatcaatattgataggattctgtgcagaacgtgtcgtcggacaacacaaaaatggagctgacaaatttgcataacacatgttaagggggacttacagtgctaggaatgaacacagctcttgcagaatgctatgatgaaaaacatacggagatctttacttcaaggggggggcgcggtctctacctcaaatttagatattg

SEQ ID NO: 254292 - DNA, 406 bp, Gossypium hirsutum
  unsure (1)..(406): unsure at all n locations
attagatatggttttgaatgtgacataataaataaacacaccgatcttcgtccagaaaacatgaaaaattcggtgggttttgttttaattcttgttttttcatagtttagttccactttttgttgttgttttggggttcagattcaattcaatctgttgctgagttcacccttcaatgttgcttggtatataaagtggctttaggagaggaatcatcaaacatggttcataaactggaagctatccatggcggtggtggatcaattaagttggggactaaagggacaattagttcccttatgacaaaggaactagattccattaaaacaccaaagcaaacaccacctagacacaaatctcangcgattcctgcatgggttgcctgttcttcaacgactctaaaacg

SEQ ID NO: 254293 - DNA, 409 bp, Gossypium hirsutum
aaaaaaacttcatcttctttcttttttctctgggtttgcccagaaaccggcgaggagccagccgtccgccgctgtgtcgtccgccatgccagctaacgtacacgatggccgaaaatcgccccgaggtgcttgtggcggtggacttaatggggcggtgctgcagcaaagacggtggccaggcaagtggtgatgggacagggaggcaacagctagggtttgttgttcttttcgttttaggttttgaattgggctgctgttgagttttgagtttagtaggttttgaggttattggcttagtgagttttggggttttgggcccaaaattggacttgtacaaacataatttgttgagaaaaagtggcttttcagaataagccttttggactacaaaatataaaataaaataaaa

SEQ ID NO: 254294 - DNA, 157 bp, Gossypium hirsutum
gaagcttttgtagacctggtcaagcgcattttgattaaaggttggttgggcgttggagctcaaaggtgtaccatatgaagcaattgattaagatctgtgcaaccagaacgctttgcctcttcagttttaccctggccaccagaaaattccaggtttt

SEQ ID NO: 254295 - DNA, 195 bp, Gossypium hirsutum
cacccaattcacatttcccaaacccttagtttgacttgatcgccaaaatcctcaaacctacagcttcgtcctttgccgttcgatcaaaactcctttataaaacaaaattgttacgaaagatatcatcgaaaagcttagcgatgccgtcccacggcgatctataccgtgagatcgaacacttaatgcagtgcaagc

SEQ ID NO: 254296 - DNA, 284 bp, Gossypium hirsutum
atcccaagatcccatcatcttcttcgtcaagcctcgaaagaagatggagagagaagacacgaagtctctaacttcagctttgattcacataacgccagaaaacgatgatttcactctacaacaagcagtgagcagcaatggaattaatgaagtcagaagaaagaaaatatgggatgaagcgaagaaacaagtttggctggcaggtcctctgataggggtgagcctattccagtactgcatacagatgacatcagttatgttggacgacatgctggagagctagc

SEQ ID NO: 254297 - DNA, 311 bp, Gossypium hirsutum
cggacgcgttgttggacatggaggtggttgaagaagctgacaaggctggcatagcatgccgttgtaaagccattagtcctcatcttgatcaactgaccaaactcagtttagactcttaatgatcgaaactgacgaagcgcgtagtttaggaacaaaagagcagattatgtttttagggaccttggcagcgacagatgatagtccaagaaaatctcatgaacatggcctgactatatattctttgatactgccaagagctcaactactttataacccagactagctcaaggctaccctcattctaacctatc

SEQ ID NO: 254298 - DNA, 202 bp, Gossypium hirsutum
gggagccaagattgcaaatgaagtcttatttggtgctttaaaataagttcataagctagtaggaggcctgaaatagggtatcttgaatttagaagctcgagtttcttttggatagagatcaagtatgtatgaactgttaagttgaacatttttttttttgagccttgttaagttgaacatttactcttacatggtgggcctt

SEQ ID NO: 254299 - DNA, 427 bp, Gossypium hirsutum
ctactcttaaccatgcaataccaagccccttttctctttcatcgaattctatagaggttcttcaggcttaaccttcaagcagaggaaattgagtcagaaaacaagttccatatggcctggaaatgatcatctccaatctgaaaaaaagtcaagtctggtttattagatggtgaaaagcggagaagaaacattggacagtgtgaccaacaggaggtccattgccatgggtaagcatcaggagggaacaatcatgagcaagaagccagtcaaagcttcagcagttgtggtatcacatgttgatgagaaggaacaatcacatccaggtacaggttctgcagattctgaagttagctccaaatgcattgtttgctcaggaaacaacagttgccagactgttcgtgcaagaacaaaactaatgaacattttg

SEQ ID NO: 254300 - DNA, 405 bp, Gossypium hirsutum
ctcatctacgcaagccccctggcgacatacgaacattgagcacaacgtacaaaatgatcttgggcgctccccaggtcgattaattcatgttgtatctttcatcgtctttggtcatcccaacctacagctcatactcggtgggttggaacagagcataaccggattatcttgctcgcccacattgaccctaaactatcgaggtttgatatcacaggctgcccacccttacttgtaaacgaagtgccagtttctgctagattggctaacccacgtgtatgagattggccttatcttatcaccaggggtgcaatgactctgcatacataccacggctggtttagcctgtaactaatataccgcattcctcgtgcacatctgcaaggacgtctactctttctttaaaac

SEQ ID NO: 254301 - DNA, 425 bp, Gossypium hirsutum
gttttaggctccctttgcagacaattatagctacgagagtttaaactgacccagagcttcaaacttaatcatggggattgcaagggcgcaagatgaagagagtgaaagaagggagtttgaagacttcaggaagactttagttgctttggctgccacggaaagaagcaaagaaaatgacgacttcaaaggcctaacgagttcccatatcgccgaccttgatcttcaactagacaagcttgtttgtgtgaccagtggcgtttctttccttgggcttgccttagttaatcgtcttttgctccgtggatactctgttcgaatccttgtggataaccaagaagatgtagagaagctgagggagatgcaagtttcaggggagatgatgatggcttgtaacaataaaatatcagtggtaatagctaagcaaa

SEQ ID NO: 254302 - DNA, 322 bp, Gossypium hirsutum
gcacgagccatgaaagggtattgtgataaatttcctgaaccatcacgcgtcggctgacggaatctttagattgtacgaagacttccgagagagcctagcgaagagtcatgtcttatgtttaacggcctgtcaaccctggaaacgggtcatacggaagaagggtccaacgttcagaagagcacctcacgttgcgtggtgtacgctgcgcccccgactggcccttgaaaataccgacgaccgtgtgccgtgcgagcctactcgtactcataaccagatccatgtctacaaggacgtacagactctgacccatggaacaatgtag

SEQ ID NO: 254303 - DNA, 416 bp, Gossypium hirsutum
tggaaacagtattacagagattaaagatcatcgaacaagaaataagagatttgaaacaggagattcagggaatgaggtattatgagcacagacttctaatcgagcttcaccgtaaagtgaactaccttgtgaactttaatgttcacgtcgaaggacggaaagttcccaacatgttctattttgttcaaactgaaaactactcgaggagattggtaaccaccgttatttccggcatgactgctcttcggttgcacatgttatgtgaattcaggagagaaatgcatgttgttgaagatcaagttggttgtgaagtaatgcacgtagataacactgttgtaaaatgcttagctccatacatgaccaagttcatgaaactggtcacatttgctctcaaaatcggagcacatttagcagcc

SEQ ID NO: 254304 - DNA, 427 bp, Gossypium hirsutum
gaaaataacacgcagaggctgagagcaccctgttcttcaattcacgatgccctcaaccggcggttaatagctctgagctcaaagcaccgataacagccggccgacaacggcggcggagccacacacactctaagggatgccgaaccaagggctggaagctatgcagtaccactgggctggtatggccctgattcctcaacatcaagggatgatgacctatccttctcatcattacatggcttataatcaccctcatcttgattatcaacaacagtatcaacagcaacagttgcataaacaacaacatggatctaattcagatgaaggtaaaacgatctgggttaggagaccttcttcattggacggatgaaacttatcttcatagtttcttctgtcaatctcgcgaggactctgcttaaaaatgata

SEQ ID NO: 254305 - DNA, 433 bp, Gossypium hirsutum
tgaaagaggaaaaagtgcaattgcattagccgcacatcgtgccaaagttgctgccctacaaaaggcacaagatggcaatgctgacagcatgatttggaggatggaagcctgatggagtgcatggcaattgttcatattggtagctagtgcagacttgttgactaacccattagatgttacaaggtagaagtcatttttttggactttggtttatatgcctctattaatctgtaaatagagtataatcattctcgggttcgaacttccaatggacctgcgtgaatctttatatactcttaaagcagaatccaactatggagttggagcttggttttccagttagggatagagctaatggaggtttgatttttaggttaccttcctcgcttcatggtagatggtaaagcactcccattaacctttctatagtttt

SEQ ID NO: 254306 - DNA, 277 bp, Gossypium hirsutum
cgcatcgttaaccccatctactggcggcgtcgtcggatgcaggatcatcggttacttcgctaggcagttcctaatgcaatacttacatatcttccgttccaaaacggacctcgccacactatgatcctaaagcgtatctacctcccattggtgaggcatggccactgccctacatcgagcagagcatctttcgaggctggcgcttaaatcttccacggcaagaactacctatctctctactactccgatgtcaccggtggggaggccaaaccgtcac

SEQ ID NO: 254307 - DNA, 233 bp, Gossypium hirsutum
aagaaatttaataaaataaaattaaaaaacgtgtctttttgcgtcgtatatgaagaaagaccgagtctgaaactccaatgaaagatcaaaaactcaacttttacagtttgatttcaatttccgaaggatatagattttttgttttgaaggtttggtgaaaaatggacaagaatttgatggacaaagtttctgcctttggtgagctcctgaaaacagaaggagccgaggtggga

SEQ ID NO: 254308 - DNA, 348 bp, Gossypium hirsutum
tccggtagagtagactcgtaagcacttttactttacacaaacacacatgagatgcctgctgccgagcatggtaagggcaacgcaacatggtgtctctccatatttatagcttatatatcgcatcagtttctcctcttctatgcactagcatgagacatggtactgggtggccatacgtgcgattgtcgagagcgcccaccgtacgcgcgtcatctccaacgcgaggcaatactgcggtggacccaatgggaatccccaactggagcacgaacgattcggtgtagctcgagtgcttcggctaaaaagcgtaccgtggtgtgctgctcatcgtaccctacagcctgcacg

SEQ ID NO: 254309 - DNA, 380 bp, Gossypium hirsutum
gttgaaatcttgatgtatgagagtttacattttgcatacggcttgctggaggtgttgatctttgtgacttctatcaccatatggaataaaggcatcattagccaaataattctttcgttccctatagcagtttttactgggagaaatatgtttgctgaaaggagtaaacaaggcattagtgataataagatatatcattatcacttaaatcttggaggaagtgtttctaccataaggctgactaggctaccttcaattcctaagaatgatgcaaagttcagaacacacttatccaggatgggaaggagatggcatcagtgctttatacttatcgcagctgtgtcaaagcacttcctcagggggtatgttggaattcacag

SEQ ID NO: 254310 - DNA, 385 bp, Gossypium hirsutum
ctcggatccaagctgtgcttcagttcttcaatcagtcctctgtgctagatgcgatccattttcagcgcagttgttcgcaattgataccgagactcgtacggtgcctctcctttgcaactctactgtttcaacaaattcatctcagtctaaccaagcaacaaatgatttctgctctaatgtatgggatacatgtcaaaatgtatctatgttgaattccccgtttgcaccttccttgcaagggcaagccggagcacctgccaattcgaatttcaccaaattgattgatctttggcagtccaaaactgatttctgtaatgcctttggtggagcatctactgatgaatcagtttgctatgatggtgaacctgttagattaaatgagacg

SEQ ID NO: 254311 - DNA, 348 bp, Gossypium hirsutum
ccaaaaacaaaatttttggttacccggtcattactacctctttttctcatctccatcgcgcgccctatgtaccccaaattttgtacttaattctatttccctcttaatttcaaaattccttgaggtcctctgcccccaatatctagcaataccgttcaaattcctaaaccttttctttttctctccatgaatttatatatatgcatataacaaacgattcattgccttggggttgggagtctttctgaatcaagacacatgggttttctgatctataccaaaagaccactgggactgatctatagaattcccattatgagagaccggctgaactgtactggaggccga

SEQ ID NO: 254312 - DNA, 382 bp, Gossypium hirsutum
gccatttgaaaagaaaacaaaacagatcctaaagccccttttcttcccctctcattcggctgaatcaagaggcgcccttggactgccgtttggcctccatgtttagccgccggtcatcacgctaaagcctaatcaggctccgtccaatcacgaatccaaggctacgctcaaagatctcagaatcaacacccaaactccgattgcaacggagccagtgaggattcgagggaaccaaaaacgaaggtaagccccttttttttctttcgaatatatgaacacaaaacccaggcgaacgaaactaaaagaaatccgagattttaatcggaaaatcaccttgatcgattttatatatttgattgttctttttttgttgaatctattc

SEQ ID NO: 254313 - DNA, 381 bp, Gossypium hirsutum
gttcctcttcccaagaccaaagctttcatgcccactttccctgcccaacatgctcaagacaggcgaatgagaagaatactgaagagcccagatcctttgcaagagcaacgtagaaaggagttgcaacaaggggaactagggactggtggtctatttggctaagagaaaattcatccatcagtgctgtttgatcttcattttttagaattttctcattattgttagagggccgtgtttgaggcactgatgatgttttagctggagatattggttgcctcttcctgtgcgccagatgttttgcaggttatattgttttccagctttgttcatcatataaaaatgcatctgacactgcttgcattgcaaggtgtggctatcagc

SEQ ID NO: 254314 - DNA, 388 bp, Gossypium hirsutum
gagagattttgaactattttctctgctttgggggagttcgtttatcccactgtttccatcaccatgggaggatctcgagctcaagtcaataagcctcacaaaacccgtttctcctctaaatcttctaggaacattcataaaatctctcaaaaagataagaaccggattgcaaaatcgaaccgtaatgtaacgcagggagctcgagctgctcggcttcagcgaagcaagatgctacgagagcagaagaaggaagctcttttgaaagaaaaaagggcttcaagtggatcagccagccctccccgtgtcattcttcttttccctctttccgcatccgtgaatgtaagttcacttgctgaagacattttgagattgctttcagcagatgtta

SEQ ID NO: 254315 - DNA, 280 bp, Gossypium hirsutum
aatacctaaacagtcaaatgtttccctggatggacgctgctactcatgttgcatctgaaaacctattctataggagcctgctgacttgacctgtgtcatcaaattaaatccttttgtcccaactactaagattttactgacttacgtggtgtactgaaaaacataaactaactccactctggactcaaattgagaaaaagcctttgcttaacaccgtagttcctttgggatggtggactgacactctaacggacacttctgtccatacaatagatcgagg

SEQ ID NO: 254316 - DNA, 378 bp, Gossypium hirsutum
aaaatttctctctttttttgtacttttggttggcctggtgacttcttggttgttgcccctgctgctgagctgccgtgtacagacttcttttatacaattgaacactgttcttccaaaattccaagctatttttgaggtcttttgggggcattagactaatgggtttctcttaaaatccttaaatttgggagtctttttcaagttttgtacctaaattcatgccaaacaagaaaactgaagctcttggctttgcagttacttcgatctctttctggcatctggatctgcactgtggaatttattgtgtttttagttcttcgagggctatgaagtgttttatattcctcagctggagaagaaaagatgaaccaaagaccc

SEQ ID NO: 254317 - DNA, 335 bp, Gossypium hirsutum
  unsure (1)..(335): unsure at all n locations
ctcggttcacaataacgagcgttaggctttatgtgccttaacaccaagtcaatgaatgggtgtaaaaatcgcaagtgacgtatcttcctcgcgatttgacagagaatacggggtaaatttggtggttcagaaggagcttactcttgntctgtaatttttggtggtttagattcattaaaccaggtgatagaaccctgaagtgggttctttacctcggttttgaaagagaaaataaagggggacgacaaattcttgggtatcaatagtgcctcgatctttcgtgtaattgttctggttcaccataggnnnagctttgtttagatgcattaaacaag

SEQ ID NO: 254318 - DNA, 384 bp, Gossypium hirsutum
ctttcccatccttcgctgttaaactcttccacacttaacttctctttggtgtttccgttttcatttcgaagatgaagaaagcggagctagtgttcatcccattccctgcaaagggccatttggtatccacggttgaagtggctaagcttttagtggatctcaattccaacctctccatctacgctctcatcatcgagcgaaccgtcgacgctgaaagcaccgtctacgccgactctctcaccgccgccagcaccaccactcgcatcaaattcattcacctccctcaacctgttcaagacacagatgcggctaactttattaggagtgtagttcaaacccatgaaccactcgtgagagaggccgtcaccataatagttgagcact

SEQ ID NO: 254319 - DNA, 418 bp, Gossypium hirsutum
attcctgctcttttgttaatcaagtagagatcagaggatgagtgaaggcaacggccaaggcggcagccgcagtggagatgatggaagttgtagagatcctggaagcagtaacagcaggccgccgaaaacgcctcagacacccattagcgacccaccaatgaagccaccacagaggggaggtgtgatgaagaggattataaaagattttggcaaaaccttgtcttctcactcttaaaccgcttagattattatagtctcgtctcttccatatgtttaattatgtagtgagcagctagagatcaaaataacccacagacgaagtctaggataagggtttgtgtgttggtttgtctaaaattatttctctatattatgaatccaagataccccaaagaaactgaaaggtccaatttcacta

SEQ ID NO: 254320 - DNA, 429 bp, Gossypium hirsutum
  unsure (1)..(429): unsure at all n locations
cgnntccgttctnnagatgaggcncnncaaagcanntaaaaaactcanttagaactnnncaagttgctttagggcgcgtgtgtngtgggcncnnttcgtngcgtataacngtannngatggtngnncttgtcnnntgggaccttccannattcnaaaaatnngccatntnngatgacncnntttatanngctanncttcanngatttctngnnagatatgnnacccatatgctnnngtttacaagnntcattctgnnttctgccatttaaaaatccnnncaatttctttaaaaatccnaagcaaaaggggtattccnnngaaattgcaagggcttatctnntgcagaccaatannatgttnnacgtcgcnnaccaaagctttacactttttcttgagtggganannaccaattattttaacnnttgcca

SEQ ID NO: 254321 - DNA, 418 bp, Gossypium hirsutum
tttgcttttccccggcttttcatctctgagtccctgtttcttgtttgcttttggtttgttcatatagtactacaatacgttcagtaatggaaccagcttgggtggatactactttggatctcaacatcaacccttgttttcgcaccaacaaagctatgaaacgagaatttgagggagatgtggtcgagtcggcaccagttaaatatgagagtggagtgttggtggaggaattgaatcgggtcagcgccgagaacaagaagctaactaagatgctaacagttctatgcgaacagtattactctttgcagcaccaattcatggaatttgtcaacaagaaccctgaaattgaaactgctgctgctgcaacaacatcatcatcaaagaagagaaaagctgaatgtgaggattatggtgccaa

SEQ ID NO: 254322 - DNA, 302 bp, Gossypium hirsutum
ttgaaattaaaataacacctatcttctcttctctcacaccttaataaaagggggcgacttcttcttttatggagaaaccgaccccatctccgatctcattccccatcctccctgtttacttcttactacactccacagccacactctccatctacctgttccttcgctattccctattccagaaaaactttctcttcacgttcaactttcttaaatcaaccatcatctacttcttcaccacgttttaacctgcacagaatctcatcatcatcttccaatgcgcagttcattctctacaacct

SEQ ID NO: 254323 - DNA, 411 bp, Gossypium hirsutum
ggcattacatatcgaaaatgctccccttctgactgatgtgcttataggtgggaacttagatgatgaaccagctttcgctttttgccccctttcgggatatctttgtcagctgaaaagtcttacattggagatgagtgcttataatatgacatttccgaatttccctgaattgacaaatcttaggcacttagcagtaagtgcgtatggtggatatgatgacgatcttcttgtcttgacttccttgattgatgcatctccttctttgaacaaactctcgttggagttgaatatttggagatcttcgacatacaatcatgcacataatacgagtaatgttaccggaaaacccatccctagtcttaaagtggtacaggtgatcggctttagaggttttaaaatcgatgtggattt

SEQ ID NO: 254324 - DNA, 409 bp, Gossypium hirsutum
agaattccacttttcttcgaattataattttttcgctgtcctcaactctttgacagtgttttttttttcctggtgatttcatcgtgaaaaaaatcgcagattcttagtctcatcattttattttttatttttaaattctgagatatttttatttttgtttacattattatagttgtagagagagatctgaagcttttaatttttttccgtcagcgatctgagaattttctgggaaagaatcgaaggtttttgcgctttgttttcccccctttcttttacattgtctttactaagacgccattggctgttcgctgaaataaagagataaaaaaaaaaagggctgaagaagatcgtctcatttttaccattttcaagagatccaaaacaataaatattcttttttttaaaa

SEQ ID NO: 254325 - DNA, 279 bp, Gossypium hirsutum
gggcagtccatgcttgttgataattcactgctggtgtttgagcttttatgcttcagctgattagcgaaatgcatctgctggttttttttttatttcaggcatatgcttttaagagtgcacacctgcaactagaatgatgttgtaagagctttgagtttgtagtctttttttaattctataatccctctatatgtgaatattgtaggtatgaagatctcatgttttatgttatatacatgtgaagttttatcaataaaatgtagtctgcacttagctttt

SEQ ID NO: 254326 - DNA, 281 bp, Gossypium hirsutum
ctccctgatatcaaattgcagaagaaacgaaattcagcaagcgcccgtcccatgggagattccagccttgcacttggtacatcagttcataaagcgcttggtggcggctcactttctgatgtgctattggggagaaaatggcgtggcggatctgtgatgctagtcttggctacgacgatgtgggtcttattcgaagtagccgagtttaatgtcttaactttcggggccaacgtgttggtgcttcttattgttattctcttctgtgggaccaaatctgcttt

SEQ ID NO: 254327 - DNA, 151 bp, Gossypium hirsutum
caagcgtgttctgtattacatactcatttagcccctttcattagcggcgaaaagactccacttttcaatatcagtgaaaaacgtcttgctcactatgaaactgagacttcaagggtcgctgtaagtggtgccgtgactaccgaggctacat

SEQ ID NO: 254328 - DNA, 138 bp, Gossypium hirsutum
gaggtttgatagaggaaaatctagtattgttgcggtttctgatgctagtgtcagatgcaaagagtgatttgaatcaaaagacacttcgtacactagctcaaaatcgtgaagctgctctgaaacagcagattgagaaag

SEQ ID NO: 254329 - DNA, 384 bp, Gossypium hirsutum
gtttttcttgcatccctttcatagagtggaagccatggaaacttcacaacccctgtccattgggagcttttcatacagttggttagtgaacctaaaaccttctttagatagtgtagacagctcccttagagcttcacttgatgcatatgatgaagcttccttcattgaaaaggacccgaggatgccaccttccaagaggttcttcagaaattctcaggattttaagtttgattttcccattttacaaactcccctcacccttgttcatgccgatgagctcttttccaatggccatgtcatgccttttttcattaacccttcgaaggtggaggcatacgaagtcttcggttcgacttcatccctgcctactaccacttcacatgc

SEQ ID NO: 254330 - DNA, 314 bp, Gossypium hirsutum
gatgaagcagctgaggatttcagttcaaaacaacccaacaagaacttggatgctacaccccaaagtcagcttctgaaaggagaaagtgaagagcaagtggccatattggtgaaggcaccccaagacactagcccaaaggcaaaagggaatgcaccgttgtggcgtcaggtagtgggatttcttcatcagattttggaagagctcatggcaccgccaacacttggtgcaattttcggtttcacctttggagcgatcgactggctgagaaaccttgtaattggtccgggggcttcactaccgggtaggccaaagac

SEQ ID NO: 254331 - DNA, 273 bp, Gossypium hirsutum
cccacgcgtccgcggacgcgtgggtctatttcttctcattcttctgctctcccactgtttctctcttcaccctttgccattcatctacaaagaaatttattattttaaccagagaggaaacaagaaacaatttggagccatttagttaaaaaaatgaaaggtgaatgtctagaaccccaaaatgaaggtgaaaaccccaataataatatgttttcaaagcttcaccaccctttttctcatcactgtcaactcattcatgattccgataacacc

SEQ ID NO: 254332 - DNA, 409 bp, Gossypium hirsutum
gaaaaatctcaaaccaacaactttttctttccttttatctttttgtttgttcttttggcgaaaggtgaagttcatgaagaagcttcatggttctatcctattcatcccggaaaagtcacagttttgaatacagccgaagtaccaagaatttttaatattactacgccgggttacttttgaggccggttgttacgttgttgatttggtcacagctctctctctctctctctctctctttcctgttgatttataaaaacaccattgttgccgatattgacttgcttgcttcctcatctttcctattaaagtctcggagcatgacaactatttcgctccttctttatatgctttctctctgctttcttctccaacccaaaaccaaccttgttgctttcacttaaaagggtca

SEQ ID NO: 254333 - DNA, 442 bp, Gossypium hirsutum
cggaaattcccgggcgcgcccacgcgtccgttctagattccgctgcaacttttctcagtgcggcattaagcccactttctctgcaggaaaacgcattgtttctgctgctaacaatggtttcaacacggttaattcaacttcattggggactggccaagatgaagatgattatattccaatgccaattgttttgattgatcaagattcagattcagaagcaacagttgtgcagctgagttttggagatcgtttgggtgctctcattgacacgatgagagcattgaaagatttgggattggatgttgcaaagggaactgttgccactgaaggaccagtcaaacaaacaaaatttttcatcacacgattagacaatgggcgcaaagttgaagatcctgatctgttggagagaattcgactcaccattataaacaatcttttgaag

SEQ ID NO: 254334 - DNA, 230 bp, Gossypium hirsutum
gaacggaagggccgggccgacctcacccgtccggaaaaaaaaaagctttttcacttctattctcgagacaattccactacaggtggtgtgcttcacactattgaaaggctatcacagagatctcactaatataacgagctattcaaggtagagtctctttttataatactaaaactaatgcaaggcgccttttataagatcaatactacctgaattctctcttattttaa

SEQ ID NO: 254335 - DNA, 411 bp, Gossypium hirsutum
cccggatggattcctctcttctccggatctaatttcgttttcaccagtcctagaccgagagagaagagcgaagaattgaaggagaggttaaggaagcttaaagaactagcagagaggaaagagtatcaagagcttgttaaagatatcacgccgaagaaggatctcactgaacctttctctacttataaggatcaaattggctttgaattctgctggaggtattcttggattggtgtttggcatgcttcttgaaacatttttgttcattattaggacttcagagcctaaccttaaatcgccgtcctcaacttcgagattgaagaaaaatcaatagagtatttaaaaagaggttggttgtgttttcttttcttgctacctattgtccattatcaatagagtatgtgagtttaa

SEQ ID NO: 254336 - DNA, 373 bp, Gossypium hirsutum
gacttttcaagtcctttctcctccccatttccatcaaaaggccgccgttaagttatcggcgatgtcgacggcgccgccgatttccgccgaccgggtacagaaattcatcgaagaccttgaagcccagaagaaaatcgtatccaaatgcaccgaattattcacaaccctaaccaatcatttcacttccctccaaaattccctttcccaaaaatcccaatccctggatgccaaattcttatccctttcttccaaattctgccaaactctcgattccctttctcaacgtgaatcttccctccccgaccgtgaatcctgcggcgctgcccacatcgaaaccctaaaagaagcaggtttcgccgaattcaaggaccct

SEQ ID NO: 254337 - DNA, 328 bp, Gossypium hirsutum
attttcacaaacttttttgctgatttttgctctcttttttctttaatcctaagtctgttttcttttttacatttatgggcaaaagatggggtcttacccctggttcccaacccggtactaagaagttttttacaaacaaattctattccaccaaccgtggcggcggttcttttatcgggttgtagcaacaccaccaccaccaccgggacatgtttgagttccctgttagtcttttgggggagagcgatgacgaccgccgtggaactttagatttttctttgccgtgtgatgataccaagattcccgtcgatgagggggattttttctc

SEQ ID NO: 254338 - DNA, 182 bp, Gossypium hirsutum
gcaactgcttacgcaatggataaattcacgcatgctgacaaatgaacggtggggaacttcgccactcgcggtgaaacagtaaatgattacttattatctgtaatggtagccgcaagcctaattatctaactaatgacacgcataagttgtccaacgagatcactactgaacatggctactat

SEQ ID NO: 254339 - DNA, 295 bp, Gossypium hirsutum
aaaaagggggggcgccgcgcgtaatatttccaggagagaagggctcagtaagaaaatggaatgggggggctccaagtttcggcgacgttcgggagacagaagatggcggatactataattgggcagctgcgattctgcggtgctccgcgaggccaaagctgcgctggtaagcttgtgttgaagcctcgaggctttgctcttccacactatgcgggtgctccaaagaggttatgttctagaaggtaaatgtggagtcggaatacaacaccagctttcaacacaaaagaaaaagtgg

SEQ ID NO: 254340 - DNA, 308 bp, Gossypium hirsutum
ggaacggaagggcgcggcccgacccacgcgctatcggcctgagtaatgttctctccaactaacctactttcttcgagtaccctggtgcgtgcttctgtggatgttatcatgttaaaaccgaaggtattgatttccccccactcagattggaaaagggtacccttagatttcagctaaagagacccctgcccgtggttttctttgttaccttaaccccaagcaaaacaacaacatgtgtgtttcacaggcttttcaaataccactttatgataagcatgagacgggagatcgtttgatggtacacataa

SEQ ID NO: 254341 - DNA, 323 bp, Gossypium hirsutum
  unsure (1)..(323): unsure at all n locations
cacgtccgactacaaacccctcttctccaaggattcaaagaaaccaaaaacccacgccggtatccttccaagattagacggaaaacangaggcaactatccccatgaagcatcgctttacactaaggaaccatatcgatactaaagaagcaaccacacttatacaatgcttacaagacaacggactcaactgtttgcgcaactgccgaagacaccaccaatgctcgagccggtgcatatcattggtgatgctattagtgcccttacaagcaaacgatcctatatcgttgcaactaccaagaaggtttacgttgatcctaaacc

SEQ ID NO: 254342 - DNA, 407 bp, Gossypium hirsutum
gtgaattctctcctaagcaaaaacaaaagtattctctttcacacctttcaattttggaatctcataaaaacaaacatgaaaggaataatcttgggttttaacaaccaacatcaactccaacagggtctgtttttttttttctgttctttggtaattttctctatgtttttctctaagtggtaggagctgtttctgctttgatccttgactggttcctcttttctttcttcctttttcagggtcagtttttacaggtttaatggcttttgatctaatggcccttttttgtttgggaaaaccaaaacaaaaaaaattggtgttttgagctaagatttggtcttcttttttttttttttgaagaaattcctggtgggttgatcctgtggatgtttctttttattgtgtaa

SEQ ID NO: 254343 - DNA, 282 bp, Gossypium hirsutum
ttgttcaaaacaaacagcaaagaataatcatggtttcacaaccaaacactatgtcacagaggcaagctaaagttcatggcaagtggagacgcaatttcagagtgatggctagctaaacagagcttgcccctcctgggcggttgattgcaccccccaccaccgctgttcatggtgcttctatcggggctttcatggctaccctcaccaacgatgtctcctactctcttccaactccccctcaggcttccctaaaactcaaagcctggttttgttaaacaagcc

SEQ ID NO: 254344 - DNA, 254 bp, Gossypium hirsutum
tttattttggaaaagggggggattttttttgaattttgaccaccccttttaacccgaaaggaaaaccttccttttccgaaaaaaggttttccattttcctccataaaaaaagacttgaataacaagtgcttttttcttttgcaatacaactcgtttcaaaaaaaaatcccatttttttttcacaacggaaaatcaattccaaagccaattgttttccttaaatacattgagaaaacttgaaaaacctatcccat

SEQ ID NO: 254345 - DNA, 418 bp, Gossypium hirsutum
aaaaaaaacctccctcttattttccctcaaaaaatcgcttgaaaaaaaagaaagagcttgaaaatgggttcgagtagcagtcgaccggggttgaacccatcacagggaagactcaacctccgattcaaccggtttcccagactatcttctttattcacctgcagtagcggttcttcttatgctcctcttgagatggaagattatcccacccaaatcccagtgaagagttcggaacaccgtgactcgatttccaacatggtccaaactcccttagaggaatctggttcgatatgcagtacggaaacggggctcagctgcactggtactgaaaccggaacttcaagctgaaagcaataacgaagccggtggggatctgtcgattgatggtggttcaagagatgtagaagcaaatgattgt

SEQ ID NO: 254346 - DNA, 406 bp, Gossypium hirsutum
gtcgatttcgctttcgctaagatccagctacaaaattccacaagtccatcctgacattttcctttgtatttcaccaactactgaaatttgatgttcttctgagattcgttaataggacttactagatggtttcgttgatggaagcatatgcaatgaactttagaaaagaaaattttgatttaaatcgatttgaatgcttataaattatcgatttagaagtttaatctgaaattctcagattcttcgattataaacagttgttatttagttagtcgatcgatcttcacttcgttttagtacttaataaggaaaccatgacattggcttccccaaaaggcaatggtaaaatggttgctttccctcggggccttacttccattgcagcctcagttgtgatactagcaat

SEQ ID NO: 254347 - DNA, 386 bp, Gossypium hirsutum
cctttctccgttcttggcatctcctagtgttaatcttttagagagagagagagagaaattaacaggtaaagcagagggagaatcgtgaaagattcataaggtggatctaagacaagggaagaggccattgccgccgtccgatcatgaatcggaagagaaagaggaagcaccccctcagttctacacggctaggtctcaacaagacaccaacgccatgattcaagccctaactcaagttattggaaacgataatgataataataatccactacttgttcaacttcatcaccataatcaataccaataccaatctcaacatcaacctcaagggaacgtgaggagaatacattatagaggagttaggcaaaggccatggggcaaatggg

SEQ ID NO: 254348 - DNA, 400 bp, Gossypium hirsutum
atgcaatggctttaattttcccgaaactagacctcgccaactgcaggaacagacgggcgtcctcttacctcaatggcggctgctcaaactagaaataccccttgtccttcccgcgcaatatgcacttaacgagaaagaggaaaccttcgtttctacgacaaacatagcacagagcctataggttgtaaagcctgtccatgcaggcactgttactattgatgttaccactgacaaattggacgagacttttctctaaccagcatttgcaagcactggtgcacctcctcctgcttatgaaacaagcactgcaacaaatgcttctactgggaacagttttcaagatgctgcagattgaatctggtgtgactctgctggaactccagactcaaacttgatactg

SEQ ID NO: 254349 - DNA, 388 bp, Gossypium hirsutum
ggttgatgactttgttagtgtccagcctaacttttctcgtgaaacaagaacaactgagaaaagttcggacgtgaataagtcagaaagaaatgtgaagtcgtctcccctttcggttaaggatcaggaagagaaggcaaaaagatgcgagtttgctcaagggctgctgttgtccacaatgcctgatgaaattttataaaacagcgttctcgggttcaaatcggctgctgcaatggaatcgtgaacctgaatcccatggggaaattgggttgacgatgaagagccccccggcaagcaaacttgcaaatctacagttcattactgtgtctgtagtgaaaatgctgaaataaggttggtaggaacgaatgtaatttcttgcatatgtggactc

SEQ ID NO: 254350 - DNA, 397 bp, Gossypium hirsutum
cgaacatatacgccatggccgatcgtatgctttttgggttagggggcccgctacctgggcgtggaaagggctcatctggtttggaagcaggataattctttacccatggctgtggagggggttccttggctaacaagggccggaaccaaaaaactgttcctagaatttgttgggggggcataatccaggaaaggttccatccacaattgggggccaaccaattccaccaggccgtggggaacttgttgtttaaggtgcaggtccttccaaccgggaacttaaggaaccaggggggtttgcggaccctgttttcctgccttgaccacccatggaaacgtggccaggtgcccttaaccttaacgtccccaattttgtgtggcacccttaagggggaaaa

SEQ ID NO: 254351 - DNA, 323 bp, Gossypium hirsutum
cttcattctcattctgtttccactgaactctcgctaaacggtgtggttttaatcggtctggggtcaatgggcgaggaaccaggccacgttctcagtactggggctgcatgacatagctggtatgcggttgaacccatgattgccaggggagtcatgaagggggctgtccatcccgaagtccttgacgtgctcctatttaccacctgctgcggccgctttgtatggatctaaaatcgagtagagatccactgcgtgctctataataacgggggttaggcctacaacagattctggtagagggatccactgtactctgaggttct

SEQ ID NO: 254352 - DNA, 391 bp, Gossypium hirsutum
aaaagctaagcatcttttgtttgtttttctttttgttcgcaccttttggagatgtagccctttctttgcgctccatctgcttacttgtttcgtcaacactctagagctttcacccagtttattttgctacattgtcttcctgaaccctttgcttcccctcttgtttgtgtttttgattcacccattttagcatccttctgtgtttctatcttgctgcactttatggctccaggcgacaatcctcgtctaaaggagaaaaaggacgacgaagggaccaggcatgtaccaccgtagttgccactctctatttttttctaggctcgatcactttgtcctattgttcttatcttcactattttccatgcaaggaaggtcaaattccctctaccta

SEQ ID NO: 254353 - DNA, 433 bp, Gossypium hirsutum
acgcctgagtaccggttcttttcggtgggccccacgcccgcggcttcttgttgacatgcttaggagagagagaaaacatgttgccggtggtctgcaggggtggtttttctttcataaatggagatgtggatttgtctctgtataagatggaaccatgcttacagctgttaggtcattgagatggaatcatttgcctatcgaattacagagatgatatagttctatgtaaccctgcatctagggagaccatggtcctccccgaatcttgtctcccttgttattcgtcaatctgaaacttgttcccgcataccagcgccttgggattcggatatgattgtagaactcatcactgcaaagttgttatgattattgcgcactgcgaggagcgaagggacagtggctcaccccaccattgcagggtagaagtatactc

SEQ ID NO: 254354 - DNA, 173 bp, Gossypium hirsutum
tactctgatttgaacatcaccgctggatatttttcatttgggcaggtctgagcatcaggtggtattaagtactccagcgagccataaatatactaagaagccgaatcagacgggagagaccctgaatggtgtgagtatctcatcacacctcacaacacttgtgccaggagctt

SEQ ID NO: 254355 - DNA, 238 bp, Gossypium hirsutum
  unsure (1)..(238): unsure at all n locations
cgcacgccaccgtcgtaacagtgtcaagaacgatgagaattgtgaaaactcagcgttaatggttatgccattgaaagaagagccaatagaacccggcccggaccggaaaacccatccttcgnggcccattcgggtagtcccagttagcaagcagatgtcaatgcaaatccctatccccacgcctgttaccaccgctaaacgctcctacaacaaggaccgtcacacgaaagttgaaagc

SEQ ID NO: 254356 - DNA, 104 bp, Gossypium hirsutum
tctgagggaagaaaaaacgatagttcgagaaactcatggtccaaatccaaccgtgcacgtgaccaccttggcctgatcttggcgatctatcacacaacttttag

SEQ ID NO: 254357 - DNA, 398 bp, Gossypium hirsutum
ctctggtacaaaaagagaaaagaaaaactgaagagccttctccacttcttagctttaatctaatcgaaaaatcctccaaaagaaggggaagattcctgtttctttctcctctttttgggtgcataatgacagggttttggtttcaccatttttggctgcctcgctttccaatcatgggtcgtggcctgagagttatgagagctactttgtcaaggacgcgaagggttaatgggcgtgtgatgcgatcgctgagagattcgcaagttgcagcttcagagatggtgcggcagaatagaaggaccagggcaaagctggagctgatttttgtagccaatacacttgctaatcaatgggtttatgatcgtcttgttgagattgagaacgacccgttgatgagg

SEQ ID NO: 254358 - DNA, 400 bp, Gossypium hirsutum
ctgacaaccatggatggttggaggcttagtccgaaactttggcaagagtccattacatatttgtctagtttgctagataaggatgaccgatctgtccgcattgctgctggtgaagcactggcagtaatttttgagatgggaagcttagaaaaatttgctgccgaaactaaaggttccagtgatggctcagcttcagaaggaaataaatctaaagaaggattctcatatatacaaggactgaagggaaaaattttgaatcaagtcagagacctctcagtggaagctggtggtaaaggttctgccaagaaagatctcaacaaccagaggaacttgtttaaagatgtgttagagttccttgaggattgttatagtcccaacacatcaatgaagattggtgggg

SEQ ID NO: 254359 - DNA, 158 bp, Gossypium hirsutum
cccgaatttccgggcacgcccaacgcctcggctggctttattattcttacaccacatcgggtgaagcacacaatgtgggggcgaggggtcactttatatgcggtcacagatgtatcaccacatatttcacattatacatatactctcagaacaacacg

SEQ ID NO: 254360 - DNA, 381 bp, Gossypium hirsutum
gccaaaaagaaaagtttcgtctttgatcgttgcttcatttaagcaacaccaaaagttgctttttttcggttggcgttaatcagaagcgatgccttcagctgtatcgcagcagtggcacgagaaggcgactgcttttttttcttcctcaggggtgaagctgaaggaagctagccaaaccgacgtcacgtttgtcggagaagctgcaaaggatgccaatggcaacgtcactgacgtggcgaaacgagtcggttccatggacaaaaaccgatgggcgtttcttcgtcagccagcgacaagacatgctgtgcaagacagtcttatattggctgctgcaacgaccggaacctttttgaggaaaggcatcaccgggactaaagacag

SEQ ID NO: 254361 - DNA, 343 bp, Gossypium hirsutum
tcgcgccgcaacagttctactacgtcgttccagtcccctaccatgtgcgactagatgacgactaaacgaggacgctctatgactactctcggaacggtacgagcgtatggcgtgcgcggagtgctgaacgtgggagtgtggaggctagttgctgctagggtttctggtgttttaggtcaattgtgccctataattgggtgtagcttgacccaagggttatggggtgtaatcagtatataattggggctgcgcaaataattatggattggtcttatttcgaatgggccgggcaacaataggctattacagtcactatctaatgtaattggcataatatcacacg

SEQ ID NO: 254362 - DNA, 275 bp, Gossypium hirsutum
cccgttccggatttccgggttgcgcccacccgtccgctggggactccggaaaggtttacctttttcgtttaccgacctgcccaccttggtaacggttaagccggagtgtgggcccaacggccggaaaagcaccccctttttttgttgtcggttgccccccgcctggcctttgaaattccggaggaccgcttgccaccttgccccgtttttcctaatccccggttctgtgttcgatggtgaccaccctctggtcattgaaccaacttaggcagggt

SEQ ID NO: 254363 - DNA, 408 bp, Gossypium hirsutum
gttaaattaaagatcacttttgattcttcagcttttgaaattcaggtacgttatatattatttacattaatcgaactctaaattgtattgggtttcgtcgaattttaatttcgtttggtcagttgtttacttcttttacgaaaactttgggctttaggtttaggtttcccaagacgtaaccgcttaaataattgctttttattgcattttaattaaagcttatcaaatttcggatgaggaattagggatgtcttgttattcctgtattttcatggtatgtcatgaggatgattcgataattggggaatttttggaaggtggatgctggtgattgaaataaataggttaaaaagtcttgaaatttgttgtttatcattgataaagctcttgttcttttatcaaaatatt

SEQ ID NO: 254364 - DNA, 300 bp, Gossypium hirsutum
ctcaaacagaaaaccagaatatgggtgccgtttctagaacagggttacttcacaaggctgcaaacgatttccctaccagacgagctccatctgtttgcggcaggatcgatatgacacatgctcaatcaccacacataacataccatgctgctattctgctcatcgcctgcatcatacatcatggcgataagagatactttactttcacaaacaccgggatgcatgacattatgtgatcggctgtacatggatgacgctctaccgccgatccatgtacctcagctgatactgcccaccatt

SEQ ID NO: 254365 - DNA, 400 bp, Gossypium hirsutum
  unsure (1)..(400): unsure at all n locations
gtaagattggaacttataccgttgttttgaaggaggcttataaaaggggtttgctgattgagaataatccattgatgaacattaggaatcggtatcttcatcttatgcacactgttaaagaacatggtaaagacatttctatgtctacaggaaccaatcaagaaaagaaagcagcgagtaatgcatccaaaaaggaagctggtgatgatgatagtgaagaggagaataatggactttcagttactttttctggttcagaaactgagaatggtgatagcggccggcgtggttctcgtgaagctgttgcagttagtagaagaacaacaacaagaagttagaggaagaatggngacttgaaaactcatttgggtgatggtgaaggtgaaagggcaatgggaag

SEQ ID NO: 254366 - DNA, 404 bp, Gossypium hirsutum
  unsure (1)..(404): unsure at all n locations
cctttgtcccctttctctctcttcccgtagccggcctctcttaatttaattcagttccacttcttctcttgctctttaataattcaatctcaaatctaaatttaggattgaaaatttcccaactttttggtgttcttttttaaaaggatttaatcatttggatacgaattgaagcacctgatcttgttgaggtggaaataattcagttatttccctttgtttttttagtttttattaggagggtttgttctggatttggagtttagggctgaaggaaaaaattgatttattgggttctctttgaagttaaatttcagggtttgatttgaaatggtatatttccatagatcaatctccgtctgcaactcggctgaccaggcttctccaatggcanattctgggaa

SEQ ID NO: 254367 - DNA, 404 bp, Gossypium hirsutum
  unsure (1)..(404): unsure at all n locations
aaaaaaccttagacgctctttcaatccttcgccgaccaacagccttttgaaggtctattcctctgcccctctttttgactcatatgagagtcaatcaaggcctcatcgagtcgaaagattcgtgagtcttgctcgtagaccccgaatcgtcacttggtctcaatcgtggtgagacaagcgtggattcgaaggcatcaaacgcaggtacaagtgcgtggcgtgtgtacgagggtgtgtgctggcgtatggggtgtgggaatgcgccaggaggagtgtacggcactgggggctactggtgaaggctgcggcgcatgagaaaaagaaccctaggattctggggttgtaattttctgagcctatcgagcctgtatttgngtctttgggtcatttagggtattgggcta

SEQ ID NO: 254368 - DNA, 395 bp, Gossypium hirsutum
gaaacatcctaaaattttcgtggttaaatgcttctgaatcctttgttgagagcatagccaaattgaaaacagcgtgtttggcaagaaagaaatttgttatcatggcgttagaagctgttgtgtttcagcgagaccctttctgctatggcggaagtggaccctgcaacacctatggcgttggttttcaacaacaagaagaaaaagctaattacagtaacaatggagaaatggtttccaaaagtggaggaggaggaactagggggtcttcatcgtcttctttcatggtgcaccaaaaggaatggccatgggatttcaactcttcttcttccccggatattggcttttccaccggtggaccgatattctctccgacggaagcaccagcaatcgacacc

SEQ ID NO: 254369 - DNA, 296 bp, Gossypium hirsutum
gctaatcacagtataactgtagaaagggttgcaatattgtacagaccaagaggatgggggtggatggtcagcaggaagcatgttctttgtaaagacagagtcgcagatcattaaagggatgcgtacgaagcttgcgaggcctgtctccttactgactatagcgatagcttgaaccacaacgacttgcactgggcgtgaaagtataacaagtgatgatgatttcagcatatccacagctggtgctccccctttatgcctttgggcagacatagaacacatggcttattgtctaatgc

SEQ ID NO: 254370 - DNA, 357 bp, Gossypium hirsutum
ggcctgtttactcaggctggctttaatgacccttctcatgatgatgcatctcaaagccactttggcgtgtctaatccaaaccagcttcagtcccagggcttgatgaattctctctactcccagcccttttcccactacaacacacagccactgaacttgcctgctcctcaacagcagcctcagcaggaccagggctcccaaaaccagaaatttcactataacggttaagaataaagatgcatattgctttgatgggttatagtcttttgcaatcagcaacttggtttgtgctgtccttgtttgcccaaaacatacaactccgaagatgcttaaccgtttgcctgttttgaggtcagt

SEQ ID NO: 254371 - DNA, 262 bp, Gossypium hirsutum
ttcccgcctcgacccacgcatacgttgtattgtaagaatccgttttcattatacaagaaaggcaacaatggggcggcggaatagtgacaacgcgcaggcatttctttgacttactaaactatattaacatccttgtcgacaaagtaacattgggtggtgataactgggtgtacatacatgccaacagcgcatatagtcatatgtctctacagaaagcattgtataaaaattagcatcttgatccatggtggttccatttgcc

SEQ ID NO: 254372 - DNA, 427 bp, Gossypium hirsutum
ggaatatgtgggataacaatcaacaccagttcacattagagatgacagtggtatcagctcaagggctgaagaacacttcttcttttatcttcacacaccgtctcaggcctttcattaccatcaccaccttcccttcgccgttagaagctgccgatttaaagagctgccgtgggtttcaaacgagggtcgatgaccaaggtggtgttaaccctacttggggtgataagttccatgttcccattcatcataccttctttgctaatcgatactcgtgtatatatctccagttattcaccaaaaggctcatttccggcaaggctcaactgggttggtgccagattccggccgccgatatagggttgccgccccggggatccgttaggcaactgtattaccggctgagggaggcagatgggacgaggactca

SEQ ID NO: 254373 - DNA, 222 bp, Gossypium hirsutum
gtagccggcagctgcgtctctctcttcatctctctcaaccaaaaagactttagcttttacctaagagagagaccatgtcggtttaccaggatctgcatctgcgctgacgagcttctttgttactcattctactacacggcaatctggtatgacttactctgcttacgaagagggaatgtgagttgcgcacggtgctattgaagatagcactggtgccaatcc

SEQ ID NO: 254374 - DNA, 388 bp, Gossypium hirsutum
atttcttaatcactcaatccccaaaaggaatgaaaacaatgagcactggcctcttccgaccactctttcactcgggttcttctttagtagcttgctagtttccattgtgaaggccacaaccggaagcagcgacaaacaaggatggttgggagaacacataaacaaaggaagattagattgtttctatgggctcctagctgcattaagcttccttaactttggattattccttctttctgcagtatggttcaggaagaaaacagttaaacaagctcccaaaatggagatcgttgttaaagaatcaacgatcgaggagaaatgctagttttccatactgaatgttacttgaaatcttctttaataaccaaattattactatatatatata

SEQ ID NO: 254375 - DNA, 226 bp, Gossypium hirsutum
gttttcttgtagtttaaacctttcactgattccaactattgaggtttgttggcctgggatagcgaattttgtattagaaaatgtcatggacgacgatcgctatgttatggatgatggtagcgagagaagtgtctgactctgattctgactcagaatatgtagatgtgagcttcgcccaccccttttaagaactctatagacaatagagatgggcttagtgagaagc

SEQ ID NO: 254376 - DNA, 304 bp, Gossypium hirsutum
ggtacaagattgatggtctaggaactgctcctaaggggtaatatgcgaaactaggagcactcaaacctgggtctggcctgatagtctacttactactgtgctgacaacggtagttaagtttgttgcaattcaacattaatctttgttgtaagtggatcgtgctgacgaatgggctttaacaagtagaatgacaactgttcaagctcttaaactgggcttggatgcttcaatctagatgattgatccggtcaatgaagctgtgaatttgacgtcacaagcatttaacgtggacaagtctacccta

SEQ ID NO: 254377 - DNA, 433 bp, Gossypium hirsutum
gacgcactagataaacaatgcgcatggactattatgccgtctaataagctagattgagagagttatgccttgtgagcacagctgtacgcagcaaaatatgatgggaacaaggtctgtgtctgtcccctgcacattatatatactgaagaactagctactcgtcccatctgagagaatgatggcatctgtttcatgtacatggcactatccctttatacacctcaaattgtattctttttttatgctaactttaatactgcatggaaaaatgggtgagaagctcgtgtttcatagcaaggatgtctaagtgggcctgggagagacaaatgctagttgtccggaacaatgatcagagctatgtttaggaggaagcgctgattatcactggccaaccacgaatacttggtatgtgataaataataatgctcttcta

SEQ ID NO: 254378 - DNA, 422 bp, Gossypium hirsutum
gtaacactatcgctttctccgctgccgttttactcttttttggtctcgccggtttggattaggcggtggcggaaatgagcgttgagggtgaggcaactcaacttcgcgatgctgccttgccataataatatctcagtaaccaatgaacgacccactcgtctccctcgaagtcgatgtcgtcgttggcgtcagagccgtgccggtattgccttcgttgcggttgccgcgttgcttatctctactgccgcttggctttctcttgttttctccggcactaccactcatcggtggcgtcgtttgaagtactgggaagggagtccacattccctttccgggtccgattcctcctcttcctccttggtttgattcgacacaagacacttcttgtaaccgcagtctctcttagcgtggaaatggaaaac

SEQ ID NO: 254379 - DNA, 416 bp, Gossypium hirsutum
tttctctcttagttttctctcttgtcccatttgagaattcttaaggaattctatttgtttgtaatactttggagatagtaaagttatcatctggtgttagtgcccgaggacgtaggtataatttaccgaacctcgttaaatctcttgtgttctttcttgtcctatttttctttcaatatttgagggtataatagtagtatttaattgtgctattaaattactatagaagggatattctgtctaaggaaagacttggtatttaagagatccatgtgatccacctctcttccctgggaattgaactttgtgtgattttttagtacaataatttacacgcttccgaccctattggaacaacagtcaatacactgtctcgtatggatgaagcattctaagctttcaaaacatcaacaact

SEQ ID NO: 254380 - DNA, 247 bp, Gossypium hirsutum
ttcaagggagggaagctgatgtaccagctgtgggtgaagcgaatcacgctttggacaagtagacagctttactgtcagagctcagaactacaaacttcataatagaaatgcaaaatggtgagagtagattaaatgtatctgaacattgtaagagacatattaccacgggttcttatgtactacttaacgggcgacaacgaagtacttaccgtgcctaccctttattactatagcagctacacccaac

SEQ ID NO: 254381 - DNA, 383 bp, Gossypium hirsutum
cacgatacttaagtggtaaacctccaagacactcaggaggaaaacctacacatgctgaggggtttcttgctgataaagcacccatgaagccactccatggcgacaaaccatttaaggttaatgaaaagggagcactttatgaacctaaatctcttcatagacacttattgagtgtggaagctgacggcacacataatacctccacaacactgatgaggtgaaccctcacgacattgaaggggttaacctgcacatgtttaaggattccctggtgacataccatccaaaggtaagggcaaggaggcacctcatgaacccaaacctgctgacacacacctattgagtgcttgatgttgaagcacacataaacctccacaacaatc

SEQ ID NO: 254382 - DNA, 283 bp, Gossypium hirsutum
cgcaaaagcctttatttcgacgcgctgttgaagtcctccaataactacgcgcgccatttcggagtactagaagaacccatcaaagaacttgtgcttaaatggaaaaaaggccagccactcttgccacgaatagcctccgttatcgcacgtgccaacggcgtttagcacgtgctgactgtcaactcagaaaccgacaatagcaccggtctaaacacgattgctcagactgagtacctcgcgtttacgctagtagacaggatctccgctacgagggcttgacttg

SEQ ID NO: 254383 - DNA, 236 bp, Gossypium hirsutum
gtcgcagtcggttgaggagttctctacacctcacttgccgaatcacctagccgctaagacctataggtacttaacatcgcgacctatccccgtccgccgtggcaaggaccactcctttgtgactaattcgtcgacacggtcgtctgataactcttatctgtgagcacgaacagagcaaccgagatgccaaagcttctttgtaagagcacataggtacaagtcatctctccatggct

SEQ ID NO: 254384 - DNA, 125 bp, Gossypium hirsutum
tttgaatcggaggcggtgcacgtaccatgtttatgtacccaaagacggttacggccgggagaatcaccctgtagacattgagaggcgacacagtttgactgcggcaacgcatatattcaaagata

SEQ ID NO: 254385 - DNA, 248 bp, Gossypium hirsutum
ggagtctgacagcagtaccagtcaatgggctagaaaacccataaagcacaaggtagctgtttgaagagaccgctcaacactgcctccacaaacgacctttatttttttaaccggactagcgtgagagcacccctgagtggacctagaaggctgggaactttgcctgagcagcgcgaatccagtaaaaactctactcaacgtcctggaccgcgctggaatgctacacatgaacataacttgcttctaga

SEQ ID NO: 254386 - DNA, 431 bp, Gossypium hirsutum
agcattttcaatggcatcaaaaaggcattgagagaagaattgaaaggacgaaaggaaaggtcatttttagttgtggttgtgaaggggctattggtgggcatggaagggctggccatgctcgggcagctaatcggtcagcttcaagatcttttgcaacttcacggctctcctccgccgcctcctcctccgtctcattttcgccttcttcatccgcatcttcaccccggcgactaccaccgcaggtggtgtttgcacaatatagatgatactcctgcagacgattactacagtcttgtaatggctgctgggaaatctggaagttgtaagatgttggaacctttcgagcctccaggtcctccaccaagcaagaaatcacgaaagggacggaaccaagagaaattacatggaagtactgctatacctgaggccga

SEQ ID NO: 254387 - DNA, 396 bp, Gossypium hirsutum
gggttttcctgttttcttttattcttttttttcttttttaaatggccttttctccctcgttcagacctaacatgcccctcgttctatctcctttccttgaccgaaccggaccccctaatcctcttttaaatcgacctcaatttcctggtttttctgctcgcgggcagttccttcgtggttccctatccgtggccaagtttgggttcaaacccggactcttgcccgacccggaggcttccgaaggtgttctcagagagctgttcactagagctgaaagccttctttatacgattgctgatgcttctgtttcgtcttccgacaccattgctacaaccactagtgctactagtaaacaaaataatgattggctttctggaattgccaattccatggaaa

SEQ ID NO: 254388 - DNA, 231 bp, Gossypium hirsutum
  unsure (1)..(231): unsure at all n locations
gtggcaaggtgtacattttttatatccatatttgagcaccaaaaaaattgtaggaaagagctgccaaagtatccattgaggcttatcttgataatatgtttatagacgatacttacaatagctcagtatatacacaatgaattcagatagactacaaatccatctaaagattcatgtgctttgaaagatgcgngtctttgccattgataatggtgctctatacaccataca

SEQ ID NO: 254389 - DNA, 378 bp, Gossypium hirsutum
gtttgtgctcatgtttaagatctatagactgtaattaactctttcccccttttctgggtgtttttctatgtaatcctttgcctgttttctctgaaaacatggctgcggatagctttcttatgcccccatgccgaaagattcggatttgcaaagcgaaaagagagccgaatctgaaccatagtgattcttcctcaggtgtagaacctcaggatgcagattactcttatgttcctcagctctgtgatgagttagagaatttgatattggctcgatttcctcgatcggaattttggaaactttacttactaaacaagcatttcttacagattttaaagagtggtgagttatttaagattaggaggcaaattgggtttaaag

SEQ ID NO: 254390 - DNA, 372 bp, Gossypium hirsutum
aacaagtcaaatgtcaaaaaaggcatctttgataacgcctctttcatgaccagaaaaaagaaccatactgttaaatcttaagaaggtgcaaaagttacagcgcttgatatataaacgagggcgctggcgagggcaaacactgatgtattcttttcttaccgatgcaaaagatgcgctgcttacgtctggatgagaaagatctgccaagtgtgtcaacaaagacaacgcctccaagcacatcaacgaagtggagtggatgcattcaggcttatacgagtcaacatctgattgtgcctgaaatgttctgaagcccagaacagagtatgacgtgtagcacatgtatttggaaaacgaggtttaacttagaaacat

SEQ ID NO: 254391 - DNA, 430 bp, Gossypium hirsutum
ggcttctacgtgagggtgtagatgcaaattaccgtgacaagcaaggattatgtgtactgcatctggcgacattattcaatcgaaccgatatagtgtttgccctcatggactgtggagcaagcatggactacaagaatgcacaaggagaaacaccaatggattgtgcaccagtcactttgcaatacaagatgcaaacgaagctgaaagagggccgagcagcgtgaaatcaactagacaagagaatccgaaaccgatttcatacttcgacaaccgacatgctcgatctcgagttgtcagctttaacgagaaattattttatataatgcttgatcctgtcagcttagtgctggtactgttttgtattatagctggtagacaaaccgtcaaacagacttcaggacatagagtctcaatcaaaaatttttttttt

SEQ ID NO: 254392 - DNA, 302 bp, Gossypium hirsutum
gtctgacttgctctgtaaccgtagaagtgattattggttgagaaatcatgggggaggacaagcataagcctgatgataagggtctgttttcacatcttgctcatggtcttagtcatggtggtcatggacacccttctggtgcatacccttcaccttctggcggatattcacctgctggagcttaaccaacttaaaggtattcaacaagttgcttaccttcttaaagaagatacccccctcaacgattttcacacaatttgcttttcctgtgccttccaattaaggcaccgtggccttggaac

SEQ ID NO: 254393 - DNA, 417 bp, Gossypium hirsutum
  unsure (1)..(417): unsure at all n locations
acgcgtccggtctcacttgctctntnaccgaagaattgattatcnnttnnnngagggagaggtagggattatcttattcctgatcataacgctctgntttcacatcttgctcatggtcttagtcatggtggccatggacaccctcctggtgcatacccttcacctcctggcggatatccacctgctggagcttacccacctcaaggctatccaccagctggctaccctccttaaggaggatacccccctcacggctatccaccatctggctatcctggtgcatcccattcagggcacgggggcatgggaacgctgcttgcatgtggtgcaacagctgccggagcttctatgggggctcaccacgtggcttacggtgctcatggagctcatggcgcttatggtgctcatgggttttgt

SEQ ID NO: 254394 - DNA, 104 bp, Gossypium hirsutum
attaaaacaaagcattgcgatggtccctgcggatgctcacgcaatgtgattggtgcccagtgctcttaatgtcaaagtgaaaaaattcaaccaaacgcgggtaa

SEQ ID NO: 254395 - DNA, 265 bp, Gossypium hirsutum
cccaaacatgtataaagactgcttgcttttgtttctcgaaggagtggagggatttatcgtcagttcttctttcgttaagcaacattatgattatgagcttacacaggggaaatctgtaggaggtaataatcgaccccaccaccagccattatgttaacaccgaccgccaatacacaatgcacctggctgcaaaggacaggtgccagcatatgggggaagaccttataacaaaaacttattgtgctaatatgttcagggcacacat

SEQ ID NO: 254396 - DNA, 300 bp, Gossypium hirsutum
cctattttaaaatttcaaacccagacttggtctttctatgtctctctctctacaagcagtgaattcctccattggaggagcttaacatacttagattattcctgatcttcgctctgtctgtaaaataaacacatatataccccaacaccaacgccatgggaagatttgaagagggagaattatattcaatcgtatgtcctaagcctatactaacctttagataatctaccaacacctgttattagactgagatggatgatttaaaagctgctgcagagcttcttgatataatcctctccg

SEQ ID NO: 254397 - DNA, 235 bp, Gossypium hirsutum
gaccctggggagcttgactatactccgactttgacacatgacttcctaggtgaaagataaattgaccctctgtgaccgaaactgaaatcccactactcctaacgttatttgacttattcacgagaatcctaagcggtgcactggctctctttatctaccctacgctgattctcggctgagcgatccgctcagatgacatctgtagatgttgagcctagatggggcgtcccatctg

SEQ ID NO: 254398 - DNA, 347 bp, Gossypium hirsutum
aaaacactgaaatggcatacgactatcattattacgaatacaaggctgatgcacaggcgtactaaacctatcctgagaaggcccctactattcgaaagaaccgatatatgaagattaaaggccagccctacacggatgctgaagattccacactagaagacagtgaacctcggacatgctcaaaggcactggattggaatacatatcttaactgacgagaagatggaagatgtggttcacatcataccagaactgtgatgggcctgataggcaagatgctgactacacaagtgcttgacattgatgaagatggacctatacgcttgctgactgatatcggtgatact

SEQ ID NO: 254399 - DNA, 321 bp, Gossypium hirsutum
ctaagactgtgccttgtaacacgcacactactaggtatcgagccagctgtcgatcttagatgctacatgtttttccgaagcactgcgagcgtattgcatctaatgttaatacgtagggggggggcagggaccatttctgtcgagaaaacggctgatacctggaacatcatattctatcaaagaactggatgcacagactgcatgggctattaaccctctcactatatgatcatgattcgacgtggcatgctgctttatcacagcaagttgagtcgttgatcctaagacccttgctgctgtggactacaagacatgtgggaa

SEQ ID NO: 254400 - DNA, 424 bp, Gossypium hirsutum
tataagttaagtaagctaatcaaggcggaggaggcgagagctaagctcgttaaacgagcaatttcgggggaggaagacgaggatttgagctgggatattgatgaggacgatgaaggagtagagggtggaaatgttgatagtgagaaaaaggagcatgatttgcgtgaagatagtgaggaatgttcgaaaaaggatgaggataaagtgagttcgtgtaaggatagtgatgtttccataatttcgacccaacattcaatggctgaggaggaagggtgggatgagattgaggagattcggagtagtaacgacaataaaggggacaatgttgttgggagcactagtaggattgatctatgtaagcggctgagtgttgcagaagaagaaaaagatttgacttgtgatatcgatgacgaggaagaagatc

SEQ ID NO: 254401 - DNA, 447 bp, Gossypium hirsutum
ctccctacggctgaccaaaaggacacccatccaccgtccgccgcactaccaccgtacccggtggcctacgatgcgcaaagatgggtttttagccctatttcaaggcgcgtttgaaggccaaaacgccttcgacccttgaaatcgaaagggtaagggctcgtgcccccttttgggttcgatcgcgacaacgacgaagagccctctgacgaggcggtcacgaggcagtttcagtgtagtgtgacgcgtggagaagatggcgtgcggcgtgctacgaagcggctcacgtggtggccctgctggtgaggagcggcggctgaagcctagtggctagggttgctgttgttttctttgtaatgggctagggttggaattgggcttaagtagtttgggttttaattgggttttaaaatttgggcttggttgggtttggatttgggttttttttgg

SEQ ID NO: 254402 - DNA, 439 bp, Gossypium hirsutum
aaaagaaatcacagcgtcgtattgtcggtcattttctccgatggaatcccaaagctccgacgaagaggatcagttcttcgatgcatttgacgacttccccttttacgattgccttacctttgaccaatcagatccttccacgtctcacttaccgtctactctccgccggcgagccttatctcgccggggaatctcctccaaggaatccggaggagagtcccttccagaaacttccactctcgaagaccactccaggaccagttctagagagccaaggtacaatcttttccgcgatttgaagccaagcgacagcactttggtggtaaccgagtcgcctcgagatggagttaacccgatccgcgtctcagaagagaacgccggcgttgaatccactgtcaccaccgcagaaaatgatgaatcacttgaccaagcccgttac

SEQ ID NO: 254403 - DNA, 329 bp, Gossypium hirsutum
ctataaacggtgttattgatgtattacgtgatgttgccacatggcaagccaaaggaaatgcggcggatacaatattcagcttatgatgggtacacgcctacaggaaagggctggggaggaagacacgtgtgataaaaggatgggtagattagtgaaaagactggcccaccaattctaaaaggagcgcacacgagactattttgaattgggcgggagataggcagacacgggagaggctagtgtaaggaggaagtatagagacagtgatccgagtcattaacatgctaccagaaaatgccatgtctatacttgatgcagaacctaagaga

SEQ ID NO: 254404 - DNA, 389 bp, Gossypium hirsutum
cttttcctctgaattactcgcgctcatgggaagagtctggaaggtaaaaaccgaagaaacaaagcgctctctctttttgtgaattcaatcaaatcgaagatgttgtgagtggcaacgaggcgggtcacttgttggtcggctgcgtggaggtcgcaccacgccacctccgatatcgactctcgtactttcatcgacggctccgattcttctgatcgtctcagatccaattgctcctcctgctgattttccttctcttacgcttctcaatgccgtcttaccaccagacgtttttcttctgagtcactcaccccaaaaagtgaccacagtgtgattcgtggtgttccagcaactgtggctggtattcaaaaccccaaagctaaaatagatta

SEQ ID NO: 254405 - DNA, 438 bp, Gossypium hirsutum
attcttctcctcaggcataacccgcattttctccttccaagaggccaacccgccggaaggtatgagaacagcgctcgcaggcttcgaaacatggtttctttttgccaccgggttcccttcaaaccccgatttcaacgaagccaaagggaatccgcggctcaatctcaaggcaagtcccctttttcttttctttttcatgaatgtaaaattataaaagcaaaaaaaaacggaggaaataacaaatagaatcgaggaacaaagatcaccttctcaagaagtgactctctgattttcaagcaaactgtattgcgtatgtattgcttgtttgtattctctctcaacgtaaccttttacaaagactcaaactctggctttatagcccgaaggaaagaggaaaaatttacgaaaaaacaaaaaatacaatgtttttcttttttg

SEQ ID NO: 254406 - DNA, 220 bp, Gossypium hirsutum
ctatcttccccccccacaatctaaactacataccctaaaaaaccgtctcagccagggttgtgataaaaaatttttctaagatcacccaaaaaaaaacccttcattatagtctaaccttgagctaccctaacaattaccactctttacaatgctatctttcgccttctcttattccttcctctactaatatcttactctcctccttcaactttaacccttt

SEQ ID NO: 254407 - DNA, 433 bp, Gossypium hirsutum
ctgattttccttttctctctctctctctttatgtctgtgtttatctctatctctagttgtcttagccgttggaaactgaggtaagaaagtggagaaagaaagttcaaaaaaaaaggtgtatttcatatgggttggttcccttgtggtggaaaaccaaacaaaaaaggaaagaaaaagctgcccaatcataataatacaaccaccatcaattcatctgatgatcagatcccatctacttcagaaaagctgaaggtgaattctgtgccggatgctaagaaggaggctaacaaggatggagggtcggatcacattgcagcacacacatttactttccgtgaattggcagctgcaacgaagaatttccgggcagattaccttctgggtgaaagaggttttggccgagtgtataaagggcgattggagagcactaatc

SEQ ID NO: 254408 - DNA, 432 bp, Gossypium hirsutum
gaaaaaaaaaggcccttttttttttctctcttgtttttaagttcggatgttcattttctatagacaaaacctttattttttttttataagagtatataaatatagtcttgacggaaggcttcgacacaatcatccacttagtaccatcatcaagcaataaagcagggtgacatgacggtgcaatagtcaataaccaaattgtctataaatctatcattgattggataacctttcattcttgcactcaaatagtggaaacttttctgggttcttctggttttgtgctcttaatcagcagttgcagtactttattgctctttggagattgtatagtctttagtcatggccctttgtgcatcttcatttcctgccattatcaactggggtgcagcttcagatcctcaaaaatccactccttttgcttcccatttt

SEQ ID NO: 254409 - DNA, 393 bp, Gossypium hirsutum
aaaaaccataaccaagcaaaacaaaatcgaagggaagtgtgtactgctttcaaactatgggttctttttctgatccatcctcattttctttctctcggtttctcagcttttcttttaaggatcacatcatcacattccggctgcttacatcaacttcacggcaaaccatttactgttaaaaggcaaaaaactttggatctataagaagggaacaaacaagttgtgttttgatagtgggttttggattatagaggcaatgaggcatttttcctccatgttcaatgggttggcgaggtcgttttcgatgcgaagagggaagaattcgagcaatggtgatggaagagaagctgctgagacaatggcaaaagatgcaaagaaacatgacatgatttt

SEQ ID NO: 254410 - DNA, 444 bp, Gossypium hirsutum
acccattgattttctctctgattcgatatccagatcagaaaattagccacgaaatcgataaagcttttcgcgatacccagaggtgaaacaaattgtcacagcctagacgggtgcacgggtgattatggcagacttagaaaatttgcttcttgaggcagcgggaagaactggtactgggggaaggaaccgacactcacttccaccatctagaaggcgacgtgaaggttcatattcagatgggggaagtgactctagggatgatgattcggatgatgatcatgggtatgcaagtagaaaaccgtctggttcacaagttccattgaagaagaggttagaccctgctgaaagagatgatgatcagggcagtcaggaagaaggtgattatgatgatgcttgttctggtcgagagcgtgacagcagtgatgaatctgatgttggtgacga

SEQ ID NO: 254411 - DNA, 391 bp, Gossypium hirsutum
cccaaacactccatctctctctctctctctctctccatatatatatatataagactgtttgaacaagttctgaacattgtaggctgattaaagacagctacatccctctttttgtgtctgccggttttgagtctctgttctggcatttttacaaacaccctgtaaacgaaaatggcgcttccctatacccatcactatgacctttcgttctttgctctcaatttaaagaaatttggctcttcgcatttgcaacccttttgttgtttacggtgcaattccagcgtttcatcttcaccattcacggagaagcactcgttgcagaggtaccaaagggaccagtgggtctacaacaacaataaccagcagcggccgtctctcagctgcgatgatg

SEQ ID NO: 254412 - DNA, 404 bp, Gossypium hirsutum
aatcaaaaatcctaattgatggcagatttaaagcaaaggggtatatatagattgcaaccaaaataagcatttttttcctactttcatttctctttttctttctttcttcctgtctggtctggatcttctcttttgtttaatttgtttagagtgagcgtatcctattatgaaagtgaagctcattattttagtcccattcatggtgttggtttccatggttgtagctcaacaacatgttgatcaaatgcagcatcaacacgattccaactccatcacattagagttaatacataggcatgctcctcagttcaccaacaaccaccctataactcagcaccaacgcctggtcgaccttctctaccatgacattatccgccacggtatcatgtcccaccgaagacgag

SEQ ID NO: 254413 - DNA, 333 bp, Gossypium hirsutum
  unsure (1)..(333): unsure at all n locations
gacgacccgggtccgaaaactcgctaatgcccggctcaataaaacaagcgggggagcgaaagtcttggcccaagtttggggatgctgtaagggaagatgttggtagccgactcactatggtttccactgaagaaatcctccttgaacgacctagagctcctggtagcaaagcagaagaaccgaaggctgccggagattccttggctcaactaggaaaaggaggtgctgtccttatggtgtgtangacttgtggtaagaagggtgatcactggacatctcggtgcccatacaaagacctcgctctgccggctgagtcattcgtcgataagcctg

SEQ ID NO: 254414 - DNA, 196 bp, Gossypium hirsutum
gtgtggttgtgcaaaagctaatacaaaaaaggcacccaggggtacatgtttgtcggccacgtatgttgcacacctaagcgtcatggaggacgccatggtatacctacaatcaggcaaacgcctagatgccggcgtgttgattgctcggagcataaaccggaccgacactagcttggccctatccaccgctattgtc

SEQ ID NO: 254415 - DNA, 415 bp, Gossypium hirsutum
cgccgccttcactccactttgcagtcagccatcgcagacgttcctcgggccagctgataccgccggtgttcagctctcttcctcctcaatctatttgccggcttaaaaacctaaaacaaatccggatgtaggggaatttgataaggaaacgtcacaaaaaaaaaaaaaagagattgcgtgatgttatcttcctttttcattttttgatttttttcgcccaaaattctctcccattctcaccgctgccgccgacatcgtagcgattctttgtggcgatcttctcagtacttaactgtatctactctatcgcttccgtgatttggatttgactctcgtttccgatttttagtaaagctctctctgctttttgttagcttcgtcttattgaaaatcatcttttacagtttccgttctt

SEQ ID NO: 254416 - DNA, 275 bp, Gossypium hirsutum
tatatccagaaacctcattttcataggagtgcttataaactaccattaaaacgcgggacatggtagtgagtgcttgcttataggaatattgcttttaatcaattttcttactatttgcaaaggtgtcaaggcgagtaatagcttttacaaatatgcttgcccacaattttataagttcgtgagatagattttccagattcatactcaaaacactctatattttggtgctcatcttattatgatgcacttacttgatttctttgttaggggatgct

SEQ ID NO: 254417 - DNA, 389 bp, Gossypium hirsutum
tgaaatttttcaggaggggaagtggttcgcatctgcctccttctagacaagtggaaattctggttttttgcaacaatgagttttgttttccgagggactagaggggatattgaaagcgggttttcaggatttattcctgaacgtccagctgtgcgcatacatgcagcccgaccagctaattctaattcgctggcctttcttgtcacagctctgttgctgttcatgattttaaactgtcatcaaatgtcaccaaactttctggtttggctagtagtgggtgtctttctaatggctacgagtctaatgatgtatgcaacttgtcaacatacttaagctcacgcccgagctcacgctgctgcagctagtgggttgcttggtcatactgagct

SEQ ID NO: 254418 - DNA, 286 bp, Gossypium hirsutum
gaaaataaaggtcctcctagtaaatattaccaggtagcaccatggcttagttcccggggttcttcctttggcctgtctgtttgtttttttctaatctcaactagttcgattagtccccacttttttttctttttttttactttgtttttaggttttgtttggttgatacttgattcttcatcttcctcatctttattgtgtctagatctcgaaggaaagtcatggattttggtttaatgaggaaggaataagttccttttcatactctcatatcttctttcttatc

SEQ ID NO: 254419 - DNA, 156 bp, Gossypium hirsutum
gtaaaagaggggtaatatggagggagaggtggaatcacatgcgcattagttcactgtcgttctactggatcctcgattagcttagcttgttctatttcttgctaatcatcatcatcatataccttgtttttcgtcacggatgacgataagcatgaa

SEQ ID NO: 254420 - DNA, 378 bp, Gossypium hirsutum
ataggacgaaaatactgacatccggcatatacagacttacccaatatttgtgtgcgatgagatcctcagactctctcagcgagccatagtcggcgttcactgctaaatcagggctagaatcatgaagcgggtaacttcatggatgatcagagcaggaaaaaacgttggggtttctttgaaatggaagaatagctaaaatcagggtgggagagatccttattatcttggctagaagcttcatacattcaccatagccctgagtttgcactgacgtcaaaagagttcgacgactcaacataggctactgccaacagcgactgggtctaattcaaagagcaggatctatgtaccatgcttcacctctggttacagaaaatc

SEQ ID NO: 254421 - DNA, 315 bp, Gossypium hirsutum
gactatcgggcttgcttctatttgttgtccatattttcctttgtggagaacccaaggaactccttgagggtttagcagttaacaagagaataacatatgttggcgaccgccattgtacatggcgccgtagggcagttttctcttaaagaagcctacatcacaaatgatgtcgaccgcctaagttcatctctgtaccaaaaaccgcgacttaaaaatggatggtgtcgtctttacgcgtcgcaatgtctgaatatacatcattaaccttgacacgacctgcgagagactatgcctcgcagatagtgttattgctgc

SEQ ID NO: 254422 - DNA, 212 bp, Gossypium hirsutum
gcgtgagggacgaagagagagacaaactgataagacaactagaatggaaaaaaccaccgaaacgacgccgtcctactcattgcaagatcaggctacgacagagctcggcgccggcgggaaactaaggaggcaacggccacgtcgaccacctaccacaccctacgcccgtcctcagcagaaccaatccttacgcggtcgcttactctccaaac

SEQ ID NO: 254423 - DNA, 332 bp, Gossypium hirsutum
gaagcgttcttcgaaaatttatctgtgaaattttctgcagttttcttcttacaatagaagatctaaaacaacctatacggcgccatgtacggatccagaggatttcaagatcgttgaagacaggatacacattgcatgccgccccgatgggaaagccactggagaggcatacgtggagtttacttccgtcgaggaggctaaaagagcaatgtgcagggataggatgatgataggggtctcggtattggggaatggtttctttcaacaccagacgaagctcgacgagccgaatcaagatcgaggcagggaagaggtccggtaatctgggtttt

SEQ ID NO: 254424 - DNA, 299 bp, Gossypium hirsutum
tgggcggagcacccgcccgttatttataccacacaaaatagggatccgcttgcttttatgtaggaaaaaattctaaactggtgggtacgttcgctggatactatcgctcattttttccttaaaacccttaatggttaccggagccctttaatcatttttgggcgtgttcccaaaaaatctgattacacttaggtttaccaagttcttggggttcccaaaagggcaaggcagggtgaattaaaaaaggcctattagaaaggctgcatttaaaaataatccgggtaagggtggaacccccg

SEQ ID NO: 254425 - DNA, 131 bp, Gossypium hirsutum
gtcggagggtgtgttaataaacgccttcgattgaacctaaaagtccctatagcttcgctatgcgagagaccctgttttgttaccaggatatcatatccgggggcgagcttttttctgactcattaccctac

SEQ ID NO: 254426 - DNA, 154 bp, Gossypium hirsutum
ggggaaagctgccacaatggcagcggccacattgaccacgccggcagggtcagcggttatactaaataacgtggggttaaagaaatcgccggctaaagacacatttgttggcggtgaagaaggcgaacatctattaaaatcgcccatatcgttg

SEQ ID NO: 254427 - DNA, 241 bp, Gossypium hirsutum
gcaatttattgcccccaaccccttttacatcaactcctaaccctaccttaccaatcaggcggggcatcttgcccttccttggtattcataattttcctacaaaactttctacattgctgtctattctaagggctaataccttatcagcgatcttaattgcctgctgcaccatcaacgcaggtacactcatgtcagttgcttgagaaactaggctcgtcctggacaagaaatctatcgccat

SEQ ID NO: 254428 - DNA, 318 bp, Gossypium hirsutum
aagtggatcaacaacgagcagctttcatgccttgtctgcgtttcatcagctaaccccgtacggtgaactagcatcagcctaccactgtgtacatgaatgcaagctgggctctaagaatctaagacctgagctgcaaacaattgaattggtaacccctcaaagctgactactgtccatttcgtggttgcggatgacaatgcggataaaaaggacgtggatttagaaacaatggactctccaatatggtatgctgcgagatcttcagtttcatagagatatcaatgggctcttgaactacgaccgcatgtgcttatgggg

SEQ ID NO: 254429 - DNA, 114 bp, Gossypium hirsutum
aaaagtctttggttctttcgctcaacttaatactgggtattgaactttgtgcaaggggggttggggttctttatggctttgttgcgatttcatgaatgctatgtggaattggac

SEQ ID NO: 254430 - DNA, 372 bp, Gossypium hirsutum
aggaaagggatatctggttatctttatactgaattctggcacttctcaataccactagaaccagctttagaagtaaaataaacccagtgagaggatgataagatttttccaggataatcacctccatggttcaagctaaagttcagtaacttaaaatatttttgtttacaagaacaatatacattacaaaataaaaaagttgcactgccttacctggatatgtaggtaactccagtttgtccgattttatgtacggttttaagagtcacatttccggatgcctctgtctcaaatttcccattgattatgcacaccatctctttaagcatagacacatcaacatctccatttggaagaggtataaccatatta

SEQ ID NO: 254431 - DNA, 382 bp, Gossypium hirsutum
cgacgagcaagatcaagcagacctggaagcagaagaagagaacagcaaaaacagagcgaagggaggtgtagctggcaagaaggctcgaagaccagtggcacctaaaaacccgaagaaggtaaacaagaaagatgacccacaagtacccgaagcctcagaaatttcgtctacgacagcaatggaagcagaaaatgttcctgctgttgttaaacccaaaggccgggccggtgcaaagaagaagacaaagaaggatgatagtgatgatgatgatgacaacgactttgatattcctgatctaagggagcgacttgccaagcataacatcgattcctctcctgataattccgctgatatggaaactgaattgtttcaagaacctgct

SEQ ID NO: 254432 - DNA, 134 bp, Gossypium hirsutum
ttgtcatttcaagtccttgggtttcgtggttcaaggcggctagtttaccagcactgggttctctactgcttactccattgattttatacaagtcttatcctccccaaaccaaaagacacacccgattgcccctt

SEQ ID NO: 254433 - DNA, 206 bp, Gossypium hirsutum
tttcatacttaatcaactttatttctcattgatcccgcctttttctttctgtttccatctttgggttttcaagttatttcctttgttaatcatggagattatcttggaactttttctgacagcttttattgctcttgttttttctttcttgatagccaagattgtctctcttgctaccggtggtgatgctggtgggggttgtagtg

SEQ ID NO: 254434 - DNA, 302 bp, Gossypium hirsutum
ctgctgaaactgaagtaaaagtcgaaactgaagcacccgcacccgttgaagtcaagggagaagagaaggccgacccaccggttgaagcacccgcacccgttgaagtcagggaagaagagaaggcccatccacctattgaagcacccgcacccgagaccgtggtgtaaacagaagtggtcgaaaaggtttcaagctgccgtgacgacagtgccaagaccggtgagggaattgaggaattctttgtagcagtggccacttcttcaaccgcctaaaaaccaaaagtagaggcccttttttttttt

SEQ ID NO: 254435 - DNA, 388 bp, Gossypium hirsutum
aatactcacaacttcaattgaaacacctctgcttttgctgtttccaatcttaggcggggctaaatcttgctatacaaaggtacaatttttttctccaaaagatacatttaagttttagtcgtgcagattagaatggatcaccaggggcatggacagcccgcggcaaaggggatcataggtggtggagcccaaatgccgcacagcactaacccgtatccaaaccaagtgactggggccccgtattcaggatcgggtggaggcattcaaccgagcagccaggcaacaggagctcaacttgcacagcaccaacttgcttatcatcaaattcaccagcagcagcaacagcaactttagcaacaacttcagacatgttgggcggatcagtatc

SEQ ID NO: 254436 - DNA, 387 bp, Gossypium hirsutum
gcagcttctccaccttgcatgggacaaggagaatgaacagtgtcccatggaaggtggagaagctgcttgtctccatatcagtaaacctaattgtgatcgggtaagcgtacaaggtatctatgaatatatggaggaagagacattccttttattaacatcattgatgcgcttaaagggatgaaaagaataaagagatgaactggatgatgtagaggaagatacacactggaaggatgggtgatttcaggtatcagtgatgcatgtcgaaccagtggagcttgtacctaattggaggacatgacaaaaacaatttttcatacagttacagtgtgattgaaggcggacctttatgggacatgcttgagaaaataaactatgaaaaccagt

SEQ ID NO: 254437 - DNA, 298 bp, Gossypium hirsutum
tcagcctctttgactaagcaagcaaagcaaatatcaatgcttaaagatccctcatacgttgaggaacacctgatctaaaccaacttctttttgggcaatgttttgtcactttttatttttatttgttatgataatgatataagttgagaatttaagattgttttttctttatgttttggattttctttttgaatgcactgcaaatttcatgcatcttcaaattttaatggtattttgattttagggtttaaaaaaaaaaaaaaaaaaaaaaaaaaaaaaaaaaaaaaaaaaaaatagg

SEQ ID NO: 254438 - DNA, 418 bp, Gossypium hirsutum
aaaaaaaataaaaaaaaagttctggaaaaacaaaaattgcagaattcgctcgtatacggttccttgtctctcgcttgtatcgatctcgatttccagtatttaatcttcacattttctttgttttttttttgttttctttcttcaggactcactgatttaccagatccgagttcgccaagtctcgattttgggtacacaaaaatgttttaaggaaaaaaatagcatcgaactcagttttagcattgtttgtttgaaaactgggtttttctttaacttcgaaaagcttcagcggggcaatcaatggttttttcctttgatccttgtaattttctaagaattggggtttcatagaagaattattaaaagaaactagtgtttttaggatctggcgcttggatataagggaaaattacaatcg

SEQ ID NO: 254439 - DNA, 397 bp, Gossypium hirsutum
atgatgcctactcgtatactaatgatttcccaaactctccatctcatttctgcgagagagctacttctagcatcataattgcaaattgtaatattaaagcgtcgatatggtgcttgtgagaggcccgcctgagaatcgattgagatcaactgattgggatcaaccctctcccggagtaactgtgaaagaagcatatcttgttaggagataataccttgaaactgaacctctccactctatacctatcatttccttgtgaagggcacacagcagaactaacagggaggttggttgctccaagcggttttgctcttgctataaatacaccatttggcggtacatattcgtgttcgtgttttttttttctaaaggaaaatgttaggagctagttagaata

SEQ ID NO: 254440 - DNA, 349 bp, Gossypium hirsutum
gagctatcagccattagctcccttgctgcacatttgtgagcaagtaaaaatgcttcttgcaccttgcttcatgttctgggctcttgttctctcttttgtggctgcatcttgcaccaacaattaccctggtggcttggtaaatttgccgaagttgaaaggtctattttaaataccgcaccctgtcatttccttcttaagataccatcattttcatttctttcaaaggatggccttgaaaaatattaatctggagaggtccaagctggtggatacaaatggaaacccgtactgtgtcccaatgggaacacgaacacaaatgtgtaagaacacccttctctatacctgggtt

SEQ ID NO: 254441 - DNA, 359 bp, Gossypium hirsutum
gctgtgtgtctgatagggtttgtaccctttttcagccgccgccgttgtatcaggccgatccacgaccttattcacccccttttccgatcgctactgagatgggatgaaccgcgacaaagcccgtatgaatccgcaggggaacgtggagcaaacggcgcgcatgggatggtcgattccgagacgtgcggcgcctgtgaactgatggaggcggagttgaacagacatgcgtcttctgagtgcattcgaggctagagttctgcttttcttttttgtttctgaagtattgagcttgtgcaggcctgtatttgcgggactgctaactttatttggactcgggtcaatagggccctattacatta

SEQ ID NO: 254442 - DNA, 412 bp, Gossypium hirsutum
caggttctctcattagctctttgaatttctactctctttttttttttttttaaagtttgtatggatacccttttccaagatttacctggttccatgtatgggttcaaatttgatcacggctcagtgccaatgccagtgtatgcaaatcacaaccttgataatgggtctaaagagagtcccattgattcatcttcatcatcaccatcatcaggcgtgagttcagatagtcctttccctaatgaaatgcttaaatacataaaccagatgttaatggaggaagaccttgaagaaaagacctgcatgttacaggtgctctaatctacacaagctgctgaaagatccttctatgaagtcctctgccacaattatccgattccggctggtctaaatcattattacccagatgatgatt

SEQ ID NO: 254443 - DNA, 410 bp, Gossypium hirsutum
cactgagtctcgatgaaattgccgactctgtggttagtgatttcttaaagatgctggaaattgaacacggtccatttagcttgaattctgacaatgctgttgagtctcctagagaacgtctgttgagagaatttgagaatgaagccttagattccggtgacttcatcttaaattttgaagctgggggagaagaggaggaagttggatccaccactcctggtgcttgtcacggggataattatgatgattttgctttctcttcatttattctgcccaggcaggagcaggaggaaagtcggtcactggcaaacagaaagtcaatcaaaatgcttgaatacttggagactgtagccttgatgtgtgagtggggcttagatggaaggcatttcaaagttcttcgtgtgttcaga

SEQ ID NO: 254444 - DNA, 132 bp, Gossypium hirsutum
actgatctaatttgagcatcttcatatacagctgatccctatatgaagctaatggggggggttccttctactttttgtgagtacaagctctatttcgttgacctaacacaagcttttgacatcttaagacaa

SEQ ID NO: 254445 - DNA, 226 bp, Gossypium hirsutum
gtactaagttaggtagctaaattcttaaaaaatgcacagcttattaacgtgaagtctaattttatatgctttgaagaactcatctattcgttcatcgtagggcatccctatataacacaagtgctcaaataggtgttcgcgatggaccgctaggcatcaaaccaccactatggccaaggatgattttcttgtacatacagagaaacatttgttgtgcgcgacccta

SEQ ID NO: 254446 - DNA, 380 bp, Gossypium hirsutum
atcatgagtgctgtcacttatgactattaaaatccctaaccagtcacgcctaccaggcttctcaaggccattactagacacactccgaaagtctgccccacggactcacctaatgcagtaaaaaagccttgaacgctgaagctactcactagctctggaagtatgacagaaactatctatgctgaaggcctctcattccaacttatgaaacaccagatgcgctgacatgagacaaaggattttcaatacagtatcgatttaatcgcacatgctccgtggatggatatgcttaaaaaaatgaactatgaaaacagggtggcggctcctgcatgtggagggcgtatacacttgagctcaatgaaatacaacactatatgcga

SEQ ID NO: 254447 - DNA, 439 bp, Gossypium hirsutum
tccctttctttctctctcctctacttactattcatttttctctcttgaattttctcgaaaaattttggcaaaagccttgtgagatgtgaaaggaaagggaagtctgggtgttgttttgtctgacttcaaaaatggcttctttgtactgcaataatcaggtaagagattcttgttttaccaacgcacgccatggaagatcatgttccaaagctcaagcttgtctcgaaaagattcttcatttaatttcaagcatcccaccaccatgtgaaattaacccaaaccctttcaagaagagagggttcgatattgatttaaacttgagattaggctcttttgtcgacgatgatgacgagagcgaagaaaaatccgattgttttgctgagaatagtttcaatgaagagaaaacaggtaccggtgaagctacagcgacggatgtttc

SEQ ID NO: 254448 - DNA, 383 bp, Gossypium hirsutum
ggcactgaagcattgtctggataactcctataccgatcatagaccttggcactttcttcggctaggatggagtccctggctgctgtcatacagttcacgggtgccttttggtcatgcgcctttttgggatgtgttctccatacagcccacccaaacctgtcttacggcccagctcagggatgaacactgccatctaacgtaccagctacgggtcatgtacctggctagccttctaaaataaaagaccactgcggcctcgattactctaggccatctggtactgattctaagaagctttctcgagacgttaatgttcgtgactccgcaccagctcatattgatggtgttggacacttgcaacaatgaggctctattcccatgct

SEQ ID NO: 254449 - DNA, 177 bp, Gossypium hirsutum
atttatagccctaatatgcgcaagactttagctctataagtctcaaacatgtatgggccaagatttagatacaaacgatcgccaaagattttgtgagttgagtgctagagtttgtcgacaacctgttcatattgtcacccccaaaattaacgatctttccataacaattgggtacat

SEQ ID NO: 254450 - DNA, 429 bp, Gossypium hirsutum
caaaatcgatccccccagaaatggcgcctgaaatttcttcttcttttttccccattttattttttcccaaaccatattgttgcaaactcgtaagaagattcaaaagaaattgaagataagaggatacagcttgaagacggatggtcttgatgagatctctcattcgtcagtcgcttccaagatgctgaagatgaagctattgatctcctcctcgactagctcgatcaccaatccttgaattcttccataatcgacaaggaggcggtgcaccaagtagtcaatcttctattggatgttggagcagctgaggaggagatctgtttgaatatgcggatgtaattcttgcaaaaatctccttgttggaaatccagagacttaattcgttacggaatactttgataattagtaaaaaccctgtttttgatatat

SEQ ID NO: 254451 - DNA, 452 bp, Gossypium hirsutum
cttgagtgggatcattaaagaaaagaaaaaaaaaatcgaagatgccgccttctttgggcggtgattaaaaggagagaggcttgagtgggatcattaaagaaaagaaaaaaaaaaatcgaagatgccgccttctttgggcggtgattaaaaggagagaggcttgagtgggatcattaaagaaaagaaaaaaaaaatcgaagatgccgccttctttgggcggtgattaaaaggagagaggcttgagtgggatcattaaagaaaagaaaaaaaaaatcgaagatgccgccttctttgggcggtgattaaaaggagagaggcttgagtgggatcattaaagaaaagaaaaaaaaaatcgaagatgccgccttctttgggcggtgattaaaaggagagaggcttgagtgggatcattaaagaaaagaaaaaaaaattcggaaatgccgccttttttt

SEQ ID NO: 254452 - DNA, 154 bp, Gossypium hirsutum
ccaagatgcccttttcatctacgagcatctcaccatgtcatgcgctgactttcccgggtgttgctgcttgattacttttagtgccaaagcttgatgttcctccaactgtaactttttggcttgtcaaccactgtcaattggtcccctttgttgt

SEQ ID NO: 254453 - DNA, 329 bp, Gossypium hirsutum
aataatgataaaaaaatggcttttaccatttttcttcatggccttagatggaaatctccaggtttttttttaatatccagttcaaattgtggggattggctatcactcttatgtagtagaaggaaattggagcctttctaatacttaaaataatacatatcccttgcatcggcttagattgaaaatctccaatttttcctttgattgttagctgtatttatttctcaacaaaactagggcttcggtttcaaatagtggtgattgtgcgatcaagcgacgcagtagaggaagctcgggcctttatgaaagaaatatacccagacctggct

SEQ ID NO: 254454 - DNA, 359 bp, Gossypium hirsutum
gggaaatgaacataacttaccgagattccgctctttgctctcagccatcttcctcaggtcgtgtctcgagggtgcaataaacctttttcttttcttttctaccaagagctattacattgaactgcaaggatggctgaggaggctcaaaacgtcatattgaatctgaatgacttgagccaagcacttgctcgctagctttaaatgaccttattagcgaagcctattggcggaatatggcacacaggaggcgtggttgatggcactgaatactatcaaggcggatgaatccaacattcttctgctgggacgacaccatatgggacaccaattactgtgattgattgatgagtcacccatgt

SEQ ID NO: 254455 - DNA, 410 bp, Gossypium hirsutum
gcgtttccagataacctctactttactctcagtgtaagtcttgtttctttttcggattgtagtttttgggtatcgtttttttcaaatattctcttaacatgtacaagtcttggtgcaattttacttcaagtcctgcttgacataaaacttcaagattttgaatattttcccatttaaccaaagttcaagttaatttactccatctcatgaaaatgggaatttcttttcctgcagtaaatgagtaggttgttagagtttccattcctttagggttttacgttttccttgtttggtttccgagaaaatttttgttgaaaaagacgaattaaaaatggaagaatttaatcgagtaaacgggaacagtatcccgaagggaaatttcgtgtatgcatctccagttgtagcaactg

SEQ ID NO: 254456 - DNA, 384 bp, Gossypium hirsutum
gtgagaatggagagcaccacaaatggcggttgcaaaagtggaccggggaatcaaggagctgttattgacaatgacttaggcactaacgcttaactttaccaccagaaagagatgtttagcgatcgagtccatgtggactcttataacaacgctgggttatagaacaagcctacttttcaaggaagggctagatgggatgtatgaacaggatgtgatattattgcaatcaggactgcccagtgctggcgcaaggaaggtctatgacggtgaaccaactaagatgacatatcctgcaacggctatagctgaggcataacaatctggatgacatagtatgaattatttgaagactctatggaagaagcttgcaccaaaactggatgc

SEQ ID NO: 254457 - DNA, 408 bp, Gossypium hirsutum
ttatcggccatgtcgccggacctataaagtttatcccgattttagcctttctctgtctaaaaacccctctgcaccatttctctttctctctttggcgattttttttaaaaaattaataaaattgggtttagcttaaacattttagcacttcagctccatctctctgaaataataaagaagaaaatagagagaatcctagatttttgggcctagggccatttgcgtcatttcgcgagaacggaagcgattattatcatcgacaaataaaggagggatagataaaaagggaagatgtacagaggagagagagcggccggtggctctaagggagaggtggggtcggtggatcggaagcgtatcaacgagacgcttgataagcaactggtgcgatcatcgccgtccactttg

SEQ ID NO: 254458 - DNA, 245 bp, Gossypium hirsutum
tttaattttcaacttaagggttttgattctgagtgaaaaggggaaaaaatgaaagcttcactgaaatttcgcgaagagaaaaggcccgtgttaagagcgaaaatacctttaagcatattcggctcgccgtttcaatcaggactcctcgccggcgaaactaaggagcttactttagatctttctaccttcttcgaatctggaccgtccatcaaggtcgcctaccgacctaatgacacgtggaaccc

SEQ ID NO: 254459 - DNA, 365 bp, Gossypium hirsutum
gacaaatatcataatggctttaatagagtttgataatttcaagtactatttgcaacaaatttagagcgaatttgaagatattaaacctcaaatatttataatccaaatccaattaatttctcaatctaccttccatgagcagttttgattttcatacagcggagaacatacattgaggaggcttgcttgattcagtgcttcaccagcattctattgatcattgagaagagatgggatcaaatattcaaactgctttggcgatagaaagaaattatccaacgttggatggcaagtcattcaatctttcaaatgaacagaagagtcctttgtttactgaggatttcgaatactaacggaatgatatt

SEQ ID NO: 254460 - DNA, 371 bp, Gossypium hirsutum
  unsure (1)..(371): unsure at all n locations
tttagagtaaacctttttataaagcgattggccaggcggaaggaactagccctggggggggatttttcagtccggtgaatttgttatctcgaatttcgatcgaacccaatcccgtataccattgcaaatctgacgttgatgttaggaagatacatcctcatgtaggggaagcgaccgactagggacgaagctgtttagggttctaagagcacctgtactgcnatgcgtgaagagcatccaacccctatgaatgcatccgcgttaagttttatgtcaaacgagttaaaccttgtggacctgcttgatgcgatacacgcttttaagagagatgcatggtttacatctacacgtgctgctaatgagattgtgca

SEQ ID NO: 254461 - DNA, 407 bp, Gossypium hirsutum
gcaaaaggcaacagcatattaacatgttgctttttgcagtttggtccgtagtcagcccgccctcctcgcgataaacgatatgatgctacttctcaaactctctcattaaaaccaataattcacactatctgttttactctttgatcgaatgatggagagcagtgaagaagatgatgacttcccttccattgagagcatcactccccagtccaagattgattctgttcaccaatcccatactgaaaaggggatcagaaaactttgctgtgagcttttggatttgaaagatgctgtggaaaacttatgtgggaataggcgcacaacatacttggctttcttgagaatgtctgaagaagttgttgaaatggagcacgagttggttgagctacgaaagcatatctcttctc

SEQ ID NO: 254462 - DNA, 390 bp, Gossypium hirsutum
gtccgttttttttttttttttttttttttttttggagggatataattaacagaaatactagtgtttcgtagagttaattgcaataagtatctataaaataaacgacaaaatttaagctcctctttatattataagtatcaccgaaaaaccaacctctcggagaaagcaaacccaggcttgaaaagcaaaaggcaccaaatgcctgctttgcgaaacccaccaaacagaggtcacgaaaactcgatggcttcaaacaataacaaagcctttcctcgttacctctgctctataaaaatactaaatagcagctacttagcttaatccaccgcgcgagaataacccatctgggatggtggacaccatctgctttaaagttatatgctaattacc

SEQ ID NO: 254463 - DNA, 416 bp, Gossypium hirsutum
cggacgcgtgggtttccaagttgaagggcgaaatatgcttggataatttatcaattaaagaacttcatgaggtttttaaggcaacatttgggcgagacactactgttaaggacaagctgtggcttaaaaggaggattgctatgggattgaccaattcctgtgatgtttctactacaacttttgtaattaaagacaacaaattggtgaaaaaggataatgaagatggttttaacaatgtgaatcttggtgctggaaaagaacacctggcagttgcagttgaatacaatgaggacttgctcaataaccttagcagtcaaattgatgaacatcaaactacttcggaggtgagactgggaaataatgttgtggaaaacaattttgcaagtgaagatcttgctgcagatcagagagctgca

SEQ ID NO: 254464 - DNA, 324 bp, Gossypium hirsutum
gcacgactgtggtaatagaactcgaaattccttaaagagtgtgtaacagctcagctgtctaatgagctacacaccgaaatgagcggcgctgaagcgcgcgacctatacccagccgaccggcaagggccaggctatcgatagtaagacgcgcggagttcgagctagacctgcacacaagccacgcagggtgactgccttgcagatctcaagcgttgatagcgatattgatatgagatccttggatgccgaatcggggtatggttgcaaggcaacagtactcgcgcatgggtttgttgatcctaaaagacggaacaagccgctgcg

SEQ ID NO: 254465 - DNA, 112 bp, Gossypium hirsutum
gtctaatctaacgtcatcaacaaatgaaatattttccacgtacttgttggcggtggctgtctaagggggtggctatgaatgtttacgacaaactcaccgcatgctgactttg

SEQ ID NO: 254466 - DNA, 296 bp, Gossypium hirsutum
atcaaatctgtcgtgctaggaaaataaaacaacaaacgccttctttgaggcggacgtagtataagttttagggaatcaggtattggaaaaatgtcaaatatgctgtagagtaggccaaaaacacaggtttaaatgaaacgcctgacagagagctctcttcttcttatgaatcgcacagcctccatcgaaatatttgttaaagcaattataaaacgtgtgttgcaagcagcaggtgttcttttcaagagacacaatgtctacttcttctgctgtttacagctctgacgtatcattaa

SEQ ID NO: 254467 - DNA, 420 bp, Gossypium hirsutum
gttcaatttccttagctcaatctcagtctgcaactacgttgtccgggcgttggtcatggcaaaagccgtgaattcaaatgattttctgatgtactacaaatcattatgggcaaggaaacaaaaggtgtccaccaattcaccaaggtgcttaaaaatttcttcttgtaaaaaatcaatatctgctgccatagatgtatttcatattaattgctgagattgctgcttgcggattcttgttgctccccactataaacagtatgtccttgcaactgattgaaatgaacggagctgtcttttatttgtttaaagaagaaatagttagaactctaatgatctatgcatctataggacttggttttttttgcgctgccctagatacttggattttggttctctgtacaaataggaaatgcagggacc

SEQ ID NO: 254468 - DNA, 426 bp, Gossypium hirsutum
caaaaactgaaaccctcaaacgcacgcaatcataaagctggaaatcaagttcactgctgttaagggtcttccatttttctgtggtttaaggaaagtttggttggttgcagggatctggtaaaagtttcctgtttaatcgatctgttggggaggtgtggaaattagaaaaggaaaggggaaaataaaaaggagaaagggatatggtgggatgaggggaaaatggctagagaaagtcgacccaaggctttgggttccgggcagtgctcgtataaaaggataacactgattgtttgcttcgataacataggtattgctctctttgatcttcgctctctttattcttcgctctacatttattcaaataaagatcatgttgtaaagtatacaccagatcagattaggaaaatgggagaatcagataagatt

SEQ ID NO: 254469 - DNA, 421 bp, Gossypium hirsutum
gggacgcctgggtctagatcgcgagggccgccctttttttttttttgtgttggggaaacaattaaaatttcataacttaatgaaaaatttgattatgaacggaaactaaatcttataattttaattatgctaaaaaacagatcaaaatttcgaattttggctatctttataaactcttttggtttctataattccaaaaggttagcccaaaagaattcaaaatatttacacaatttctgaaattcctttcctggtccatctacatataattttttctttttattgtctcaacccaaatccacccgattgagtcgggcaccgaaacccatacgggtcaatcgagttagagaagttatgactgttcaacacattcgaattgtgttgaactatccccgagttatcagctcgctgagttctgagt

SEQ ID NO: 254470 - DNA, 237 bp, Gossypium hirsutum
gttggagtaaactatagcaaaaatcatcattcacattgcgcactggtggtcaggatcacccttagacagctgctttgccatggtacgatgagatcacactatcgctagaacaaggtgttgggtcactcaccccaaaagcaggaactgcagatctagattctgcttcctgcttgaagttacactgatgtatactactggtagtgtgagggctacactcacttgttccatcgcatactt

SEQ ID NO: 254471 - DNA, 338 bp, Gossypium hirsutum
tttcagttcagctgctccgtattatttattcaactactatggctacgggggggtctgttttataggggttttgtattttctcgagtgttagtggtaagattctcagtgaggaagaaaaggctgctgataatatttacattcataaaactgatcgagagaaattggataaactttctcgcatgggacccaagccagagtagaaaccggatgctggttcaggtggtgcttcgaccgatggtagcactacctatacattggttacattctctgagaaagtatcaaccgataagttcctaaactacggggttcttgctgttgttgcaaccccttggtgctgc

SEQ ID NO: 254472 - DNA, 381 bp, Gossypium hirsutum
gtcatcaacgtgtgcggaagattatgtatgtttttgaacaaaagagaggtgagctttcacctgagggagagaccatgtcagcttatcataaatttatttagaaggacaagcttctttatgactcattaaattacatggtaattgataatgctatcctcactgtatgtcaaaggcaagtgagctgtgcaaggtgcgtattgatgttcaccatgaacgcccatgcttcagctcataaaagcttagtttggtggatgtgatgacatactcacatgccttgtatgtaggagcttgaacaacatatttatgctgtataaacaacctggtctttacaaaaagcgcattgaggcgttgatggagaatgcagcatataactcactaccg

SEQ ID NO: 254473 - DNA, 385 bp, Gossypium hirsutum
aaatatcataagaggattctgtatctgtgatctgggcccctctaaggagaaaagttgcaattgaaggctgttcatcctctgtattagggaaagctattcagccaattctttcagcatctagagtttctatcaatgctgcaaaagagattctattacttgagcctataggaattgcccatattcgtaactcttctcatgtcattctcccaagatgttctactgatttaccaaatacaaggcatgcttgttatagcactcatttacagactatcatgcaaaaatcatgcttggctctttcttctggagggggggatctggtcgctgttattagccctcttatgggagaatcaattagtgatggcactatagcaacattcttgaaaaa

SEQ ID NO: 254474 - DNA, 386 bp, Gossypium hirsutum
aaataacataaagtattcaatatcttttatctttgcccctctaatgagaaagagttgctatttaaggctgtgcatcctctgtttcatgattaacttttctatcaattctttcatcgtctaaagtttttattaatgtcttcaaaagattttttattactttatcctaaaataatttccctaattcttaactcttcttatcttaatatactaatttgtcctatctaaataccatattcataacatactttcattatcacttatttaaatacttaatatacataaaaatttcatgcaatattcttctttaccctattatatggttcatttatttattcctcactaagtaaattcaatcattgttttcacttttaatcattttattaaaa

SEQ ID NO: 254475 - DNA, 144 bp, Gossypium hirsutum
cctcgatactttttgtacaccgtgagaatcgtagaccgagaatccgtctttgtagggtttgatcaggcggtgctttttcccctcctggtctattttgtacccaatttggctggtgtggcaattctttcttactactgcacagtt

SEQ ID NO: 254476 - DNA, 427 bp, Gossypium hirsutum
gctagcaaaatagaaatcaatcgaatttccagctttgggaaatttttaaagaaagtcggtacttcaagccactgattcagaaaacggcacaccggatctccgccattcgccgttgttttgaagcgtttctcaaccatgaatcttctcggccatgtcgattccctcaaaagccaaacgtggatcaaattcgcggcctttatttttatttccgacgcttccttttacttaggcaaacactggtccgacggttcccgccaactcatcttcttgtgccgacaatgcccttctggaacgacgtcgtcttcaccttccatcgctctttctcctaatctcaataaagaattcaatgtctccgctctcattgacactccggaaccttctcgttcagctaaaagcgaaagaacgtgggcgtcggggtctttgaaag

SEQ ID NO: 254477 - DNA, 408 bp, Gossypium hirsutum
gttcgtcggactgaaacaagaaagccaataagaaaaccccttggtgctgccggagatactcgcggtggtcggaataatggtcaccatgaaatctcaaagcaaagaaatgctactaacaatgagggagcgtcaaatccatctactgatgcactggaagagacttctcatgtaaagcatgaatcccaaggtgatattcccttttcaggtccattacaagttgcttcatcgagtggctttgcatgggcaagaagacgaaaagatgatgcatccggaagatcacttagtaggtctatctcaagagggcacatttgcagttctttagaaccttctgctccattacatacacgaaatgataatgatttgaaacggcatgaaaatgaagatgttataaatggaggtcgaactgat

SEQ ID NO: 254478 - DNA, 295 bp, Gossypium hirsutum
gctggagcccatatcaagttttatcgggtcaagccaatgattataggcatcaggggcacaacgccctcgagctatgctcaaactttaaatcaggaagacggcacatgatcctagattggatttgacaattaccaactaggtctacgatcagattctgtgtgtagttcatatgaaaagataagatggcctcagatcttggtaaactgttcattggtgggatatcttgggacactgatgaggaacgtgtcaaggaatatttcaggacatatggcgaagtggtggaagcactgttcat

SEQ ID NO: 254479 - DNA, 420 bp, Gossypium hirsutum
cggacgcgtgggcggacgcgtggggtcagaaatcataactgaaagaactggatacgactttacaaagataaccaagcactaaacatcgtataagggggagtaaggtaagattttcgtcttattttttggtttttctacacaatggcttcgatgtttggacctggaagctcaacagcaaacatatatgtaccagaagagtggtcggaggctgctaattccatagcctatgattcagtaacttccccacctcctttttcttttatctgcggcagccaaaaactctgggaaaaccactttgtcccgtcacctacttaacattcttctccaaaggtatggaaaagtagcttatttggacacagatgttgggcagtctgagttcacggttgcaggtttagtgtcccttacaattgttgacaaaat

SEQ ID NO: 254480 - DNA, 371 bp, Gossypium hirsutum
gctaaagtctgcttttgcctgtcagagcttagatcgatcatgggtcactcgaacgtctggaattctcaccctaagacctacaggcctgactctcgcgcctgtcgcgtgggtggaaacccccatgccattataaggaagaatggtatcatgtagttgcagacagtgcttgactagcaaggccaaggaaattggattcattaagtcccgttgaagaatttatatggtgtgaagtcagaaaggaatttcgacaagtatgaactattattgtaaggttttggaattcaaagaaaaacttctaagaaaatgttactgcagaatttattatgggacattgaagtgtcttacaaagagtacatagatgtttttcaatg

SEQ ID NO: 254481 - DNA, 427 bp, Gossypium hirsutum
caaatttctctccttcttttattttattttcctctttatttttcgttctcaattatattaagtctctcagttctctccatcttccgttgtttattttccctaattttgcttcgattcgttcaaggtcgctttactcattctgggctgtgattttttggttcatgattataagctgcaacaaattacaacaacaatttattgaagcagcatgggccaaaggaatatgcgaagccctattgatttagaaatcgatcaacaaggccaggaatacctccagcatgaaccttgcgtctatttgggtgggacaacgaactacccatcacctgatatcccaatgaccgtcacagctccagggaacacaactaaccttgatgcgcatcccttacctgagcattatgacaacagtatgttttatgggatccccatg

SEQ ID NO: 254482 - DNA, 142 bp, Gossypium hirsutum
gaagaatgatcatgattgatatgcaaacagaacttttttcgatattgaataagatccagttgatgcagaaccctcattctatatttacaaaaagactgtcttggatccagttatatggtgcgtacaaagacattagttttaa

SEQ ID NO: 254483 - DNA, 407 bp, Gossypium hirsutum
  unsure (1)..(407): unsure at all n locations
aaaccataccagacctctccaaagcctgagttcttcggagaaaatatgtaccatttttctttaaaaacaccatcaccaaactcagaatggtaacacaactcctttaacattccaaaacccttctatgatcgttgacaatgataggctctacttccgatgatacctcttccatccagtagattaggtcagatagattgtgtcctcgtcctactaaggcatgtgttgcttcatatgtattttgagggggcatcaccttccacaaccagatctagaaagcccatttcttccccgaaaataataacttcaagacaagccttcgcttctgctgtaatcggatccccagttcttcctagtggtgccactaagcttgtatcggngattaagagacgtcggaggcatcgatcaca

SEQ ID NO: 254484 - DNA, 196 bp, Gossypium hirsutum
gaagaactaattaacgattcggcagacgtttgccaccctcatcatcatcgtgctatgcatttccgccgatgcatcaagctttgaaatccgcaacgagttccagttcactttctgtgcggtaacctgttctggatgcggccgtcttctagacattgggcacactcggaccactgttttgcctgctcgctctgcatac

SEQ ID NO: 254485 - DNA, 296 bp, Gossypium hirsutum
ccgatcatggcggtccaattgactgtgttagctgacggggtttttattgggtgctcagctaaccatgcggtgactgacggtacgtcgtacccggaactctttcaatacttcagctgaaactcgccggaaagtctgtcataacaatgaccagagcgtggaaaaaatttcccggcggtcggatctttcacgggaatcggttctgatttcaactgcagctttgcgtgtaccgacaggagtacccttagcttctttatacgaaaacgagccatctcgtgagagaattggcaggtttagca

SEQ ID NO: 254486 - DNA, 145 bp, Gossypium hirsutum
  unsure (1)..(145): unsure at all n locations
tggtgntaggtggggaaggacatccaagatgcctgcaaactttttgagccaaggtatgaccaaacagatggaggggatggtcatgtttctgttgaggaaacttatacccgggacgcggtttttcaaccttccaatggagcaacca

SEQ ID NO: 254487 - DNA, 399 bp, Gossypium hirsutum
ctagtctgttctctcccttattttcttgttcagttaatagtaccttttgttgttgttgtttttttagctaaactagttattctcagttcaagttcagctttgaatttcagcacagaaccagaaaaaaaaaaaacacccaaggctggttttttattttttattttatgatttacagtcaattattttgctatttagtttgtttctagatttgggtttttgttttttggacaattgtactgaatagtaggtgaatatagtggaaaatcttgttgatttattttttcttttgagaagtttgattatatatagcttataattatcattttgggttacttttatccgagttatttgtgtatttttggttgactcagtggacgaaattgaaagagtggaaaaagt

SEQ ID NO: 254488 - DNA, 416 bp, Gossypium hirsutum
tttgcattgaatcaaaatcgaaactctcaacaaagaagaaaacaacacaaaaaaaaccaaaaaccaaaaaccagaacatatcatcatcttattcaccttcattatgcctgcaataatgattcttggttgcctcacacccgcatgcccctttcaatatccactctcctcccccccccctcccactctttctctctcaatatcctacctataaaaccccatttccctccccacttctctctctcacctgtagtaatcttcttcaacaccatcaaatcccaccatttaaaccaaaaaccaacatctttttctttctacattttctcttgttttttatccctgttttcaagttcctgtctctggttttttgttgttgtttggcaatggcggtttcagggtttgaaggttttgagaagcgg

SEQ ID NO: 254489 - DNA, 400 bp, Gossypium hirsutum
gccgccgcaatcctgcgccgccaccaatcggaaaagccaccaaacgatctgcctttgctctttcttttaatccaccgcgccatatcttttcagaacccacttgaaagccattaaaacatcaaatcgacttcgactttctcttgccccgatctaccgccttcgccgtcagatcgacacgggatatcaggggaagcttccctttcctaagatataacctctcaaatatgttctctcttcctctttttcttttctgctgattttttctgctgtaatggttgtgaaatgatgattgagcagtgttggtgaaggaggtggctatggtttagagaggggcggagagtgatcttgatggtgggcggttgtgggcctcgggagttatgagatggtgtaggttctgggt

SEQ ID NO: 254490 - DNA, 131 bp, Gossypium hirsutum
gcgttcgaaaaaaaaaagaagcaaaaaaacatggccaaagttctgatgttcattgctgtatgtgtgctttcagatttggttagtgctacacgcattttgataccaaatggggtgaaggcttggtctgaaac

SEQ ID NO: 254491 - DNA, 227 bp, Gossypium hirsutum
atagactgtatgcctgtactttaccaaacaccacagatgctgctgagagctggtcgcgtaccatatgggtcttccaacctatgcctatatgcgctcaactctgtcttgtatcacttgctgacgatggcctgctggccaatggtgattcagagacaccaacatacgccgactctccaagcgaggccatatacgatctacccaatgagatccccagctactagcacgaa

SEQ ID NO: 254492 - DNA, 400 bp, Gossypium hirsutum
tgaaattactgtgttttgaaaggtaaagatccactatttgtttcttcatcgtcgatcaaaacagagcaagactcgaagttttctttctaaaaaaacgtgtttaattgaatccccttttagttttcgtttctcgtttttccttaaaattttcccgagaaaagtgcaatcttcaaaatccagcagggaccgaaaaaatagtttgaattaaaaaaaggttgtcaacttacaaacaagattcttcattttctctcttcagtttttcccctttttccccttaaattttgttgtccaaacgtcaaaaattaggaattttctcgtcaaaattcacattacctaaaatcacgtcaatctcgctctgctctttttctccctttgatttcttctactggtcatcaacacc

SEQ ID NO: 254493 - DNA, 172 bp, Gossypium hirsutum
agagcctaaagctgaagaaaggaggtaaatgggaagaggttcatagcccaaatgttcattaaccaccttttttccgttcaccctttcaaaccccttccgttaaaaattcattgttttcttttagaaaatttaggggtccctttttgcccccttattttccggctcaaggaaa

SEQ ID NO: 254494 - DNA, 349 bp, Gossypium hirsutum
taaaaagttgggaggtatctttccccttaattttttagggaaacaaacaaagggatggatgattacacgtgatgcagggcggattgaaaaacccagtgtgctctaacacatacgtatgaacgggattctatcttggatgcgggctgaacctagaccctgtgtataggaggaacatcaatgtgcctgatggcgctgctatagataggattggggacctaaccaattgctattaagatgccaggggcaggcgtcattgccaaacccgtgattgtgggggacatcgttaactgcactggtgtgggggtccttcaaacacgctcaatgaatatgcactttaacaatgtgccaa

SEQ ID NO: 254495 - DNA, 382 bp, Gossypium hirsutum
aaagcttgagccttcgatcttgaagaagtattattagcatgtgcaattgcgtgcctttgatcccctttccctcctccatcgtcaaaattagaaacccattgctcaaaaatccacaagtttcagatacccatttcccaattatcacgaataatggccgattacatttccttggatgctgtatgagagctaccccatcttcaagttcaagcgtagagggagatggatatgggcagttggagtttgacgatgatgaattggagctcaaacgacgtcgtaccgatgctaccttggagaaaattagtgacaaggagttgaaggggaagatgggcaacaagaatggggataaattggttagcaggaagcaactgatgaagagatcaaa

SEQ ID NO: 254496 - DNA, 403 bp, Gossypium hirsutum
cattagttgaaactggagatcttcttgaccaaattcccaccttcctccttcacccactccccaaatctttatacctccaatacccatttctctatatccctttcaaaagtctctattttttctgtaatctgattgaaattgggtttcatgacttgatacacaccaaacatcgtgcgcccatatgagtaccatcgccttctgatccaaccaacggttttaaagccttgaagagatgttaattaggagaccccaagatggacaatgcgttttcaggctctttcacttgctttcgaagcgaataaaggtccccctaccaccacgcaatccaaattacagaatggttttcatccctccgcggtgtcaaccctgacaaggtcttcgacgatgtggtgttcatcaaaga

SEQ ID NO: 254497 - DNA, 303 bp, Gossypium hirsutum
gtatttcggttgcacctactgcaccatctttttgaccccctgcaaaggagtggttgcatggtccattgactttgtccccagtccataagcacccatctgcatggaaacatttcaaaaactttgatccttggacctgctattcaattcatcaacctgtttacaggcaacaagttactgccggttgtccttctcaatattccactcccagctgggtttccccttcaccatcgcctactgccacgtcaaaccactttcataatatggccattcttcaacctgcaatttcttcgattggttcttccc

SEQ ID NO: 254498 - DNA, 415 bp, Gossypium hirsutum
  unsure (1)..(415): unsure at all n locations
gaccgganattcccgggtacgacgccatcgcgtcccgattcttcacatgcgttaataacatcaatagtgacttaagggatatatgtagaccgacggcgtgagcataggtcggcaggatctggttgttctcatgcgaagagacttatccaggatcccatccatccggcacccgttgtattgacttaggatagaacctcactcaaattggtgcgctcttatatggtgcgtgcgatcagctagatgttcaatttgaccaccctgtctttgtcttagtatagctcacggttgtgtgacctgtagatcggtggtataatagtccataactcgacaccggtataagaatacctgttgacgccggattagtggtcggccgttggtataccttggtcattgcttcgggccttttagggtggca

SEQ ID NO: 254499 - DNA, 428 bp, Gossypium hirsutum
cgacgccatcgcgtctcgtgaagaagcgagaaaacaacagaataatgcactaatcggttataaggtgacgcggcttctcttaggaataggtgtcaagattcaagaaatcatcagctaaaaagactaaccaatcactctcactcactcgttcactcgtgatattcgcacttgtagagaatcttaccaatatgtgtcgctttacatgggtcgttgttcgtgtgaaatcatatatctcccattctatcgcttctgatgtctcaggtgtatgactgggatgcgggtataaaaatccaaaccggcccagggaaagaatactgccgacccttattgtggttgcagcggtatacttggtatcggttggcctttttgtggcatgatctctatccctggttactgcactgttggtatttttagaggacacatcatcc

SEQ ID NO: 254500 - DNA, 411 bp, Gossypium hirsutum
ctttctgctatcagtttcattacataatatatctcttcgattaaagaatcgctgggttcgattttgtcagacaagatcggccaaattaagatttcaggagattagagaagatggaccctcatgatgagacgggccgccaagcttcagaaggccccatcctgtgtgttaataactgtggtttctttggaagtgcggcgaccatgaatatgtgctccaaatgtcacaaggcaatgatcctgaagcaggaacaggcacaactcagcatcatccatcgatagcattgttaatggcagcactagcgggaatggtaaggaaccatctgttgctgctgctttggctgtgcaatgggggaaattttgggtaaaaaattgaatcatccatcgatccatcccatatgaccttcggtgggat

SEQ ID NO: 254501 - DNA, 358 bp, Gossypium hirsutum
cttgggataaggcctgagtaccttaatatggaacagggtgcaaacataaatggtgggaagaatccctagaagcatcttagtcaggaacaagcgtcacagattgctcgaaaggttatatcacggttactaactggtgttgggtttgaaggtgccacataagctccagtggaagtcttctctcagtttcttagctgtcatatgtctaaacttggtcagaatctaaaagttcttactgataattacagaaaacaattgacagcatttgtactaatcatgtatgtgcttcaaacatctgcatatatcatctttggggctctatcttaacttttgaaggatttttccaggatcttattgctta

SEQ ID NO: 254502 - DNA, 407 bp, Gossypium hirsutum
gcatttcgtctcttgacttcgccggattgtgaatctcctctttgttctcggatcaaataattgaagtcttgaccttaaacttgaaggttagtggttgaaacagctatctacatgtgaaatttgttagtttcgaatcgattaatgcattacatggatctgttagattggcaagaagatatatgagttctgtttgataatgctgcttattcgtcttctcacgcgattaatcttagtatcatccagtgttggttcagtaatagcttctagaaataattctcaggaggtcgcttgtacatcagaggatcctttgtatccatgctagcagagagcatgcgtggaatctgtgtttcgggtaatgcccctgacgagatattctgccgaagcattcggtgtgttgacaatttgtc

SEQ ID NO: 254503 - DNA, 442 bp, Gossypium hirsutum
  unsure (1)..(442): unsure at all n locations
aatnccgggcgggacccacgcgtccgtcctctcctctcctctcctctctctatcactagggtttttcgtctgctcatttgtgaagcagatatcctagttttcacaaaaagagaaaaaaactcaaaagagttattgtttcttggcttcttgctacaatgggagatgcagaaaatgcccttccaccttcaaagaagagggctgctggaagagaaatttctcgggataaccctggactcgatgatgaggaagattcttctgaacaagagactggaacttttaagagggctagtgaagaagtgttggcaaatagaagaattgtcaaagttcggagaaatcaaaccacttcaactgcctcagcgaatcccttctctgggattcgcttggtcccccttactgaaccaactgctactcctgctgcacctagttcagcccctgaatctgg

SEQ ID NO: 254504 - DNA, 388 bp, Gossypium hirsutum
gttaatatatgggtattttggagccccaaaaggactgtccagtgtcggatccaggaaaacccgaaaattgcctcttctaaatatcctcccccatttcccccattatatagtttaacccaaatatattgcaccttcacttcaatctcataaccgtcgatcccctcctgtcttaatcccacacatctctccattgatatacattaccccaggcagcttgctatctagcaaaccattctttacatatctgcgaactatacatagtattagcagggttttttgggaaaaaaaaaacgggggatcgaaggcatggaaaacgtccgcttccattcgaaacatcggaggagaaaagcaaaggacgcgatgaatttgcagcagccgcaactttatg

SEQ ID NO: 254505 - DNA, 364 bp, Gossypium hirsutum
aacaactcaatctgaaatttttatgttcaaaataccaaagctttcgatggcgtttctggtcatcaatctcaacatccatctattaaagtatcagtggacgtaacccccaacttcaattaacagtggtggactccgtcgacggaaaaaaaaatgttggtcaacaatggaagagcgggtgaactagaatgaactggtgaagctgccatggaaggaagggttcaatggtgccgtattgggaaaaagcaaaagagctggtgaagccgccaagggttttaatatcattatgcatttaaaaaattcggaataataaaaataattactggttttgtacttggctaacttgagagttcattggtattattta

SEQ ID NO: 254506 - DNA, 318 bp, Gossypium hirsutum
ttttagttcaaccactcctaataaccgctcggatttttctcacacgtgttgtatattccacttcttttgacccaaacaattaaacagatacgatgcctcaaaaattaggcgtcaaatggctcgtcgactttggtcccaccactaaaaccaccatcttgcttgacgtaaacgtagcattatccaacatcaatacccatccgaaacccatatcccccggcattctcaacatcaatctctctgacccctattcgacggtggacgagcaagtagctactaactctcaatcctttgagttctttcacattatattccacggaa

SEQ ID NO: 254507 - DNA, 101 bp, Gossypium hirsutum
acgaaaccaaatatggcggagaaagcaaccgggccggtcaatgcttccgccgggaggaagaccgctgttgccgtaacacacttcaagagaggccgcggttt

SEQ ID NO: 254508 - DNA, 356 bp, Gossypium hirsutum
aatagcctggatccacagctatctgatctgacgcacattcccgaacgagtcaggagtctaacttattttaaactacacccgacccaaccagacaatctccttatccaacttatactgtgggtaacaatataaaaacgcttacttctcttatttgaaactcaccctcaatgcaaaaagacttacatctcaaaactcgggactactacgaacatgctgctatgctcatcagtgcacgttgaacgattatgatgattttcacaaggactttgcacaagttgaacagtattatacgcttgcttctaaaaccttttgattatggcaccaagagaaccaggtcataaaccgtattgtctcta

SEQ ID NO: 254509 - DNA, 244 bp, Gossypium hirsutum
gaaaataaatataaggaaagcagagaggggtaaattggagggagaggtggaatcacatgcgcattagttcactgtcgctctcctgggtcctcgtttagcttagctagttctatttcttgttaatcatcatcatcatatacctttttttttcgccatggctgacgataaggaaatctcagcccctgttgttgatactggtcacatcatctccaccacgattggaggcaaaaatggagagcctaaa

SEQ ID NO: 254510 - DNA, 272 bp, Gossypium hirsutum
gccaaagcaacatacccactctgttcaacagcaaaaaccgcaacagtgcgaggtacctcctgttgtatcgtgcaaccttctatccaaaaccaactcacgactgcaatggtaactgcccgacacttcacatgtatctattaagaacattctctataccttcggagctagaaatgctcctaccaatcacaaaacattaaagacgaggtcatatcattaagcattggctgaacctaatagtgaggatgagccctttttaagcacgatccacgacc

SEQ ID NO: 254511 - DNA, 242 bp, Gossypium hirsutum
gaacatctttcctttttttctctctatattttctcatctccttcaacagcgcggggggtctaaactcttataggcaatttcaaaaaagctccaaaacgatggccaatgctgcatcgggaatggctgtgcatgatgattgcaagttgaagttcttggaacttagttatcttttatcattaacggtctgtccacccaagaaacggctcaaccggaagtaggctacagcggtcaaaatagcaccg

SEQ ID NO: 254512 - DNA, 231 bp, Gossypium hirsutum
aagataccgaaaaacatttgggggagagacagagagagaggaaggaaagacgtgcaccgacagccttaaatcagctagaatatccacattatcaaagatgcagtcaatgttaaccaactctacttttttcaactcataacaacataaacaacagggggctgttcttatggtcgacaacaacaacaactttttcatggcctcccaaaccagtggatgggttccatccaatac

SEQ ID NO: 254513 - DNA, 399 bp, Gossypium hirsutum
tttcagaaaatcaactaaccaaatcatgtgcccccaagatagtgcgcattctatcaaaccataattcaaaatatctacgctgcgcccaccgtttggttttctgatttcgcagagaaaatacttgtttggcttggaggaaactaagaaggaacagagaacgcaagcctattcacgatttcagctcagaagacatgttttttgaagtggcattgccaagggatgtgaagatacatgctaccaacttggataaaccagtttctcggaggttcatactggcatgcgtactcgacaacctatttaaggagaaagccagcgaggatcatggttactttgtagccgtaactctggtgaaaagcatatgtcaaggcaatgtaatggatgagtcggggaatacggttt

SEQ ID NO: 254514 - DNA, 395 bp, Gossypium hirsutum
cgcccgcggtccgcggtccggggttccggccacgcctcacgcgtgccccatctccctcatcctattcacaaactttaaaatgtttggacagctcggttgtttctcttacatacaaaaagcgccattagaagatgggtacaacacaggttcaagttatcagacatgtcgcacacagtctgatcttacaatcttatttacatgaacaaatgcactctccacgataaactacaccgcctcccgtcatcatcaaaacaggaacaaccggattttaatcccagaaaatcctatcattgtactggagagctcgatccaattcatgtctccccagctcaaccactgagatatttcacccagaaaccatatcccagattgaattgtcgggcaccgccgccaaa

SEQ ID NO: 254515 - DNA, 306 bp, Gossypium hirsutum
tcgatctaacataaatattctttaaaaatcatgttggctattttatcacaaggggtttggtaattcaccagaggagctgttatatccatcttttcataaatctactaagaagcccaaacagtcttaagaaaccctaaatgttttcctatctcatcaccctcacaacactttctacatgaactttagcaacaccaataattattcttatattcgtcatgaacatccacctttatttcatcagaaaaaaggatggacttgatatacaacatatattctcattttttttctggctcttccaacaaattt

SEQ ID NO: 254516 - DNA, 395 bp, Gossypium hirsutum
gcgatctggcagagactactcttctaatcacaatcttcgacggagtaaatgagcgaattttagagagagaaagttaataatcttctcctttgctgcttaaaagttcacagctttcccttcttgaggctcaagttaaggtctttgcaatgcaaactttgctgttggctatggcagaatgcatgtgctgatattgcagtagctgtgataatcatggcatattgccttggttttttttcctggaaaattttatctaaatggagagaaatctaggaaaaggcttaatggatcaacagaagaaccatgaacaaattcgatacaataatatggaagctggaaatgagactcttgagtctgcaaaccaaagatttttccatgatccatctagtaatattaat

SEQ ID NO: 254517 - DNA, 259 bp, Gossypium hirsutum
accgttccttattttttcgtcgccccctctttatttattttctattttttattaattttttatatcattttaccttatggtgtggggttattacaacctttcttattttacaaccaatctatcattttcttaatgctaagatcaccatttattttcttaattttgggttatttatttctattttttgctttgtgtaatcgtcgatttcatcaactcttttagctcttccgtcaaacccaatatttccgttggcgttttt

SEQ ID NO: 254518 - DNA, 233 bp, Gossypium hirsutum
gaggctgctggcgcacctaaaggcttgctgcggcgctccttaaggctagggttcttcctttttctttgggccagggttgttttggggtttggtttaatgatttggggtttaggttagctctgggcctgtatttgttggactgttttttaattttgtttggacctgggtcaattgggccctattacagctttatttaatcttgttcttaaatcacaataaataatattgatttt

SEQ ID NO: 254519 - DNA, 388 bp, Gossypium hirsutum
gattgttcatggagaatgtttagctgatgatacttttggcacgagccaacagcaattcaagcggctacttttgttctctggaaatgattatttgggcttgagttcacatccagcagttcgaagagctgcagcagaggcagctcgagattacggaatgggccctaggggctctccgttaatctgcggatacacttaccaccatagattactggagtcaagcttggcaagcttaaagaagaaggaggactgtcttctttgtcctacagggttttcagccaatatggcattgatggtagcacttggaaaccttgcatccctccttgcagcaggcaacgtgcctgtgaaggatgaaaagattgccattttctctgatgaactaaaccatgca

SEQ ID NO: 254520 - DNA, 379 bp, Gossypium hirsutum
cacacttcaaagttaaataagctattgtacaaagaaattgcccataccccgcctcccaatcatatatacctttatttgctttctctttctttttcaacacttcttctttgttttcaactgttccaatctgtatttcagcttccacagaataaaaaatttccctttctgtttccactgcctatatccacactgttttcatgtttgctgagaaaatttggaatgtataaggtaaattttcccagcttgtgaactgcagtaaaagtcaaagctctctgggtctttttggttctttttttttcctagctacttcaatattccattgttgtttcctttagaatatgtttgtgtagctcacatggaagttgtagcatgatgggaa

SEQ ID NO: 254521 - DNA, 190 bp, Gossypium hirsutum
ccaagattgaagttatagactcactcttctccaaactttttattctcatactagggtgaggtctaagtctaccatgatcctccaccacctctattatttaactacttagtactgttactcattaaatcatatttatatcttcatgtaatatcacacgtttattttccactctttctatttttatacataa

SEQ ID NO: 254522 - DNA, 395 bp, Gossypium hirsutum
gccgactgtcgtgtatccggtatacccgagaagaaaagcccatgtttattttgcgtctgggcgctcccccttcaaccttctcttgctttgtttaccaccatcaagatatagagatttgttggagcttttaacattgagatctgtaccattcttttttcggtttctttgcaaggttagttgatccttggagtgattgaggggcagctggatgctgttttcttacatatgttaatatggaaaagaaaaaggcaatctctcaatacagagagaggctggacaacacactgtcctctgctgaactgactgatcccgagacacttaaaacccttgtcaagaatcagattctacgatgtgcacaacatgagaaagaagaatctagtgtacatttattggac

SEQ ID NO: 254523 - DNA, 401 bp, Gossypium hirsutum
gtcggatgcaaccccaacatcagcatcagcaccagcaacaaccccctgctaaggatgactgccaaggatcgggccagtaaagctttaaactttgagagcaagatgaaaatgagtaggattcctgagacaggatggctttgttttttcttgtaatggttcagtattgtataatggggaaaaccaaaaaaaaaataacaagtgtgagagaaatggatacttttcctctcagaaatctatggggactagattgagtggcttctttctttctgcactgcttcacccaagtttccattacagaggttgtttttcttgattcatgccttctgttgaacttgcatcctccgaattcttcagagaagtactaattcttttgtgctaagctattttactgtggagtgtgc

SEQ ID NO: 254524 - DNA, 382 bp, Gossypium hirsutum
ctttctcccttccatttctctccctctatttagtggtgttgggttctttttttcttcagaaaggaagtgtctcttcttgttcagaacaaaaaaaaaaaagccaaagaaaagagggagagtatagagactccagtacaaaagagcaaaaaaaaaaagaaaaagaaaaatccggaaccaaacaataatactcttactttttagtgttttttttctttctttcttcttgttatgaggctttctttgggaagataagtttcatttcctttcttgggggttttctttaaaaccttttgtttttgctttccttctgttcggccatggccggtagcaatgaagtcaacctcaatgaatccaagagggttgttccattgaatacatgggt

SEQ ID NO: 254525 - DNA, 99 bp, Gossypium hirsutum
atgcgacatatacaattcatccgactgttgtgtctttcatacacggggaatcccttcaaaagcttgtccaccctttgtttcctatggttaaccctttta

SEQ ID NO: 254526 - DNA, 399 bp, Gossypium hirsutum
tttttaacgactctctctctctctctctcttcctctattacttctaatataattttatgttcataatttaggaaccataattatccatccaaaatttcattcatttcccacttcaaataaccttccttttctatgtttggctgatcccaacgcctctttggaagcttcattcatttcatctttctccagagcaccttgctgtggtatattttctgggtttcttgttagatttcatgtatttatgagttgggattttctctctgattatagcttttaaagtttcattttttatttcttagttgaaaattgcttttttttttcagaaaataacctttagaaaggattcattgcagttaaaccagaaacatatatttttcttttcagtggttagaaatgaac

SEQ ID NO: 254527 - DNA, 255 bp, Gossypium hirsutum
tcggatcgttcccgcgtccgctcaaggattgggatcagcgttcgtcctccaaaacccagaaaaaagaaggtttcggggtcgcggtcaaatcttgacaagtactcattcaaattcatattaagggagcttgggatgctctgtggtgaatacggtcagcgctttgaagtaggagccaaaagagaggacaaaaagcccagtcatgcaggcagaggtgccttataggatgaatgtgcagttgtccaacccatgaaggtt

SEQ ID NO: 254528 - DNA, 280 bp, Gossypium hirsutum
atccactcacgccccaagctaatcctcgcaacaggtggcgaatgatcgctggttgcacgaattaagatgctcacaattggccggcttgggcaaaacctttactgaatgatcagtccactgaacctaaaaccatcaccgtgaccttgacaggaaagattgcttcatctaccgcctggattggagctatggctctctccaaagtttgggcgcagacgatgaccatgttcatctcgatgttcagttatatagatccccgtaccctcatgtgattggtggatgt

SEQ ID NO: 254529 - DNA, 405 bp, Gossypium hirsutum
ggcgcatgctttccctaaatgctgcacataacatacctgataaagattctcgcgctgaaacgtatataccagcagtcagccaaaggcatcagcatcaaggttgcggtggatttatatttccagtggctgatggttgcaacggtataactgataattcagggtcctcaaatagattgtcaaagaataccattcaaaatgctgagagggttcagcttggaaatggtagcgatcctgatgggacgactttagttcgttgtactgcaccaatgaaaccttagaagcagatctcttcaactcaagagctatttcaagaaccagcctcaaagctagcagacaaatgtctcggatgataaaacacaatgaatcaagttgtagagatgcgaaggggtttggccggttacacga

SEQ ID NO: 254530 - DNA, 331 bp, Gossypium hirsutum
  unsure (1)..(331): unsure at all n locations
caattccgaattccccgtcgacccactcttncnaataaaaaaataaatcatctattaccttttttaaatataatcacataccaagtttggtgttaaatatttaatttttctccccccatcctttaaacccaaattataataaatcaaagccttctttaatcaaaagactcattaacttcttttgtaacccctaatcaccacttatcttcaatcatttataaacaagcattgattcaaagtcctaaaatgcaattacatgttttcgctgtcttacaagacatactgtctgcttatactctgatatctaactcaatgctttcttttcaccact

SEQ ID NO: 254531 - DNA, 386 bp, Gossypium hirsutum
  unsure (1)..(386): unsure at all n locations
agtcggtttccgtaactcacacaatctctgcaacgaatcaaaagaatccttttagaattacaccaataattcattcaagaagattgtttcacttgcaagctgctgctcgttttcgctttgggttcatctcttcctacaagaaatctgattttcaagattttcagggttttgcaaaaccttcacggctttttccgtccacggaaccgaaaacctttaccggagccttgaacgaaaatatctttccatcaaccggcttggatggagctcggactttgttcaaagttaggttgcaaacgagtaacatgtacggctcgagtttgagtaatataaatgccggaatactctngtgtttgattgatgagaaaggagactcaatattaaagaga

SEQ ID NO: 254532 - DNA, 396 bp, Gossypium hirsutum
aaaaaaaaggaaagaacctagggcgctctctcaattctccgccgaccaacagcctttcaaaggtctgttcctctgcccatccttttgactcatgtgagagtcaatcaaggcctccttgagtcgaagggctcatgagcttcgtttgtagccccgaatcgccacttagcttcaatcatggtgaaacaagcgtggattcaagggcctcaaatgcaggtacaggtgtgcgctggcgtacggggcgtgctggctgctgagacgctggtatcgtacggagggcgggcgtggcacgacgtggttgctgttcgtgaaggctgcggtgcgaggaccccttttgccctagggtttgccgaagcttagcttgggtttcgggctgttttggtctgttccagttattgg

SEQ ID NO: 254533 - DNA, 385 bp, Gossypium hirsutum
cgcgtccgctccaatctctaatcgggtttctacaagcttctaattttctttttcttcactatttcggcgcatcagaatctcaagcttcgaagttccggagtttatgtttgaagatccatccatcattggattatttcctgaagatttatttttggtcgcgttttttcaagatctgaatcgggcggattgattgattcagagcgattctttagtacaataatcggtgatcgaagagttcgtgtgaatttgatgatctaagagcaaaggggctttttcattattccctacgatttgccctaaacttctggttttgctgaaagattcgatttattggaacacttcgtggagttaccgtcagagttgatatcttgaagacaaagcgcgg

SEQ ID NO: 254534 - DNA, 365 bp, Gossypium hirsutum
gacctcccctaccccaaaaaaaagtctacctattttattgctctgactaattccaggcaatttttttgcatcctttccttaattgattcttgggtatattatttgtaccccttttttttaaaaaaaagcgggaataaagaaaaaaaaaggctacttatttatttgctgacgtttgtttccggtttaattaaaaaacatatcttaccttccaagctccatgattgcaaagaacagtgccgagatacaacaacattcacagaaaaataagtgattgtcggattaaaggtaaatcgtaaacgtcatcggtttggtgtttgttgttatgcctggcgcatcacggcagggcgtggaacatgtaggcttgc

SEQ ID NO: 254535 - DNA, 319 bp, Gossypium hirsutum
gcatgccattgattgatattctgtccattttgctcttcttgttcctctctctctctctctctctctctctctctatttgtctttcccgcgtcgttcaacagtgtactgaaaaaggtgaaagagctaacaaaaagaaaattccattctcgatttaaagcattttgctttttttcttcttttcagtcaacacacttaattgcctccccacctctccttttttgtttgcttttaattggcgtgtgttaaaaaagttgattgaagaaattctcttgtagactcatagctttgctgtcgttgtcattgggaataattggcaaat

SEQ ID NO: 254536 - DNA, 373 bp, Gossypium hirsutum
aagaaagaaaaccccaagggttgggaaccgtgggtgatcttacagtgaatatggagttagaacaaaaacatgggtgtcccagtcacctactgcgagcttttttttgcaagactgtttgtccacacgctttctcttcttgctgaccttcacgaattgatttccactctcttactgtatttgggtctgcccggttatctcgaacctgacatggcttgcagcgaatgcgcccgtgaaacccaccacgcttacgcctgctccgtatctggtctggtcatccgggaactactacccggcgtcaagtgcttcgacctcgctgacccgaccgagagctgcgccgtgtgcttgtacgacttaaaagggcctgatgagatca

SEQ ID NO: 254537 - DNA, 388 bp, Gossypium hirsutum
cgcgtccgcttcttatgctttctttttgttaacactgaaaaaaagagaagttcccttcccagtatttctctacaatgcaacttctccacgctccatcttggccacatctctcctttcaaacttcagaccgaaattcaaaaggaggattgctttcacttgagaaatgtcttcaactgtcaactgccaattgttcctttcagcctcaaaagctggaaaggtcgatatgggtatcgcataaaagaaacttttttagcttctgtgcaacaaaagctacctcagttgaagctggttcttcagcagcatcaagtggaacagctgaaggtgatgtattaaaagccttgtctcaaatcattgatccagactttggaacagatattgtcacctgtgg

SEQ ID NO: 254538 - DNA, 385 bp, Gossypium hirsutum
cgcgtccgcttaattctatcaaatacatttttggagacaagcagtttttcagcggcaatgcgttgggcacctattgttggttgggccccatcttttttgttgaaacgatacatcttaacaggaatacatgatggacctcaagaacctttcattgctgattctgtagatttcgttgtttcacaggtcgaaactctctcaagagatgacttagcatccaggttggctttcacagttgataatgcttcagttgggcctcttctactttcagattcattcattactataatggatacaaatgactactcttcaattcctcaagaactcaaagatcagcttggtgagaggtatcccgctgctaggcgagcttatctgaaaacaggcgcgg

SEQ ID NO: 254539 - DNA, 373 bp, Gossypium hirsutum
cttaaaaaaacataagggtcatccccaaatttcttagagagggacttagggctttgctaagttccgtcggccacccttcgtactagcgaaggtaaccaccattggtggtggccggaatgttgcccgaagcccgatataaccctcatttctttcatataaaatagatttagggccttcaaaatccctaaaccaattgacttccgacctttgacttcttccgttgcaaccttaaccgaacacctaaggatccgttggcttttagaccagagaagcgatagccgaagaatatcaacaccaaaaaaaggtctgctaggagttaacgggggcaggtttccgttttggtccaaggagcgagtggtgcgctcgaagcacg

SEQ ID NO: 254540 - DNA, 333 bp, Gossypium hirsutum
cgtccgatcggcagcaaactatttgttggaaaatggtggagattttgaggactgaaggtggaatcttaaactcgggttgcttcataatggagatcgaaccacatggatctgattgaatataatttggcatgtatgaatgggcactatcagggattaagcattgataaactaatgtgttagatcaaaattgaaactacatatataggcttatcaaatattcattttatttcgtcaaaacatgttctgcagagtaacctattgttgaacctgatgatgatcatacagggttcttggagggatcaacataattatctgaatgaacgtcagggagcg

SEQ ID NO: 254541 - DNA, 367 bp, Gossypium hirsutum
ttcataacaggtgggtcaagcgggatcgggctagccttagcccaacaagccggttcccagggagctcgagtctcactcttagctcgatctcttaacaaactccaagaagccaaagaatcgattcgccgttcctccggcctcgacgttgcgatattttctgctgatgttcgtgaccacgacgctgtccagaaggcggctaacgatgccggaccgatcgatgtcctggtagttaaccagggggtttttgtgcctcaggagcttgagaagcagggattggatgagatcaagtttatgatagatgtgaatctcatggggagttttaatgtcatcaaagctgctttgccgttgatgaaagagaggaaggacc

SEQ ID NO: 254542 - DNA, 387 bp, Gossypium hirsutum
acgcgtccgctttgcgactgggtgtttgaagacattccacagctgagcttaattgatctgggtatcctgtaatgaaacggcgagattataatggcaaccaacttttgcgcaatggtgattggttctagattgccagcaaattgttcaaggttgctttatcctaagtatcataagctatctgttcaacttaacaggtaccaaagaactagatttgattgttatgatcctaatcaacaattttatggaaagctttgtacaggaagttctcttaagaagcctgatacgagcaggcatgtcgtgtctgtaggaagtaaccgggatcaattgaggttcgatgatgaattacccgaggaacctttctggcttagtctgggtagagaaaccata

SEQ ID NO: 254543 - DNA, 372 bp, Gossypium hirsutum
tttctttctctttcctttttctctcctctctctctctctcattttctttctttctctgtgtttgatgctaccacaaaaaggttctttgtttttcttcaaacatttttgggtcgttgatcttctttgttccctcttcaacacagattaattagttcccttttgttgttgttggtctttctctctacaatcgattcccagttttaaaattgcatctaattctcttgttatctcaagaaacccttttaattgaattgttaaaacaaagcgaaaagatcgacccagttctggtttttgatcgtcggtttagtttatttgagttcaatttgcagctatggcgaatccttggtgggttaatcaagtgagtttacaagg

SEQ ID NO: 254544 - DNA, 383 bp, Gossypium hirsutum
gaagatgaaaaataaacgcggtacagacgctgccattatatatagctagagtgctacttggaacggatgggaatggagcgacccaacagactcgggactcctgggaagaatggttcattgaggtcacagaaatcgactgatagaaggagctggcgttgccatgatcaaactcgcaatctgacgaggtatgactcattctgatgcccccgacatgttcagacccaaaactaacgaaattctagtgggaaaggcattgactcattcgacacgagaggaggctcagctgtctacaaactttgacggtgacagcatgtgttcatgcggttcggccataaatcgacctatgaaacagacgttcttcactagaggcttgccgaaaacgg

SEQ ID NO: 254545 - DNA, 382 bp, Gossypium hirsutum
gtttgatcatggatatcatttccaccatttccaccaaaaaccctaattttttgtccctttctctcgattttttttttaatttgaaatatttatcaatttaattaaatcacaaaaaaaagaaaaaaatctgcattttctctctttatttacatttctagtccaatgggtatctattattaggcatcaaccatcttaattgttattctctaaagctctcaacttctttttgctctgtagtaagaaggaagatataaagggaataattttacaaaaaaattgccattttcctctgattgttttcttttttatttttccttgtggggttggggttttcattctatggctgcagttgctgacaagtcaggtgaggcagcgctagtag

SEQ ID NO: 254546 - DNA, 161 bp, Gossypium hirsutum
gcggtagccgacggctgcgtatatctcttcatctatctgaacgaaggagactttagctcttagctttgagagagaccatgtatgtttaccaggatctgatctccggtgacgagctgcgatttgactcatttccgtacaaggatatcgagaatgggatgctg

SEQ ID NO: 254547 - DNA, 397 bp, Gossypium hirsutum
aagaaagatagagagagaaggtcatgcatctctcctgatataggagcctcagccttcaacctttgaacctaccctttctgcttttcttattaatatactcctctatttatgtgaattcacaagggccaaagggttgttgctttaccatggctgttcaagcacctttgtatgctgaaaatatgtgcggtgttcaggattggatggtaaatcctgcacctgctctaattccttcctcgtatttcactcttcaagacccttctcgatatacgcttccttttcatctgcaacaaaacgctcacaatttggctgtttcttcttcttcttcttcctcttccgcatctaatgctttcgtctctgtggctctttcacaatcgttggatgctcaactggagatgca

SEQ ID NO: 254548 - DNA, 357 bp, Gossypium hirsutum
aaatttcctagtgtttacaagtctagggtttttctttttcttcttctccttcggctctctctaaggcttcacccttgatattgatcatggccaactctgatcaaattgcagattcactagggaaattgtctctagattcacaagccgtgactgcaaaagttcccgataccgtaaagaaggatctttatggtgataatggctcatatgtgtaccagcagacttatggttatatgccatatggggtgtattctatgcctagttcacctcttcctgctatgggacatgacggtcaacttcatgctctgcaagaataccattatccaaatccttattaccagccactgcctcaaactagtc

SEQ ID NO: 254549 - DNA, 391 bp, Gossypium hirsutum
atcaaattcaaaaactaatgtaggttttttttttcttttttgaagttttttagccaagtgaagtgaagagattcttttatcctttgcttcgaagaacttcaaaagagatccccgtttggtctctttcagctgcttttttgtgtttttcacttcagtaacagttggagactcttcgactttgcctcaacccgggggggggggggatcttcaatatggagcagtatgaaattctagagcagattgggaaaggatcttttggctctgccctgcttgtgagacataaacatgaaaagaagaagtatgtcctaaaaaagattcgccttgctcggcagactgatagggctcgtagatctgcccatcaagagatggagcttatttctaaggtgaagaa

SEQ ID NO: 254550 - DNA, 395 bp, Gossypium hirsutum
attgcactctttgctttgctttccttctctcaaggctaatagcatttgtcatttaaagttgggtttttttttttgggaggaaatctttgttttttgttgtttgttgtgtggtgtgcatggagctccaactgggactctctcttccatccactcctatttttcctttcaaaatgttggacctcaacagctatggttacgagcttagggagggtttgggtccatttggcattaatgttaacaacaattgcggcagttgcagcagcagctgcaattctagcagtagcggcggtgctgatgatggtggtggtggcaccaaaacacgacgactccttgatgaagagaatcgaattgttcctaaaacgttgcctcttttgttttggacaaaccaacgacct

SEQ ID NO: 254551 - DNA, 394 bp, Gossypium hirsutum
cttccatccatcaacagtagtctgaattcacttactctctagaaacatgcttcccttcatgagaattccaagtgttaactttcttcaaaatcacctcccagttcttcttcaacaatccggctccttatttcccttaagtgctccgtccacctccgctcctcatccaccacggcctcagcccaggaggaaccctattcatcagataaatagtttctccctttttgagtccttcagtcgctataaagtgagcaactttgttagaatccctgtagataaaacgaaaaacacagtatctgaaacttaaactccgatgctttgagtctttgataagtgctgcgatttcagatctgtcctttttctcttcttgcaatttgcgaatcaccatccaagagtc

SEQ ID NO: 254552 - DNA, 345 bp, Gossypium hirsutum
atacattcgtgccttggatctaagttcgagcttgctcacggaattaccagactctgttggggagttgaaactattacgctacttggaattttttaggcagaaataaaaaggttccaactaatattaagctccggattgcaaacactaactttaggtgcctttgcttttgaatgccaaggccttgtaaaaggtaaccgattatttgactaatgacatgtttggtcagtgtagggctgcaccaagatgggaacttaccaggctacagaattgcatcatttgagtactcacagacaccggacgtggattggaaactgaagacatggcggatcttaaggaaagctgata

SEQ ID NO: 254553 - DNA, 136 bp, Gossypium hirsutum
  unsure (1)..(136): unsure at all n locations
ctcacgcaatgttatttctgcccactgttctgaatgtcgagttganaaanggtggcacatctggtttaaagataacgcaggtcttctaagatgagctcaacgagaacagaattttcttttggaacaaaaggtcaaa

SEQ ID NO: 254554 - DNA, 393 bp, Gossypium hirsutum
gaaaatgattcttgagaatacaatgacagcgttttttttttattttatatatattaatctttcggttcctttcacatgtaatgacacaagggaatctttatagttatcttctcatgctatagttgccccataaaaaaaggcttagcctcgttcatgtcataaaaatccttcacttggatctaaaaaaaggcttagcctcgttcatgtcataaaaatccttcacttggatctatatatatgtttctttaattcttttctcttgaaagtggtcatggaagatgatgcatacgaagaggagcctttgaatctcagcttgacaattatggcggatcccagtggggaaaagattaacagaaagaggaagagaagggttccacttccatcatcatatga

SEQ ID NO: 254555 - DNA, 390 bp, Gossypium hirsutum
gggcagccctttcccatgaaaactctcccctctttcatttttcttgtttgttcttgaaatttctcaaaaactcaatacccaaactttgagattttgctaaaatcacttgagaaactacctcttaagcttatttccactttcgatctctttattttcagcaagggtttggttgtttgttaagagagaaagttgaagctagagagagaaatatccattaagaacatgttgaaaggattcacatcctgttgattcgaattcgtagcgagagaaggtaatgctgctgcgcatgcgatggcatttgaaggtatgaaacactcagaagattctttttgggttgaggatgcttcgcttaaggttttggaactagccaatctggatcgtcgttttcat

SEQ ID NO: 254556 - DNA, 190 bp, Gossypium hirsutum
ggaaatgggcaaaccatacgttttggtaatcccttatccaacacatggccattagcataagggtggagaatcaagcgcaaggaagaatatggctgtgacctttgcatacagatgctacaaggtggtccattcactgatgggtcctcttggcaacatctgctatgatttattacgtttggttgctagaaac

SEQ ID NO: 254557 - DNA, 318 bp, Gossypium hirsutum
tatgaatcgacgtttctctttcatttgcaacttgtttgtttactaaggggcaaaaaaaaaaaaaaaaacagcctgcaaataccactgccgcctttggtttatagcttctaaatccaactagagaactaggttgtcttcatttcctcagctaattcactacaagtaaaatcacatggattggtatctctgtaatggtatggaggatcttgttgtccccagaaatcaagaattagaagataatatcccttccccagaaagttggtcaaaatgggaattcagccctcctgaaaatgttaacggtgaatgctttggcgtgga

SEQ ID NO: 254558 - DNA, 364 bp, Gossypium hirsutum
aaattattaatgctcattcgttggtaagggacctgaagggtaacctcgggttcttgcctttttcttcttgggttatggtcaaggtggtattttatgccggctacttgaatttgtgggctcctgactttacctttcagcatatgcaataatgcttgaacaggataaacttcccaatggtttggctctcctttaatgtatctctctggggtcattgctatctgggatggcagtttcagaaattccatgggggacaaaactttttgtagaagaagagccttcctgggtttcttataagggagattgcgcaattggattatatcactcccgtgcacacacaacacagtagagtggggacattcgttaa

SEQ ID NO: 254559 - DNA, 206 bp, Gossypium hirsutum
  unsure (1)..(206): unsure at all n locations
gtcaaaggttatgtcaaaagtcatgagtccacaaatcacggaaatggcgagcaagttccccaatgggcactattgattttgggggcattttccntattaccccacccctttgtatttgctttaaacccaccctggactaactaccttatcaaaacacctgtttaatcaaagggatcatgatccgatttggcctttatattaccccc

SEQ ID NO: 254560 - DNA, 158 bp, Gossypium hirsutum
tgtggattttgttttgactttaacgttaatggattatgatatattttagcccctagctgcttaattggagatgcatgtttagaaccacagtggagcttgtgatgtggggggattaacaaggtagcggccttgttttgatgtgaaagctctggggaaac

SEQ ID NO: 254561 - DNA, 427 bp, Gossypium hirsutum
aactaaaaaatttaataaaaatggcaggaaaaaatatatattgagagtttatatatggttttgctaagccagactatcatctcattctcatctgcattttgggtgttcttttttcctctctccttccaagttttaagagaagaaaaccagtaaggagttgctggctttcttgctaaaaggttgtggttttatagataatgcagtgtgagaaaacatacttcataggcaagttcaatggatggtagtgtgatggctgatcctgatccagactcgtctacattgggtttaaggcatattagcagctcactattcaatattcctggtttccttgttgggtttagcactaagggatcttcggattctgatgctgtacgaagccctacatcttcttttgatttgagagggtttgcgaattttagcaacccct

SEQ ID NO: 254562 - DNA, 436 bp, Gossypium hirsutum
  unsure (1)..(436): unsure at all n locations
aaaaaatcagaaaaacactccctttttccccatttataaatctctgttagggtttggaaacccctccccttttgcgccttcagcccgtcgatcgataggaagaaagtctctcctctcctccttttgggtctgatttcagcaatagagagagtctccagcgacacaatcacaaggattccgggttcgtcttgcaggtgtcagacgagtggaggccggcgatggcgtgcggggaaggctctgcgcgaagtgaccagtggttggcctagtgtgcggctgctggaggcttgagggctagggtttgctgctgaaaaattttaagcaagtgggctattaaggtttaggttattgagtttattttgggttttaaattntgggctggtgtgggttttgtaaatggacatttattttggactattttatttttatttgggtttta

SEQ ID NO: 254563 - DNA, 385 bp, Gossypium hirsutum
gtttctccattaaagaagtttagaaaaagatgccaaggccaggtcctaaaccttacgggtgtgttaaaagaactgggcttacctaaccacttcaactcataagaggttccatggttcaacaaattttaaggctagcttttcaaacccatagctcagctactaaaaagaacagggattggcaagataaaatacttattgccattgttaaggccaaggagtcattcaattccacagccatgcttgacaagctcaaggctaaccctgagccttttttcaccattgatattgcctcgtgggaatcggataccaccaaatactactgccctgaaacaggggagcttttgcccccttttttttaaaatacacttaatctggggcgctcccc

SEQ ID NO: 254564 - DNA, 287 bp, Gossypium hirsutum
caaagattgggttttcagctttggtagatgggtttttgtttttgggtttgattgggggatagctcgctttttgtaagtctacaagctacagctgcagctgaaggggatgcaattgctgacggtactgtttatattgatgggaaagctcccattggcaccatacatgatcatttccctggcactactgttgattgttggccttctaacaaatctaacattggcacatgcttttggagacaagctatacttctcaatttaactcctaacaattatatattctcaaatgc

SEQ ID NO: 254565 - DNA, 260 bp, Gossypium hirsutum
gtactcagaagacctgagatccaatatctaaataccttcatttctttgttgttgtgattatgctgaaagatgatctaccatatgcatcaacatctccctttgatcgtggcgtataatctactttcaaccaaatgataatttggtgtactcttgcaagtaatatattttgctaacactttgtatgtatgcaatagcttttgcatttgatattgacaccgttcgagtttggtaactttagtgaaatctctactgcctatctg

SEQ ID NO: 254566 - DNA, 463 bp, Gossypium hirsutum
  unsure (1)..(463): unsure at all n locations
gcgacgcgcacgcgnntccgcgccgtcacaataatgggtcgtcaaccgganngtctctcanntcctccaactgnnncatgaaatctctgcgcgtgtgagaattcggtgaactttcatagcctcgaaatnnctgggatccttnnctcccnnctatctacccatagaccctnnccgtctcatcnnngtctcttaccccnnttccctcncnntccaccaananntctcccactttcccttcctcttcctcttcttccctttccccaaacacccactttannacctcatatgcccggtgtnncccttacccactgccnnnctccctnagtagccanncctccatctcttcttcgacccacctccanntccccatgccctcatgcccgccgcaannagaagtgaaagggactacccggaaccctgccaagnnntccatcgaaggggtgtttacccgaaaagggggtca

SEQ ID NO: 254567 - DNA, 430 bp, Gossypium hirsutum
caacaagtcaactattttaccaacttgtccttgccgtcgagctgccactctcctagaaatggacagtaaaaatggcaatgaatgtccgaaaaacattactgaagcttcacaaattagacatgggttgactttattggatgctgatttctttaacgatataaaggttcttgagattgcaaagggtgcaaaagagttcaatattcctataataagaaccaacaggaagttagttgcttctattaatggagggctgcataacccttctcctctggtttttaaccccgagtggagcagggagcaatcacagggcagggccagcaggttaaatcatccttaagcttccggcattcaaaggccaattaatgaagaagatatagcctttatgagtgttctcgaactaggagaactcataaagaaaaaacagattact

SEQ ID NO: 254568 - DNA, 526 bp, Gossypium hirsutum
  unsure (1)..(526): unsure at all n locations
ccgtccgcatacatttcttcttcttttccctaagtcagtggcgttggtggnnctcttgggctcttcacnnccacccgtgaaacggcaaggccataactccaataaccntctaacatcccccacctccttacctggctatccgcaccgagtgcnnaggtgcccnnntagagatgccnnnctcaaattagnnngtgtatggctgccaatggtgctnnntaacttnnagtcaatggtcaccnnngttggttcacncnntccagtgnnntgccatgctgtnntcccttctcaaatgggcctnntgtcgacctcnngaagctgctgggcttgcnnctttgtacctggctnnntcagagctannacatcttnnaggcatcanacnncttaaccatcnnccagtttctttcttaagctttgggctcctcaaaacgtttggttcaaagggaatggggttccaactgggcnnttccaatgggctaattannagtcatcanncttttccctccaattctttcttcaaaacttcctt

SEQ ID NO: 254569 - DNA, 284 bp, Gossypium hirsutum
cggacgcgtgggtttttttttttttttttttttggggtcaacatgaatgagtgtcggcatacgaaattattgtaaaaaaaaacccataaaaagtcgaggaaggggtggccccagataaaaccatcctctctataattttctggaaccaaaaaatacatttgtttatgccttttttcatgcgccacgcgctcaactttgaaatctccagggcttacttcattttggaaaacacacccgggggctctgatttttaaagcgccaggggggaatacactttcgctgac

SEQ ID NO: 254570 - DNA, 432 bp, Gossypium hirsutum
tagatgtttgccccttttcaatctgccgttcactcaccaccaatccaccattgaaatgggtagatggtagctcacaatgaaatcattctatttccctattctaaaccttgccttaataggtcagattttagccttgaaaacctatttcaagcttcgatttcaacgaagaagatacggcttccgatggcttctttgaagggaccaaacgggcccaccggggtgatggcgaccgtggaaccggcaaaggaggcccccgtgggcctgccccgaaggtaccaccggtcctggaggctgttaaaagttgctgcggcccaaaggatgatgctggggtcttttagaaattttacatttggggccaatttgtgttaagcgttatttgggctttggtttagttgttgagttgttataaaatggactgtgaacacttattat

SEQ ID NO: 254571 - DNA, 119 bp, Gossypium hirsutum
tatatcttccacaacacagaggcagctaagtgagttgtgccaaaaataattcgtggggcagaaccggaccccaagggaagaaaaaaagggccctcttttacaatcaactgtcttaagcc

SEQ ID NO: 254572 - DNA, 175 bp, Gossypium hirsutum
gtgagtaccaagttttcttcctttctttccccctgcaaaataaacaaaatgatcttagtaattaaaaaaccacgctctaagatatcaaggcataattatggtattgcatgccggtcaaacacacaaagtgcctttcatgcacttattgttgccgaatataaaacggagcatgtct

SEQ ID NO: 254573 - DNA, 331 bp, Gossypium hirsutum
aacgggtcttaagggtcctaactaattaactcggttcccttttccctttagcatagggtggggaattaaaccccagggaaaattttggtgtaacctttgcattcagatgctccaaggtgggccggtcattgattggtggtcttggaaacaacctcttttatttaccaaacgcacatagtgtgagatcacatgtcgcatttttttgtctcaaccacaaaggtcttttattcatgagaactgttcttaaagtagtggacaactccggggcgaaaaaagtgatgtgcatacacactctaaaggggaagaaaggggcacgattttgagacaccat

SEQ ID NO: 254574 - DNA, 332 bp, Gossypium hirsutum
attggactggtagtaagcctgttaagctgttgtctctccatcatcgcgttgataaagtcgggaactttgaaaccactcccaccatgcgcaactgggacgagactgtcgtctccctgggtcaggaaagacgtttccttttaactcagttacagaccgatcaaaaacattcttggtcttggttattttaccacaatcggttacaaaagggctgtaaaaaagatgcctttcactctaaatgttgttaactctgtggaggtgcacgaaagtgccatgtcaattttggacctacctgatgtgttctgggaatgcagtcttgaatggcttccacctgc

SEQ ID NO: 254575 - DNA, 244 bp, Gossypium hirsutum
  unsure (1)..(244): unsure at all n locations
caacgcccnaaccagcaccgagctccgccgccagcagcgactagccgcaccagggagggggggacaaccagcgcggccgggcatccacgaagactacgaaacaaatggaaggccacagaacttcctaaaggctgtgaggacgtggaggggcggagcgcacggacatagggatttcattgcgcgagccggggatatgctgtatacggggaggctgatggtgaccactgtctgccgggggaaacag

SEQ ID NO: 254576 - DNA, 399 bp, Gossypium hirsutum
ccaagccctcccaagcgccgttctcctccgtcagttgtgactagccgattcaggtcccgaaggacaacaatctcggcttctcaacttcgatttcaacgaagcagatggaatcccacagtacttccgaaaggttgtgaggacgtggaggggcggagcgcacggacgtggggcgaacaatgcgcgagtcggggtcatgcgtggtacgtggaggctgctggtgaccactgctgcggcgtgaaacagatggaaaccctagggtttccgaatttgggcctattgttgttgggccattattttgggctgttttatgtaattgggcatttgggccagatttttctttttggatttactatttgtaaatggatatttaatatttttgttttattttttggtttttgt

SEQ ID NO: 254577 - DNA, 191 bp, Gossypium hirsutum
gtcgtgtaaagctgccgaagcaaggctaaccctgactttcaaccaaaatagtgaaggccccctctttctgcgacgaacgattctttcatccgtgtataccaggaaactgaacttttccttttatatataaactgctttaaaacttctatttttttactatcaaatatcaaatcctttaaccttaaaagtta

SEQ ID NO: 254578 - DNA, 247 bp, Gossypium hirsutum
agagaactcaccagctgtaacacactaacactcctaaaagcttttttaatgggaggctggtttactaccaggaccattattacacgcttctggtgttattctggatcctttccaggtctggtgttgtttacagtgatggtgatgcgcaaaatctttgatatatctcacaaaatcactttccagatgcccacttttaactcccagaagggactcgggcactttatttgggttgtgtccagaatttaaa

SEQ ID NO: 254579 - DNA, 244 bp, Gossypium hirsutum
cttaatcattctactttcaacaccaaatctatattatcggatggagccaaaacgggccggccataacacagttctaccagtcacttcttcctctacagaaaacctataggtcactgcttatcctgtagaaatatatagcatttccacttgcgacgaaggagaggcagaccccaaacccgcgcgtaattcattcgctcataagatcccaccatcctgatagccccgaacctatacgcctcgccta

SEQ ID NO: 254580 - DNA, 190 bp, Gossypium hirsutum
gtgatactcatccatatcagatttttattccgtgatttgctttatggttctttttatgaccaccttatgcggcgcgcttacaactccttatgtgtgctcctacactgcgtgggcagaacactcttttggtggttgtccggtgctagatcctattgcaaggtagaacataactgcgtatgatgaccgtgct

SEQ ID NO: 254581 - DNA, 366 bp, Gossypium hirsutum
gcgctccgctttcttcgcataacccggtgctcaagcccccgctccgcgaccttgggggcagatctcgctggtagtcgcctatacccaactcactactagcaaggccgaataggggaatggtcacactcatacggcacttgcacatgtcttgctccatcctaacctacaacaggtggacctacaacagcgcctccactgcgagctttctaagggactcttctataaattactgatccggacctctgcgggttacatccaccttagctaacatctacacctgtcacgtgaactcggccagagctatctgttctttcaacggcctgacatcatgtataccgctcaatcctatgttggttcatcaactac

SEQ ID NO: 254582 - DNA, 411 bp, Gossypium hirsutum
aaaacaatctgttttattaattaaacaaattgaaataaaggtgaataaaatatactggagtgaagaccagatacagatctggatcgtgccctaagtaaagcccataaaagagtagcacttcaattcttcaaatcttttttttttttgcttcagaagccataatacattgcagtcttatcactgttatataaccatgtcaaggaggcctgtaaatcctgctcggcgctttgctgatggcggaagcatcccttttgttggctcagtacagtctaagacacgttcatcaccattcttatctattgggcttttggttgtgggtgcaattcttctgattggctatttgcattatggttcagggcaatccaccagtgtaaaagaggcactaaagtaagttgaaggtggttcttcatg

SEQ ID NO: 254583 - DNA, 278 bp, Gossypium hirsutum
agagaatgctggaagttcatacagctactccagaggtggcgatgagagctcccatatagaaagttaccaggatatttgtggccagaacaccaccatcagcggatgaatcaacctttcgcaggcactttggggagtatggtgagataacaaatttatacatgccgtaggatcaagtctcaaaagctcatcgatgaatcggctttatcactcttgctagtgcagaatctgtggagaatctgatggctgaagctcatgaactgggtggttctacagtagta

SEQ ID NO: 254584 - DNA, 401 bp, Gossypium hirsutum
cgccatacaggcttgtaaatgctgaaggttgtttctgggggataatccactcggccggcgaagttttgtccttaggtctcgtcgtcacactcttttggaaatggaatccaatccaccatagtactattaagtcaaccatttccatagcctactaaaagataaacaccgctcttcatttctccactctcaaacaactagtagcatctatggcttccatggcttctctttcagcttcttaccctaaatatacgtccaattttcccactagatacacgcacctgttgtatgatttatgtcttgttccacgaaatcttcctcttgtgaaaaaattgtctttctcggatttgacaatcgttagaaagtctaatcaaactgaatcaatgatcgattctactgataaa

SEQ ID NO: 254585 - DNA, 322 bp, Gossypium hirsutum
tagagggcgtcaggacaaagaaggttgcactcctctccattgggcagctattaggagtaatctagatgcttgcacagtcttagtacaggctggcaagaaggaggacttgatggtcactgataatggtggcctcacacctgaacagcttgcttctgataaaaatcacagagaagttgctatcttccttggtaatgctagaaggttgtatgaaaaaggatgtggtcggaacaacagttttggacaactttctaaattaagacttgcaccaattctttggtgcactagcttgctactatatggtgacatatattcaatctgtgtt

SEQ ID NO: 254586 - DNA, 394 bp, Gossypium hirsutum
gcaaatcgtaacttaatgcctaaatgacacaaggttgactaataaaataaatcgcgagagaatatgtggtcatatgaggatctcaccacaggcgatgagctgctttagggctctttcccatacaaagaaatcgatattggaatggcacaggggaagtgacagggaaagtgctgctggtcaaggcagctgacaatgtacaatatcgaggctaacccttgtgcagaaggtggtgaacatgaacaacgtgttgtccctcttgccaataagggtccacacatacacggcactctgagacttcaggacctacacgatgcatacacggatctgaccatgcccagactgaataggatcatcacgacctctccacccagatctgatcctgttatgcatgcac

SEQ ID NO: 254587 - DNA, 276 bp, Gossypium hirsutum
caaaaaagaaacaaaatacgtttaatttcccaattcccatgctaatttcacactgggaatagcgttaaaaaagagagagagagaaattgcatcaatttcctttttatattggaaaaatagccttaacttggatatggcgacagttggaagacattcctcaatctatagagatctggttgtagttcatatggtatccacatccatgcattggccctgacctatacctgtgttctctagagacaagtgttcccagctcaagttctaaagctccttatc

SEQ ID NO: 254588 - DNA, 411 bp, Gossypium hirsutum
ggctggtgtagatggccaactgtgggttttatgtccaatacttttcgttatgcagggttttgaggcatatgttggactgctattgctcaagacagcatttgttggagttgttactgaatggcaggtaatttgttgtgggatacttttggttttgatggctgttggaaactttataaacacaatacagacactcatgacgaaatcaaggtttaaagcaaagatgaaaagatcaaagagcaaggcggagttggattagaatgtccctaattgttaggtaaatcttacatctagttttttagtgtcatttttttttatgtttccagtgtctcatatatgtttgttttagatgaggcaaagtgtttgtttttgaagtattttcattttcacaggcagttttactttatatgaaat

SEQ ID NO: 254589 - DNA, 287 bp, Gossypium hirsutum
ctcttatactttttttctcttcttgcttatcattttcttcaccaaacattttggtacgaaagtttcaaccattttgatgccataattcattcattttcctggaaaatataaaaaccaagctacattatcaaactgggtcttccttcttttttagaattaaaccagttcctgatctgggttttcacattgagctaacatactttttttttttttttcaaaatggaaaaccaggtttttcttggtgctcaaggaccgccattagactttgggcagtcattatcatcacc

SEQ ID NO: 254590 - DNA, 412 bp, Gossypium hirsutum
gaattccacagatcaaatccttacgtgacaggttggataattgggtaggcaaagtacaaaccgcttggttatcaatcgaagctgaaacacctgatcttgttgcagcatgaattttttctcccctcaagttcctttctgcccattgtaacaatttcgttattggaaaaaaaaaagaaaaaaaagagaagttaatggtgagcaatgaggatagagacaagtgtaagtgatgtggggatattagttgatagttgatcctggaattattctattcttgtggaaggagtgtcccctcctttatactttctttttcacgtttggtcatttgttggatatttacagtggcatatatgccttaggatacttgttaaacttgagaatagctagcttccttctcttttttaactttgtattg

SEQ ID NO: 254591 - DNA, 343 bp, Gossypium hirsutum
ctcctgagtacggtttcatccaccatcttttttccttcattcaacctgtgtctgcggcccataatataatgctacaacatgttttcgacttgctagaactgcgagttttcacatagtatggcccaaaggtaaaaaataaattggtgggtgacacatcgaggcttggcattggtggtggtcaaatagatgggaaggcggtgcagacattacaaaagagctttgttcaggttcagaatatattggaccaaaagcggctgctcatcaacgaggttaaccagaaccatgagtccacgatccctgacaactcgagaaggaatgttggcctgattaatgagctcaacaa

SEQ ID NO: 254592 - DNA, 371 bp, Gossypium hirsutum
tttatgtttacagcttactctctctttttatctgtttttatttaagagattattacggagattttttttataaaaaaaccagtttactgctcttatacagttatacttatgaagttgagcagcaaaagagaaaaatggaaaaaggagggataattggtgtggagaaaagaatgagaaaaggttaaaagctttgttggacttttttttcttttcatttatttgatttggatttgtgatatgaataatggatttctcggttctttttaaaaaagatctgattttagctgttgggatgcgcttctgagtgtttaaaagacaggggcatggccggaagtaatgaagtcaacctcaatgagtgcatgatggtggct

SEQ ID NO: 254593 - DNA, 407 bp, Gossypium hirsutum
gataaactgacaatatctgagtcaaacaatggaggactctggagatagcatcagggggaaagggttggaaggcacaggcttggatctgccacccaataagcatggcaatttgaagagtgcttccagcgatgaaaaccttaagcacattcttcttcgtgtcaaaacctctaaaactcctgtgcggtgtttgtagccagattcttcctgcattttgcaagttgagcaaccagttcccaaacttatcattcgtgtatgctgatattgatgaatgtcctgaaacaacgcagcatattcgtgacacttctacgtttcatttttatcgagatggtgaaagagtggacgagatgttcggtgctggggaagagcggcttcatgatcgcttgtggtacattcctgaacaaccccat

SEQ ID NO: 254594 - DNA, 411 bp, Gossypium hirsutum
aaaagctgtatgttccttccccattgctatttccttttattaactattaaaaccaaaattttttttgtcaaaaacgttttaaccttttattttttttaaaaagccctaaaagctttatgaaattctctcttctccctcattctcccctttgccttccagccgaaaaggccaccaatggctcacccaaccgccgccgtgactccggtgctgtgagatcgtggaggaggagcgaacatgggcgtgcaacacgtgagttggtgcgctgatggaggacaacatggttcgtgggtgcaaacatgggcacggaggccgtgggacttgcgacggctgaaattagcctagggtttcccttgtcttctgattgcttaggttttgggccataagtattgggctgctgtaattgggtcttta

SEQ ID NO: 254595 - DNA, 348 bp, Gossypium hirsutum
cactcatctaaagtgtgatgcagcctcgccgaccgtgttcattctaaatgcgaaagccagtacaatccatagatgtaagaacaacatttatatgcttgtagcaccgactcatatgtttccattcccggttaaagccatgattgtccctatgagctttacagcccaaaatctggtttgccgggatactacaccgatcatcgacgaactctctctcgatctcacctaagatctgccgatgatcgaaaatttataaatatcccgacaacaacaaagatgaagagagaagacacagtgaaactcatcagcgctgaaggaatggaatgcgtcatcgacatagaagctgatatg

SEQ ID NO: 254596 - DNA, 206 bp, Gossypium hirsutum
ggggcgcatggctaccgttagtagtttcgctggtccagacacaggcactggaaggagaccaaatcccacagcttatattgtgatgacctcgagatactcgaggattcgtgttctcatcaaaagttgcggcacagaggatgacaggttgcggtgccgatgaagtgggctcacaacactacgttgggggagcgggttaaatgtgcggt

SEQ ID NO: 254597 - DNA, 341 bp, Gossypium hirsutum
cctctctcaacctggctagcaattttcttgcttctcatcttccatggaaacctttcttgatttaaccttattgtttcatactttaacatgttataatagcaacaaaagctttctctcgagatgctggtctttcccagagcatgaaaatgacagctccaaggcaccagattgcgagagaactctttgttttgatcgttcaagcaatggagtttcgagtttatcggcgaagaaagaagatggtgtgagaattcataggaaagacgtgcaaaaattgatgggaaatctggggattttttgcgaccaagaaaagtagcaaccgaatgaatcattcggttttaatg

SEQ ID NO: 254598 - DNA, 224 bp, Gossypium hirsutum
  unsure (1)..(224): unsure at all n locations
gagagctctaccggcatgggcagatgacctgcagggtgctatgctaaggtgaaagacatagcttacccaaacagacgttgttgtcgctgagtttctcatcccatgttttggaaatatgatgcgggcatgaaacagtacggcgtcgtttattagcatgtcagagatcaacttggctcgntgctggaaggaactttgagtctacgttgaagctctgtgaatgctga

SEQ ID NO: 254599 - DNA, 346 bp, Gossypium hirsutum
tcgcctctctaaacctggctagcaattatatcgctgatgaggaacattgatgttgagttgggttctgatcatctgcctctccctagtagcagtgcagagccaatactactgggagaccctaccatatcgtcccaggccaggtaaggtcaccaatcttcacttctttatgcacgaatttacgggtattacagcagtccaggtagcccaagttaacatcacaagcagcgacaataattcatcagtgccatttgcctgcctagttgccgttaatgatcccctcaggactggtcctgagcctgactcggagctgattggaaatgttcagggtattgcgctcctggctgga

SEQ ID NO: 254600 - DNA, 406 bp, Gossypium hirsutum
ttctttttatcttttctacaaaaagacccctatcagacaactgtcaatcaggttcctttcttttctgtcgatccatctccaaagtttattgcttaaggatcctttcaatcagggttacttaatggatcaactgtttctattatattatagtgattctggtgtgttaccaggggcggatgtaaagcctttaggcttggcacttggtgcccatgtgtgttccagagggatgttagcctacaagctaggcagttgatgcccaagtatgttctcggttggtttagcttgtttaagtgttttggtgtgttctggatggttaaccatgtaaacgaatctattatatcggtcatcgggcagatttttaatggttacatgatttggaattcatcttgtaaatggttatatgcct

SEQ ID NO: 254601 - DNA, 398 bp, Gossypium hirsutum
caacaaaggaaaaaaaacattcatggctactaaaaaacatgatgatcatgagaattatccaactgttttggttaccaagacagttaccgtacacccaaaacccttgttgcatcatccacaacagattctccatctttccaatttggacaggcagtgtccgatgttaatgtacgtcgttttcttttacaaaccttgttttgcttaccagaacttgtctctgggctccatcttcaacagcttgaaatctgggttggaagagacactttctatatggtatccagctgcaggtaggttgagcttgaaccaagctgatggtaagcttaatctttggtgcaataatggtggtgcagttctagctgaggcagtcaccactgcgaagatcattcaacttggggatc

SEQ ID NO: 254602 - DNA, 142 bp, Gossypium hirsutum
ctcactgggttaagtaaaccctattttggtaccctatcttttccagctggaggtggagtccaaggtgggggattatccatttcaatactcctaccgtaaagatgaacaaggaagggttcatgaaaatggctggtgcagtccg

SEQ ID NO: 254603 - DNA, 330 bp, Gossypium hirsutum
gttcttccttggaggtaaaaagaaaaaagggtttcttttgttcgtttttttttctgtagaggatgccagacaaaggagggagctttgttccagttcatcaatggcgtgttggtttggtaacagcataggttctggttggtatggtggtggtttggagcatatatggctgctcctttaattctacattactgtcgtgacagtgatcacatgcttacatcacgttgacccttataagggcagttactaatgttgtggccctcgcattttctgcaattcttggctaatgggggggtgatttttattcttgattactcgcccttgtggtttttt

SEQ ID NO: 254604 - DNA, 192 bp, Gossypium hirsutum
tttttggcaatcaattttgtaagcaagtattgctaaagaccttgaggttggtggggggttccaaaccaaggactaccattatccttcaaccacttcaatggttggacgggagggagtggccaaagtggtaatttattagggttgaaatacccgatttaatggccaccctttaattttaatccataattgggt

SEQ ID NO: 254605 - DNA, 346 bp, Gossypium hirsutum
gaagattaattaagagtcatcagctcctgcacggtagacgttcttttgcctaggccttggatccaccgtaaatctgggcgccttcctagcatcttaattctttaccaatgcgccgagttcttggcttaactaatatgtaaatctgaggtctatgtggtgatttcttttacggggttattacccatgtcatttggtgcttccgagcacccttttacatatggacaactgttttgaattgggggcttctatatatatgtgagcatgaaactgggtgcttcattctctgtaatattagtaaccaacttacatgtgcctaaatgacggttctttcttacattgtaccaca

SEQ ID NO: 254606 - DNA, 426 bp, Gossypium hirsutum
tttatttgcatgaactcttaatccactcggtctcaaatccccaaaccccaaaaggatagttgaaaaaagaaaaaagaaaacctttgttttgtcttcaaatattgaaactttccttcactttcccactgaaaatctttcattttttcccaggaaaaatgaggtgggaaaaggttcagttatacccaaaagaagaaggaggtgtgggagaagcatgtgcggggccagggaaaagatggggacatacatgtaacgccattaaaggaggcagatttctctatgtttttggtggttatggcaaagataattgccaaaccaatcaagttcatgtctttgacactgctagtctgacatggagcctactagcaacaaaaggcacaccgtcaattccaagggatagtcatagttgtactactggtggtgacaacc

SEQ ID NO: 254607 - DNA, 415 bp, Gossypium hirsutum
gtttgagaatcactttttcacccaaaagtgcttttctcttaaaagcagcaaagaacagcctcctttttctcttaaaatttctccatcaaaaaagtgcttctctctagacggagaagctaaaaaattctccttttcttctgctgtaactgcttttggatgaaaattgaccaaatacccgtcttttcccccaaacgtttttcccctctgctggttccctaaatgttctttcccctctgctggtgaaattggagctttatacccgatttttttccctattttcggctttcaaagctctactttctgttctttgttcctcttccgcagcagagaatgagaacaactcgacttttagttgaatatctttattaaaaatttgtctcatctggtggtttctgagaggaaaaaaatgggatcc

SEQ ID NO: 254608 - DNA, 373 bp, Gossypium hirsutum
gtcactctctttccttcccatcttaaacatgctccctcctttgtaaatcctattagacgtcaatttcccctttcataatctttgggttttcatggaggaaatcaattgggatacccttctgctcgaggttgacttacccgatttcggggatatcttagataatgaaccggaaccggtaacggaacctcctcctcaaccttgttcgacccagaatttcgatgaagaaccggcggtgtcttcgtggatcggggagatcgataagggagtgatctattgtggtttaaaaaccatagaggttgtcactcaacattgtggagctctatgctgagaaagttaacaacagggggttttgctccattgcacaggccgagtt

SEQ ID NO: 254609 - DNA, 421 bp, Gossypium hirsutum
gttttatccttccatgcaaggttcccatggaatcccgcaaatcccacccttctattgtttgtttcagtgaaatcttggtggaaccaaaccacaaggggaaacatcagattctaagaaactccaagtttcaacctctgggcagtggtcttagattccaaattactgacagacatagttacatggtcttctgcaacagtaatgttgaacaaggacctgtaatcccttctagccctgctcctgctcctggatcctggtttgtcttttatatatgtatttgaaaggaaaatatatcttttaattttgctcttcaatgaggtttgtcacagtcatttttaaattttcaggaaaccttggaattctgggatttcttgatgagtataatcctacccttttggaggggaaacttgccggcatttattta

SEQ ID NO: 254610 - DNA, 261 bp, Gossypium hirsutum
gttgtcatggtggacaagtaaacataggatcgctggaatggcttgtcaagctgcgggagggatattctgttttgccgcgataccatattaatgaagccactctgtgctggaaaaaacctgatgttgtaggagaggatggtaaagatctcattctacatattacgggcactaattatgattgtaatagagagatcatcaaccctattgcctttggagatccgatataagaaggtttggagggcgtgcgatgtctaggacccc

SEQ ID NO: 254611 - DNA, 422 bp, Gossypium hirsutum
gaaaaaacaaacgcttccactcggctgaaccaaaatctctcattcgaaccccttttctcttctcgacggatcgtgttatgtaatggccaatcaaggccctattcaaccagaggttcgcgagtttcgctcactagccttagaatcgtcacctaacttcgattgtgacgaatcaagtgaggattcgaatgagccaactctctggtgagtcattttctcttttctgatttttgtttttatatgcagtaacaaagatttgtgaaataggagcagaatcgaaaagaaagaaataatctaaaatcaccttagtttttcctcgctttttccttctattttcatattccccccatacaaattacatttggtctttatttatagccgaataaagagaaaaacagaaaatcaaagaaatttcctagatcttt

SEQ ID NO: 254612 - DNA, 311 bp, Gossypium hirsutum
ataatactctgaactttgggtttagaggggatgaggaaactcttgatggcttggctggcatggttcttatttgataggttatccaaggtacggtggatcgtttggaggtggaggatagagatgcagacacgcgagaggggaacacagaactggtagtgttggactaggctgatagtggacagattctgggtcgaccaccgggagtggaccatgggggtgaaagttacgcgacactcatgaacgattcattagatgaaagctggggtccttaaaggggtgggcttttatttgattctgaatgttataatggg

SEQ ID NO: 254613 - DNA, 285 bp, Gossypium hirsutum
aaagcacaccaagctaggcgccatgcaaatgctatatcatctttttttttctgggggacacagcctttctaaaacatccccagctatatcaattacacaccactgttcacggtagagagaacgaataactaggcgtacctctccgtgagttggcactcatgataagctattcagtggcgaacacatattctggtcagctctaaatgtaaaaggacaaggaattttacttggatcaccaactttactgtaagcacttgaagacacagccctgtggcaattgggagg

SEQ ID NO: 254614 - DNA, 422 bp, Gossypium hirsutum
cgtaaggttagcttcatgtactacatgcatcaacctcttactattgcaattaactctcttttatcttcccctctctctctctctctctctcacacacacgttcaaaaacattcttaagaatattgaacccccaaagaaacatagagaagggataataaaaataaaaataaaaatacataatgttttgtttcagatcaaacccttatgcattgttttttcttttctttttttctttgtttctttttggacatgaaacaggttctcaagctttaaatgtccagactttgaatatttcagggtattgtagaagttttgtgtttggggagagagagcagagtgaagtgttagcatggaggaagacagaaaggaggaaccttgcagagggaagtgaaggagacaacaactcgtctttgattttggct

SEQ ID NO: 254615 - DNA, 254 bp, Gossypium hirsutum
gggaagccctttactaacctgactgcataaacacaaccatgtccaaccattcaggttttctagtccccagactttttatctacatttgaaatacctatgttggatccgactcttccgatcaccggtacagggaccgagacgctgtacctttttacgccaaaggcgttggccggtgtggcaacacgaatgtgacctatgggtaagagggtcaaatcctcacccgcttttattgaggacgtgaataaaacataaga

SEQ ID NO: 254616 - DNA, 426 bp, Gossypium hirsutum
atcaacaatgggtgaaatatggcttctccatgtgcactttaccagattttaataagtacccgattgctttttacactccccttagcttagctttctttgtgatcttttcattttttctcaaaaaacgatgtcgcttttcttcgaaaggaacggtgatggtaattcaatcagacggtcagggtttatccacgatatgcagtgtattcaagattcgccggagctaaaaaacgatgatcagagagagtcggtgctggcggaagatagggaagaagaggatgatttggagtattgtagttcgtcgtcgatcggagggaacagtgatgtttctggcgaatcatcatcggacggtgaagattcaagggagactgaagttcaaggcaagcttaaaggacccttggataccatggatgctctacaagaggtttt

SEQ ID NO: 254617 - DNA, 342 bp, Gossypium hirsutum
acaagcagttcgagaagccggaaccctagttccggcataaggtcaacaccggaccgatccgcttactctcctagcttttcttcctacactgcatcaactgcctctcgttcagggcggaatccagtaaaggttgcggtccggtccatcgctggagcttttgtcgcgtgttttacacctcccgagacagacgacagcaataatttaaaagtatccaatgagtttggagctccttctgctgcgtcggaaacgtcaagaatgaggggtcagaatcgagggatttattccaattcaacgaaggagagagcgcctgggagcatgaaattcacgattgaggaaattttt

SEQ ID NO: 254618 - DNA, 369 bp, Gossypium hirsutum
  unsure (1)..(369): unsure at all n locations
ggggaggaaaatgccaatgggttgcccctttctttccctccgcttctccctctttgtctccctttctttcgcaacttcatcttctcccttctcatttttcaagctccaatccccatcatcttcaatccccaaagctacgccatccgatttgctctctctcttggccaccccttctcactcttcctcagttaacccttcagtcgccgatgaactcaagtcctgtttcaagttcctcgtcccctttaatccaagcaatacccgaagctcctctgatttcaaatccccttcttctagacggtcccttttgaaaagcccaagagatgaacaaaatgagcttatttggtggcctnctgaaccggttcttgagct

SEQ ID NO: 254619 - DNA, 274 bp, Gossypium hirsutum
  unsure (1)..(274): unsure at all n locations
gtttcattttattgctatttctatcatttatttgcttctatagaggttcttcaaaggccgtgatgattgatccggttcgtacgaggaaaaattttttgatctcatccagacatcgaacggcggcgaaggcgggcgatcaacatacagataaagcttcgatttcctncaccaaccaccactaccacgacaaccacaaaaagaagagcaggttttcttcttaatcgcccgccattcaagtgagggcttttaacttcttcataaagcaccaaggctt

SEQ ID NO: 254620 - DNA, 325 bp, Gossypium hirsutum
gcattgttcattggtgttctaacaatggaccctaggatttcattctctaatgattgtgcggatgtggggtccaggtttgaaaccactttttccggggagcctccgttttcgccgccggagttcgaatcttcggtaaaaactacgctatgataccggcggacgagatcttcttcaagggggtggtgttgcctttgaaaggggataattaacatggaagggaggtgtctttaccagataccctgcttggggatgaccgggataatggcggcgggttcttcccgccgaaggggttcgggggggggaaaaagagggttgggttcaaaaa

SEQ ID NO: 254621 - DNA, 202 bp, Gossypium hirsutum
gccattaaagcttagaagaaccaaatccttaaacaaaagttcaaaattccaatttcttggaagaatataatcttcttttctggcgttgcttgaacttctctttcagttttagcaccttaagtaaacgagcctgggggcccaaaaaagctaaggatctatttaattagatttgtttttgtttctcggaagtgccaaggaaagg

SEQ ID NO: 254622 - DNA, 400 bp, Gossypium hirsutum
  unsure (1)..(400): unsure at all n locations
ctcttatccaactccacccaaagctaaaaagggtcgtctctgaaacatccatggccgacaattgctcattgccacagttcgtaatggagttaagagtcttgccaattaagaaccttaaaaaacaaggttcttgtggtctctttactcgacatttaagacaccatatatctctcactaagttcaatggtgtgaacaatctttgtgaaggtaatgttgagaaatctacatttggtgaaagctttgtggtaccaatagaatccaacttcttcgctaataactcttacatttctcttcaactacacaccaaaaggctccttggtcgtaaggatttactgggttggtgtcagattccggctgctgatattgnggaaccgccagtagggtcagtccggtacttgag

SEQ ID NO: 254623 - DNA, 104 bp, Gossypium hirsutum
  unsure (1)..(104): unsure at all n locations
caacgatgcaaggaggatcttctggcatcggctacggcctcaagtatcaggcaagatgcattttggatgttaaagcagacaccgatcataccanctttattttt

SEQ ID NO: 254624 - DNA, 104 bp, Gossypium hirsutum
tctaaacctttgcccccaagcatgttgccctcccatgtgctaaagagaaacaaggatggttatttctggttcttaaagaacccattccagtacacaaagacaat

SEQ ID NO: 254625 - DNA, 270 bp, Gossypium hirsutum
  unsure (1)..(270): unsure at all n locations
cttggatctaaatgtcaccgaagaggtattgaagcaatttttcttgccattaggagaaaangtgtgtgtcaggattcctgccaccaaaggatgcggttatgtccagttcgcgaacaggaattttgctaagaagccatacggaggatgcaggggcaaatgattggtcaacaagttgtccaaattacttggggtaggatcccaacagcaaatcaggacctacctggtagctggggcgcacaaatagatcctattcagtggaatgcttattac

SEQ ID NO: 254626 - DNA, 277 bp, Gossypium hirsutum
aaagaaaagactcttccttttttcctttctttcctgtccaagttttttgagttgtaggccaagatgaatgctaccatgtttaaggttttgatgatgttgggttttttgggcaccgattggatgggtcaaggaccaacaggaccaggcccaatattccctcccatgtttacaccttcggcaggtggttcttcaaccccgaccccaaacccaagcccaaccccaacctcaatcttaaccccaaccccattcccattcccattctctactccaaacccat

SEQ ID NO: 254627 - DNA, 268 bp, Gossypium hirsutum
gcttttctttatattctctttccaatgaggtgcagatgggttagacgcaggccagaggagatccaaacctcttccttctgtttttttctcttcctctttttctgggttttaagctctaaattactaaagggaaagaatggatcatctcgcccatgtttctaaccaaccaaattctcagccccaatctcaaatttctcatttggctctcgacattgggaggtctttgatcaaattggtgtatttttgtagatatgatgatagatgtaga

SEQ ID NO: 254628 - DNA, 226 bp, Gossypium hirsutum
ctcatgtatgtatacagactcaggtaaatggctgaacttctgcctccgatctgtgatgggaaaagccggagcgagttctgaaggtaaatggtagccttagctgcgggacatttagagagaatgtgcattgtttcgacctgtatttagctaacaggtattgtgtttttaggagctcaagattcgaggtcttcatagcgttgtagctttgcaactgctcgcattggtt

SEQ ID NO: 254629 - DNA, 260 bp, Gossypium hirsutum
gtttttggaggtttaaccggggccgcccctgaccttaagttaattattttgcggcggaaaggaattaggatttaatttttaggccccgtaagaaggtaatgggggggaattaataacctccaatcccgaggtttatattataaatagaaccaggtttgttcataggaggcaaaccattgcagcctctcaaagatccaatcttttaatatttaaacaaacaagagggcttagatttttctccactagctcaaatgggcact

SEQ ID NO: 254630 - DNA, 423 bp, Gossypium hirsutum
cggattccccaccatcgtcaatgtcagccagtgtagcagtagttgcattagcacttgtactagtttcaattcttccagtattctaacctctttgagtagatgtgggtcacttttagggatttcctattaccttcgatctatctcctttttctttttatgttatagttcccggtctccttatgctgtaacaagtgttggagcgaaggaattttccaagttcttctctatctgactaccaagcagttgattatgcaagaggtgcttagcttatacttaaagtaagtactatattgatctttcttctttctagcagtctcaatgaagtagtcccttattaggctctcagtgtaaacctagtctcatgctttgagatgaagctttccgacgagtcaggttgaaagaaagccatatgagtcaagggct

SEQ ID NO: 254631 - DNA, 444 bp, Gossypium hirsutum
  unsure (1)..(444): unsure at all n locations
ttcgtttttaggggttcaggttctctcaccaacacaccatcatctctgcatcatctatcttaaaaggcttttaaggtttgggttattttagatggtcggtcatggagccaaagttcactgaattctctgattacataaacggctttagtgttgaagatttagatgatacatttcagctcaattctggtcagtactcaaatggcacaatcggattcgagttcaatgacccttctccagatcttaacgttttgaacatgaatgttgctgttgcaccttctgaaccagaccctgttacttttgttcaaccgctcactgtaagtacagatgggagctcgatttctacgtccacagnggtggagtccgggaaggggagtcttttgtcacccgtcggatgacaatgattcaacggatccagttctcaagtacataactcagatgcttatg

SEQ ID NO: 254632 - DNA, 309 bp, Gossypium hirsutum
ctctggaacctgaactggctccacagaaaggattattgattgagaaaacatggggagggacaagcataagcctggccataaggcactgttttcacatctagctcatggtggctatgcacactctcctggaccatattcaccgggtgtagcgtaccctcaagaaggctattcaccagctggctacccttctcaaggaggatgccccactcacggctctccaccatttggcatatccgggggcatccgagtcaggtcacaattacatgggagcgctacttgcatgtggtgcaccagctgccgaactttcta

SEQ ID NO: 254633 - DNA, 438 bp, Gossypium hirsutum
  unsure (1)..(438): unsure at all n locations
cacaattttgcttatttctattttcaccttcttcttcactctttttaatttcttttcatctccaaggtctatcactaattttcaagcatccagtcaaggtaattttctttcatttgcttcattcatgactatacaatgattgttttttattatcagctactgttatagcagctagctttgtaagatagtcaaggtaataagatctgaagcaatggtttcctctagtgattatcaacagttttagatttcaagactggatgatcagcagacataatctactatagttagaaattaattccaaaagagctacccggaagcaatataatgttgaaataccaaaatgttgaacattntacctcttaatattctgttgcacacttgaatgtaaaaaaatcttttcttattttcactcttctaattttaaaaaaaattaccact

SEQ ID NO: 254634 - DNA, 420 bp, Gossypium hirsutum
attttccggcggcttatcagcgttacaatcgctactggaagaagtcgacgacgatgcctctgaaatgggttttcttttggcagcccaatgcaggatcaaccgtgaacagccaaatcctaaacgaagtttcgcaatgcgtcgagagcatcaatggcgtcaaagaaggtcgttggaaagccactctcactttttataaacccatgttacgagatcaaacgttatccgccgagttcccgcgtgaattcatcgggatttcgcttccagaacaaccaaacaagtactatttcgtgcttcggttcaataagattgtcctggaatctgattcttctattcagttgataatggagaaattgcagtcttataaatccagggttcgcccttaatttcgaggggtttcaataccaactaggcgacttccaa

SEQ ID NO: 254635 - DNA, 200 bp, Gossypium hirsutum
atggaaataccattactttaaccgtattttaactaattccgggaatcggaggcggggcacggccctttttttggacaccaaaggccggttttgggccggccgatccgggggagagacattgagggggggggggttggtttggcgcgacatatgtgtaaagagatagcacgggtgctcagaggtgcgctaagcgagcacag

SEQ ID NO: 254636 - DNA, 351 bp, Gossypium hirsutum
taagcatttaattcttttacatatatttgttacttttctctattgggaacgggggaaggataggcaacaattggggaaattcaagtcttgtacagctgtggtttgtttgttcttagttttttttttcttcttcttgtgaattgggtgttttgggggatcggtaaggaaaattctaacatgcccatttcatgattgtggtttgattttctggttatataggaaaatttaggcctgggggtgtttaaagttgtttttgttgctggggttttttttttttgcgctggttaatggttcttttggattatgcagggttgagaaaattcttggtggggggaaattattttttttttt

SEQ ID NO: 254637 - DNA, 306 bp, Gossypium hirsutum
  unsure (1)..(306): unsure at all n locations
gaaagtcgtttctctacgaccaaaatcacctttcagattctctcggtctgtgcctgtcttcttatttgctcttanatgcttttgggggcaaacgaaaaaaaaagggtattatctcttcttcttgattgattgatttttcattgataatctcatcaacaagaagaagaatctgctcaaaagaataataacaagaaacacaggagagaagagaagagaggataattttttttttacttttattttttgagaggcaaaaaaaccccaacaatattcccatggatttgacttcaacaacgacgacgacga

SEQ ID NO: 254638 - DNA, 386 bp, Gossypium hirsutum
ctttcatcattgaccttgttgtctttcatgggaacttgactttcaaaccggggtgcggtctttgtcgtggggtgaaccttaactttatacatcctctgtttatcctactgtgcgagctacaattacctcatcaccaggggaaccaaactatgattgctttgtggacaaccgtcaataacatctaccgctctgaaaattcaccctgttcccatctctcttctcgtcatacctcttccctctgtaccggaactttccttactagtattcctcaaatgtaccacaccggtaggggttttaattcgtcggcgtaaaaccgcttcaacgtcaaagacccatggtcacacattggtcgtctccaatttcatcctttcaattcatctggattg

SEQ ID NO: 254639 - DNA, 397 bp, Gossypium hirsutum
gcgatttctaactcctgtcctgcatattattgcttattggttcggggaacatggaatggcacaagcagaggagctgtcccattgagcactttggatcgaatgaaaatttccaccaagttatctgaattcaccacggtgttcaccacccctatcagcaaacaccagtttgattcactaatccctctagaatatttactttgctattccggtttcgagcgtttgagatcgatgcttataaaaggactatgcagttgtaatgtgagctgatttgtttgcttttaggtgtaggtcaaacaggagtattgtatccttttagttcactaatcattagttcattaaatctgaaaaaaggagaattggcttggcttttgattcttttggcattttccttttctat

SEQ ID NO: 254640 - DNA, 231 bp, Gossypium hirsutum
ttccattgtatgatgaagcctgagaaagtaccctatatgaacattttgaaggctgggttgtggtgctagaatgtgttttcttaaaattttctttatcaacttcaattgaactattactgtttgagctaatctttagaatcccatttggggatttgatttcaactattcaatgtcataagaaaactttgtttgctgcataaaaaaaaaaagacttcttataaagaatatatt

SEQ ID NO: 254641 - DNA, 169 bp, Gossypium hirsutum
ccggttccggattcccggggggggccacgccctccgcagaggacattacccttggtttttctaaaatttaaaacaccaaatttaggaaaaggggaggatggatataaattaaacccttccaagtccagggtattttgtgcttttgcaggagccaacccagtagggaagg

SEQ ID NO: 254642 - DNA, 350 bp, Gossypium hirsutum
  unsure (1)..(350): unsure at all n locations
tttgacggttagtgagagaattggtgatgcttgtgtttcatngggggcaggggacaatgaaggctgagtcgctttctttatttacttgtgggacccgaaaacaaggggaacttcttatgtgtatgactccttctttagaccatatggtgcaaagcatgaaaatggaattgactgtaacttgttggaactaaggactagagctggtgatatggcagttctttactggcaaagaggtgctagctacggccagacaagagtttttgagatcctgcaatatggtggtgcacagtcaaccccaagacctcaccatgctaagaattctcaagcacaagttggtagggctcgccaac

SEQ ID NO: 254643 - DNA, 154 bp, Gossypium hirsutum
cttccacaggcccatttttcatgtcatccaaatcgcacttcatcggggagggggagagttaaagagaaagcttattttccactctgctaaagtatacacgaacatggtggattttatgctggagatctctggcgagcttacaaacattggtaat

SEQ ID NO: 254644 - DNA, 197 bp, Gossypium hirsutum
cttttggccaatcaattttctaagcaaatataactaacgacatttaggtgggtggggaattccaagccaaggactaccataatccttcaccaactccattaattaacggtgaggacttgtcaaaattctcattctatagggcttcaataatcgtctttattgccaccctcattatttttatacatcactgtttttac

SEQ ID NO: 254645 - DNA, 199 bp, Gossypium hirsutum
cgctacttccgtcctaattttcaggaaaaaatcgccgccttgaggggaaggtcaacccactgtctgcgatcgtataaactcgtaacccaatcttttaaatatggatcgacccagattcgtaatccactccgtagaagtctatcatttggccaaacattcaggcaggacggttctcaaactcctttcttttttgggaaaa

SEQ ID NO: 254646 - DNA, 300 bp, Gossypium hirsutum
agctgatgattaattatacaaataataagaagaggcactctaatgggagggggtatgagaaggaaagatattaccatcttggcaattcaaaatctaaactcccagatgctggtgctttttttttttcctgcactggatgtgaaagaatgagccatttacttttggtgtaacaactgttgcatttctggatatttgcagacttaggtatctttccttctttaaaggatctttctaaaagaaaaaacaacttgtgtcatagcatttatcaccagaaatcaccttaaggagaaaattctaaac

SEQ ID NO: 254647 - DNA, 367 bp, Gossypium hirsutum
  unsure (1)..(367): unsure at all n locations
cttattgtttcttcctcttttatatgntctgtcgctccggtttctttccgggctgggtagaagccagttggaatattatcttcaattacctccatcttggggaaccgacttcttaaccgcacctccactcgcaccccttctgttgtaatgtacacttcttcacctaccaggagtcctcacgcgatggcatacgacaagaacctggatgatcaggtccatgcgactgtggttcctgatgatgggattcagcctcaatcttgcatgtactgggcttctgacccgggggcaggggtatttggtcccgttactgaacaacttaacgcatcttgggtgtggggagcaagtcacccattccagtgttgcaaac

SEQ ID NO: 254648 - DNA, 378 bp, Gossypium hirsutum
tgggtgttctttttttcagtagtgtacgttaagtcaaccaaagtcgctgggttagggaactcggaagctaaaatatactgatcttttttttctcccccctcccccttcactttgttgaaaaaccaaacaaaggaatcaatcatagcttgcaggtgatcaattttgttcctttgatttttcttttagctgattgaacgcaggcatccagccgcccaactccttcatacagtgagaatcagatcatcatgatcgcttcagcagcttccctatctgcgtgtattgctatcaccagcaccaatgaagagctctttatcgggctcgacaaattgactaggggttcttctctaccgtgcaatgttatcgaagtaaatccttaca

SEQ ID NO: 254649 - DNA, 392 bp, Gossypium hirsutum
ctttctctgatatcttcattctttagctttgcttttctttctcatggcgcgggggtagacgacgctgagttttggcttccacctcagtttttaaccgacgacgacttgggcatcgacaatagtaaggctaagagcaatcccaagtatgttgatggtggttttggattagagcttgacagttctaagtctttgtttccctacgagttcccttatgggtttgggtctttgggtttctcttcggatccaagttctccggctgagtcagtggtgggttctactgagacagagagtgacgaagaagattatctttgtggggtaactcgtcaaatggctcactctaccctcgaagacggtatttgcagaaacgttcgtgcctttgcttctgaaaaacc

SEQ ID NO: 254650 - DNA, 135 bp, Gossypium hirsutum
  unsure (1)..(135): unsure at all n locations
gcccggttccggggtgggcgggtggccgcccgcagtcggtgtctcatttctcgatccaaagtttgcaaattcctctccntggggtggtgtttaccacttagggtcaaaaggtttgcaggccaaactacccggaac

SEQ ID NO: 254651 - DNA, 280 bp, Gossypium hirsutum
atgtggaattcatggtgtttccttgccacccttaaatgggggtgagggaaaaatagggctaaaacccaaacttttttttttttttggtccctatccattgtagtatatacattatatgaatatatgagcaaaattggtcttattatatgaaattttaaatgaaccctgtgataccaaaatctaggaaaccaaattttctgaaggtgaaccaactgtgaacaattataaaactcatctttaataccaaaccttaaggatttcaatattgattctttgttaa

SEQ ID NO: 254652 - DNA, 413 bp, Gossypium hirsutum
aaaaaagagaaaaaaaaaagaaaattgagagccttctccactttttagctttaggggtaagcaaaaaatcctgcaaaagaaggggaagattcctatttctttctccttttttggggtgcataatgacagggttttggtttcactagttttggctgcctcgctttccaatcataggcgggtttctttatttctttctttctttcactttagtttcgatgcttttccttttctatttatcaaagtagtaaatttgggtaagtttttctttttccagaaagcattttggtgaaattaaagttacaggctttgattcatgaatctttcttggcaaagcatgggtgtggtctgagatatttgagggctagtttggcctaatgcgcttatgtttaatgggcctttttttctgccttttc

SEQ ID NO: 254653 - DNA, 433 bp, Gossypium hirsutum
ccgggatgccggggcgcgccacacgtacgcttgcaatctttagagagatcgaccacaatttatgacttgaatggttcacaggggatcgggcttattctggggcgggggggaaaacgcttataatatcaaagccggacttgtaactcccaaagacaccagcagggatccaattttcattaaaatcaagggaacgctggagataccctcaaggagcccgagccaggacagcacccaacttggagtacgtgttgccagtcgacggaacaaattcttcaggtgacagacgagcctgaggctggaagacgcagataatatcacttcctccaaaagcaaaggggggggatccatcacccttctgaagattgtgaccttcctcggcaggaatcttaactgaagaaacctggggcattccaaagggcaggacaaaaacctt

SEQ ID NO: 254654 - DNA, 382 bp, Gossypium hirsutum
cgcatacagaatttaaaattttcaaaaaggaatttctaaaaggtgatcttctttagttgtaattattctcttatttttatttatttttccagcaattatctttatcattttgcatgtaaaaacaaaaagaaagtcaaatcttaccttgcgaatcggctttggcctttgttcacttcgttgagattgaaattgaaaggagaatccaaaagcattatccatcaagcctcgagatggcgccaatgagatccctaatatctctaaaatactgagataaggacgagggtcagaggctgttgaatgtgttggttttcaaccttgtttttttttttctctttgagcaaatgatttgagatttgagatattttttttaaaaataaaataa

SEQ ID NO: 254655 - DNA, 235 bp, Gossypium hirsutum
  unsure (1)..(235): unsure at all n locations
cagtaccgnnccgaaatcccggatggacggcacgagccacgcgttcggtaatcgctaatcaggtgtgcgattaccgttcaaggttcttgatgtgagggcttggaatagcaatagtgaccggtgggatgtaaatattgtagaccgttaaaactatccttctcctaagataacacctacaaggttgctattttgtggaggattaaccttttgggccctgggctttgatgaacccaaa

SEQ ID NO: 254656 - DNA, 427 bp, Gossypium hirsutum
caggttactatttttagtagtactagaacagtgtttcgtacacgtttctctgcttcttcaacccttctccatgttactttcttactattggcgttggctttgctctgtctttgaacatccttttctctctctctctgtgaatattcaaagcatcaaaggaataagtgtaaagggtatttgtttacctacatggatgagtatggtggtaaaagaggtgccggtgggcttggaaagggatcaggtctggctttggacgatcatgttaataacagagaacgaaacgctcggttttgcaatcgaaatggatgtggtgccaggctaaactccatgaatgatactcctaacggctgctcaagaaatggagagggaataattgggagttcatctaaagtcaaccctactgttagtaacaatagaaaatactcta

SEQ ID NO: 254657 - DNA, 395 bp, Gossypium hirsutum
cgcatacagaatttaaaattttcaaaactaggtttactaagggagactatctttaaatgggattaggctcttaatgggcgttgagtgttgcaaacagttatccttattaaaaggtgtagaaaaacaaacagaacgtcaaattttaccttgcgaatcggctttagccttagttcacttggttgactttgaaactggaaggaggattcaatggctttattcatccagccttaatatggctccaaatagactcctaatatccataaaatacttgcataagggcaaaggtcataggctagagaatgtggtggtttttaaccctgtttttttttttttttttcaccaaaatgatttaagattttggaacttttttttttaaaataaaaaaaatttgggta

SEQ ID NO: 254658 - DNA, 218 bp, Gossypium hirsutum
tcggttattatgagtacctaatcaaagggtggtttcagttccgggttactcaggatggtaacttaacttattttcatgacatggttgaggaaccaatggggggagttaaacccatgcttgttcaaaaatcaatcccaagggaattggttttgtggggggaattcccgtttggccccaagggttccttagatccaaaaagggacacccgggatgttttt

SEQ ID NO: 254659 - DNA, 169 bp, Gossypium hirsutum
tttaaaataatatttacaacaatatttggggcgtggaacctttggaggagggatctataaaccaacttaccgcttacacctttcctgtccatacccttaggcatacctttatttatacctccttttttaacacaaactctactcccctttttaaagatcattcaatttg

SEQ ID NO: 254660 - DNA, 127 bp, Gossypium hirsutum
ctcctttcaaatactaattcttgactccttctcccatgaggccttctaatcgcttccgggttttttgtctactggggctaccttgcacaccaaatgaattttggtcttaactcggaacaaccaactt

SEQ ID NO: 254661 - DNA, 166 bp, Gossypium hirsutum
tcgggcccacccctccggtttggttgaaaccaaaggggattccccgggggttccaggggtcttctagggtttaaaactctttttgggtggctgttaaaagatggtggttgccctcatcttttttttttcttggaaacaaacacttgttgttgccgctgttattcac

SEQ ID NO: 254662 - DNA, 299 bp, Gossypium hirsutum
actgctttcagttcttggctgatgactagatctccatcagggctatctctcgctcgagggtatattctatacgggctttacatgagcacaccaaatgaatatcgagctcaactggcaacaggcgccttttgttgtttgctctgatctgcacattacgaaccgtgggagattgaggtatatttcacaaaagattctctttcggcattggacttgtcctgtttttcacgagtcaggttatatgagaagaatatacgatgagataatgctgctatactcgaagaagcgggctcaaaaattaa

SEQ ID NO: 254663 - DNA, 254 bp, Gossypium hirsutum
ggttaatctgaagcggggtgcgttattggggggggggtactcatatcactcatatccaacccaatcttgtacaaatgtgcaagcaagctcaatctggcttttgctcatcaacaccgagctggaattcaaaacattaactcccgccctgaactcctctcatttgcaggtggatcgccctgcttgtcgtttgtgggcaaagtgtctgggttgttacaccattacccagtatatagccgagcgcttatcgaacggtg

SEQ ID NO: 254664 - DNA, 215 bp, Gossypium hirsutum
cttttattttttttcaatcaaatcactgtgtatcttttctatctctttctgtgggtacctgtgatattttgagctgtgatttttctaatccataaaattacaacaaaaggaatgctttttatacattcatacagaaaatgaatatacacccaaagtatctacatatctgctctatctgaattttaacttctgtcatctttcaacttacttgggtg

SEQ ID NO: 254665 - DNA, 117 bp, Gossypium hirsutum
attctatcgaatccttcgattctttctcgaagcttggatgctcagattaagccaactgtagagtttttatcccaatttttgaaacctgataaaatcccggtggctattaaaccatca

SEQ ID NO: 254666 - DNA, 179 bp, Gossypium hirsutum
acgctatgctttctgttccttttcgtttgtagatacgtaattttaacacctggagaagtgtatcccgattatgaaaaattcctaaactccccgcctgtataagccaatcatctccatggcactgcctttgaacctaagttaatttgttcaaccaatttttttcccattcattgaccaac

SEQ ID NO: 254667 - DNA, 189 bp, Gossypium hirsutum
ctaggaagacttcttttttagggtttttggccaaaaattttagggttcacttaccatgggttattgtttgatattttccatttttcgtgggcacatttggtctttattctataaaaacgtacttttgatggggatggggaggtactcgctcgataggtttctttcccattgtgtcttggggcgaaaaat

SEQ ID NO: 254668 - DNA, 323 bp, Gossypium hirsutum
cttttatttgcttatttctttgaaagggtcaaaccttttttatgtttttggtcccaatttcgaagacctaattttggggggttttgattgtgtagtgggaggaaagaaaagttttcacaaaatggggtcttatagaatgctctccacaaagattgtggagactcaaatgcccatcatgggtcacatacaccaattgatccgcggggcgcaaaatgctgtgtcactcgctcacggagtgggttactgggaaccacccccacacgcgtttgatatggttaaagcactcgtagaggagtcttcagatagatgttatggggctcatg

SEQ ID NO: 254669 - DNA, 354 bp, Gossypium hirsutum
ctttgcgtttgcaccgtcttttgattcttcgtttctcatgttttttgttttgttgcattaattattctcctttttcttaatttattttcatcgattgatttttatatttatttcttacattttatttcttgaggggggtttcttgtgagcttatacaagaactaacaatgcaagcaactgaagctgttagcaatggagtttcaaatggttcttctcaggcaaattctcctgttccggaacccttagataacaagcctccaaggcccgaaacaagtgggcggcactctgatctttcacttcaaataccacctaaaccaataggatttggtcgtcatagtggaaagggtttacttc

SEQ ID NO: 254670 - DNA, 345 bp, Gossypium hirsutum
acgaaaaatagcatccatcgatagcgttacatcttattctccatactcctatcaggtattgggtgttcatacggatttcagttctcattgttctcatcgctatcctccaatacttcatatccaacctcatgcgctcctttcaagttccttatcctaagatctacaaaaaaagtcaacttaactttattactctgatttctcaaggtgctgcaaattttatccctcccaaatcttttagatctccgatgttttatatcatcaatcactaaattatattatctgttttcctcaatggccatactcaaaatgctcaaacacaaaatttctcttaccctaacatggctt

SEQ ID NO: 254671 - DNA, 431 bp, Gossypium hirsutum
cactcacccaacttgctgggatctaactagccggaaccactccataacttaagggatgggaaaccgttggttcagggggtgtaaggcaatatacctttcaactcctaaagctcgctcatacacacattacattcacttgtctagctcttaacatatatctattcaataacctgggggcttattaatttctttactacaaaacttctaattgggtggctttcaacatcccttctattcaaatatacaatgtaatcatccactgtgcacacaacattcctttttctaccttataagctaacctggcttcaaaacgtaatttattacttaccaactcctggtttcggcacttagattagttatgtctacaaaaagaaatcatcccaaggaggcatcccataccattgttacctcacctaaaaaagataaccttt

SEQ ID NO: 254672 - DNA, 329 bp, Gossypium hirsutum
agcagctatcaaagctttgggatccttccgcagcacccccaccaactaaaaaaatcagcccaagtgctttggcttccctttactttttttttattttccccaattggtcggttggggggatggaaaggttattattaatggtgaatggtggtgaccctttcctttttaacaattttcctctattaaaaaatattaaacccttggtggtaggctttggcttctctcatgtatcactgttttttaacatggggggcagggtaaatctctttaagaatttagataatggattccttagggtcgtttcttaaaaaaaaaaaaatttattataa

SEQ ID NO: 254673 - DNA, 412 bp, Gossypium hirsutum
ttttatagcagcatatctattattaatttttttataaaaccaaaaaatcaaataagaatgcgtaggataattgcgtgggtggttcctttttatataatttttatatcacaaattttttattaaaaaattttttaaattaatctactttagatgtaacttattttttgtttaaataaagcttctcgcaatgttaagaacataatataatgtttaatgcttacaaaattgtcaaatataatattttttctatggaggttaatttaaggcagctcattgcggatttttaatttttattgagaagtcttcctttactagttctacgttttcttatgaattaacatctttttgttcatcgatcttcttattttgatctaacccgactattaaaaaacttaaatttttaattgccatt

SEQ ID NO: 254674 - DNA, 344 bp, Gossypium hirsutum
attatgtatctcttttcaaccatttgagaatttttaaggcatttaatgaactaggccgactttctagcttgtatggggagcatctggcgttgaaacacaaagacttagttataatttaccaagacttgtttaaacacatgtgaaattcttcactgctatatttccttcaatactgggggggataatagtacactttacaaacagctgttaatattacatgctgggaatataactaaaccgataggcatggtgataagagattctagatagccacttgtattacctgggaatggaacatcatgcggttgtatagtacaatagtggacacgcatcacagccatatt

SEQ ID NO: 254675 - DNA, 420 bp, Gossypium hirsutum
ggatgctagagagatattttgcagattctataatatttgtactctcatctgtattactcactcactctctttgttttgtcgccattaacaaagcagcaacaatgagtccatcttcttcgttaaccgccgcttcttcatcatcgtctctttggattctcaaaccttctcctgcttttaaatcctccagattccaatcaattcctccttcccttcctccgtcatctccgccgtgtttccgtctcctccgccgtgctgcatcccttccgcacgcttctgctactgattttgacttcgccttacatgatgctctcgaatcctctggaatcaacacctctcacgctagagaggcgaggaagggttttatttcgcaaattaatgaattatccgatgtcgagagagaaacaagtattagcataaata

SEQ ID NO: 254676 - DNA, 192 bp, Gossypium hirsutum
aatttttagagcagtacgtgtctggaggatgttctctgtatttgggcatgacagggtgcgggggggtcagatggaggccgtgaaaagaagcacacactaaagcgtgatgttcaatcccgcacttcatgctttacggatgtgaaaggccaaggctgttgtaacataacgacagaatgtaatcattctcaaaca

SEQ ID NO: 254677 - DNA, 387 bp, Gossypium hirsutum
  unsure (1)..(387): unsure at all n locations
ccggaacggaagggccgacccaccccacccgtacgatcaattttactcttatcttccatactttatttgtcttatcatctatnctctgggctgccgattatgctatgcgtggcaaaactaaactccccagatccttgatatagacatttgccatacacgaaaccaaatggtaaccatttattgagaagtaattcgcgctcatcatactatatattcatctttgcgacaccaatgaaacttgaatctacaacctgagcgaattatttgatactaccctctatccacatctcgaacattcgtttctagtgcatagatcatcattaatgtaccgcggacaatgatacagcatcaatttgtgggccgtgttagttaaaatcctcgacccaa

SEQ ID NO: 254678 - DNA, 302 bp, Gossypium hirsutum
atcaaaagcttaaaaaccctgaaagcctcgacctttccctagaaaaccaaacggcagaaaacgaactagagctgatcactgctatggttgtgatataaaccaaagcgggcctgttatgggtattgtgtgtagctaaacaaacaatggcggggagggcactagtggtagctgtatacaggaaaaggcgaagcttctggtctaaagagacgttgctctttaacttgagcggagcaatgtctactaccatgaaatcagttgtgggggacaaaggtcttgtgctcgtcttatgggtcaggatcctg

SEQ ID NO: 254679 - DNA, 387 bp, Gossypium hirsutum
attgaataataaatttccattatggcgttttgcaccgctctctggtcagaagcatacatggtttttaacagtggccgcagacaccacccataacgactgctaggttattgaggcgagtcctgtatgcagaggatgcggatgttgtatgttctgaagcgaatgcacgcgtacaaagactgtgcgagcgacactacttgcgaggagatagaaaatgcaaaattggatggacataacaagagggtttatgatattatttggatcggatgtgaaatgggctgattgcaactaaggatatttggaggacaggtaggattaattaccgattttgaatgagaaagaaccatttacttgtgccatctacttgatcaaacatgggtgaaaatccaa

SEQ ID NO: 254680 - DNA, 417 bp, Gossypium hirsutum
cggacacgtgggtgcattttatctttccttgctcttccccaacaaagcttacggtggactactactactagtgctactcaacaatggtgatgaatttatcttggagtttactatcatttactcctgtgatgatcacattcctcttcctctcaaccttcttaacattctcccatggagtttctgtttctctctctcccacacccctcgcacaacagctcacttcagggaaagtaaatggaagtgaggcaaagagtggggtggaactttcatgggggatcacaaggaggtctgtggtagaggtgccgatccgtcaacctctgccgccattggaggacactacttcatcccttgctttggctgctgaaaagacttacagaaaagatcctcttaatgggttcaagagatacacaagaggat

SEQ ID NO: 254681 - DNA, 424 bp, Gossypium hirsutum
ataaaaccctcactttcttctcctactaattcatccattgatatggatatgggcggggagtcactatttccggtgtgattatcatctaatgaatatatctctctttctaagaagccatctaaggtgaaccagattgtcaacttcatacatcacaccatgtgtgatcgacataaaatggggccacaactggattgtattgtcgcttgctcacttttattgatcattcattaggctacttgtcaacatgcttgcgtatgttaaaagataaacatccaacctgcacataaagaacggatgagaagaacagcttctaatacataccatatatgtatgtggtatcaggggactctatcattcatcttaaattctatgtcacaagcctataaaaaactgactatctgatcttatttcatcaaacttaacg

SEQ ID NO: 254682 - DNA, 395 bp, Gossypium hirsutum
gttctttttcaaaaaaattttaacacacaaaaattggttctaacaatcaaacacaattgtagagggatattaatatcagcctgaacacattttcaaggatcatccttttttgtttcaaattttttctgctaagggaaaatgtccttctatcaggttggctcgaccattacattaccaccatttacaaaaacaacatcatataccttctcacaaaatattacactattgaccaaacatttactttatgaatactactcaccacccgaattgtacttacaaacacatgactcaagaatgaccatcattaattttgagacataaattctgggtataacagtggcagatcttctggggaaatctactgtgatacctattgtaatgggcatacaaaagtg

SEQ ID NO: 254683 - DNA, 336 bp, Gossypium hirsutum
ctttgatgcaaatctttttcacattaactttacctccaatgaactctttcaggagcagttatcgtactgtaactatgtataaattaccataactccagttcataaacattatactcaacatcaattaaaaattaagcatggtatggcactcaagactccaacttacgatctcaccgccattaaaaactatggtatctttgacgttcttgataatccacctcatggggagtctatctctagcataaaaatcgttttaattaatacaataataactattataaaaataattagggttactaataatactggtaagtcatgcactttattcaataatgc

SEQ ID NO: 254684 - DNA, 348 bp, Gossypium hirsutum
attagttttttctcttctaccatttgagaattcttaatgaattctatttgttaggcggactttgcagataggcaagatatcaactggtgttagtgccctaggacgtaactctaatttaccgaacctcgctaaaactgttgtgctctctgttgatctattacactttcaacattggacgggattatgatgcatttatattgcgctattaaattactatagaagggctgttcctgagctcctatagactagcgtcatgagcacttcaatgaccgacacgtgtgtttctttttgatggaactgtttatcaaaaaacagcttcttacaagacatgcgtagaacacaagaagg

SEQ ID NO: 254685 - DNA, 427 bp, Gossypium hirsutum
cagatggcgaagaggctaggtgaagtggggttagaagatttgtacagagcaggcgggggaacgcataagcataaaggaagccacccacatgtaccaagccatagcagcaagcaaagcctctgaccctgacccaagacgggtgtggaaagaggtggtgagtaggaaagtcttaaagccatggcacccgcatcacctgcatgaggtggtctactattctgtctatgccaactgggatgtcttcatcaatggccctcctctttactggtttccttccctagatgagtccaaaattacaaacctgggacgaataatggagattcatggcccaaagcttttagggactttatacaaagaccctattgaaagttttagcctctttcagaaattatctggtcagcatcctgagacttactggtctatctgtctt

SEQ ID NO: 254686 - DNA, 424 bp, Gossypium hirsutum
cggaaacatccccaactgaataaatttacgcaaaacaaaaaagaaagaaaagggtgtgggattcatttccttttttcttctcatctctgacaggtaatcggaaaagacaaacagttcgaataaatagaaaatggcgttgaatttggcgcatcagattggttctctagccgggacacaaattgcagctgaagtcaccaccggagaacaatcatcctcagcgacggctgatgtgtcgggatttcggaaagttccattggcgaatctccgatgcaacgccccaggagaagctctgtcccctccaatgttaactccaccgttgacgccgcgaagcgcggcaaacaggtcggctatgatgagtctgtcgctgcgtccggatctgtccgccgctttccaggctttcgggacgttatcaccgctggagacg

SEQ ID NO: 254687 - DNA, 304 bp, Gossypium hirsutum
gttaattctccctgggaaactaaaattttatttttcctccaccacggtaactcgggggaccacactatatgttgtgaggagcaaataccccacaacccaattaacctgaccaaatcctcattactctttgcctgacgcttccgaaaccggaggaacctttatccccaaatctcctcagtaactttacacccaaccgcctagaaaccttccttgttgcaccgaactactgaaattgatcttctcatccccctaactgttacctgacatgatggtgtccttgcatgacttttgcacgaatttctga

SEQ ID NO: 254688 - DNA, 181 bp, Gossypium hirsutum
ctccctattaactctctcttcatctgcctttgatctgctctatatccctttttcgaggggatttagtggggtagggagaaaaagagtctctgtatataaagcgttagagacacatatattctgtaatcagtttatcttcattccctgaatgggtgtgaacacccccccaattttttttatt

SEQ ID NO: 254689 - DNA, 330 bp, Gossypium hirsutum
ccacgcgtacgtttttctttagagaaaatttattgaaaatatggttgtatgaattggagaggtccaaacccttttgtaaggtggctacctcctacatttttgaatcgacaaactcctgattgcttattaaattcccatgaggagacagaatattattaacgtcacaacactcgtgacgagattaatactaagactgtacttaaggttgttgaaaaccataatcttgccactacaaacaaccgactggttagccaaatatgccacactaggacccgcgcagcatacggaggagtcaaatgttgtggttgagagatttagaggtgataacat

SEQ ID NO: 254690 - DNA, 230 bp, Gossypium hirsutum
gagaaacggaaactgtcgtatctcttcgagacctaacacccactttaccggacctgacatcaaagtcgttcccaacactatggctccatataagagactagtcgctttattttcacaacgataaggtggctgtgccttgaaagctggtgtcgagaacttaatacggttcaagggccgggaatcttcataagatggcattaagacgcaggaaccttacaccacttgatact

SEQ ID NO: 254691 - DNA, 411 bp, Gossypium hirsutum
tttttctttagagaaaatttattgaaaatatggttgtatgaattggagagtccaaacccttttttaagttggctacctcctccatttttgaatcgacaaactcctgtttgcttcttaattttccatgatttgagagattttgatttacttttcaacacttttgaggagattaaataggaaattgcactaaatatggttaaaaaccataatcttaacactacaattaaaagacagaagagccaaaaaagaaaaacaagggtccgcgcagcaaacggaggcgccaaatttcgagggtgggttctttagaggaaagaacaatcaataaacagttggtgtggcgtctcgacgttgtgggggaattctctcttcttcttaaaattttccttgaattctctagtttaaaaggggaaa

SEQ ID NO: 254692 - DNA, 398 bp, Gossypium hirsutum
ctcaactcaactctgttcatcaaatcaaaaaccctaccttttcttttagttactaggaaagggtgatcagtttttttttttttctcacattggcttttgcccaatgcctaaatatcaatggtggagtccctttacctctccctctgcaacggtgcaaccttaatctataactagtagttaagcgtgtcattagttagtgttatcttggtgtgttgaactcgcaggcatggcggccttatcaaccagaggcctcgtttctcgtctccaccagcagttcctttccctatcaaggccatccgcagcagccccgacatccctcccttttcattccttaactagaagattattcagctctgatgccttgatggatggctcccagatcctccataaaccacccg

SEQ ID NO: 254693 - DNA, 200 bp, Gossypium hirsutum
acgcgcaagattgtatgtatcaccaaaatcaaagggttcccagacgataacacagaacggcgcatcccttctgtggcatcctaatatagacactgttgagcggctaatttgctgggaacaacaggccactaaacttggagcgatctctacgagggaccaaggtggtaggctcaggacagagagcgaaagcgggggaaccc

SEQ ID NO: 254694 - DNA, 196 bp, Gossypium hirsutum
cccagtcactagtggaagggttttgttttgtgtttcttgaacaatgcagagagaggggatattagaatggaggcgttcaacctatgctttataaacaacaaggcaattatagaggagaacatatttctggactatctcaagagctttaggttcttcccgcgaatcggggagtcatcttactaggcaaaaatacagt

SEQ ID NO: 254695 - DNA, 400 bp, Gossypium hirsutum
gaatacttcagggatcaagagttctcttctatatgtgaatcatgaaattagggaggctggttcatcgagtaaagaccgacccatagacattgaagatgggtttgtaagggctcctcatgcttcatcagatactgctgataattctacctcacttctggagaatactggtactagtggcagctctagtggttgtttaatttttgatgggcctgtggacttgcatgcagttttatgcagaaacagttcattaaatgcaaccttggtaggggaagaaaatgctgtggctgctctggttccatcatcttctcaagaacaaatgcaagaagccctgagagctggtcttcattctgaaagtagtcactctagtgattctgagaaacaagaaagcggtgcattgggt

SEQ ID NO: 254696 - DNA, 401 bp, Gossypium hirsutum
aaaaaattccctttttcaatttttgcccttacctctccctatagaatgaagaagcactagaacgatcatcttctccctcggttcactggtgttagctgtggcagtttacaaccactataaaggatataccattccttcaagaaaaacgaggcatctgaattgggtgacaatgataaacatgttgccaatgattttgttgagctggaaaagagcaatgtactgttaataggtcccactagttcaggaaaaacattacttgtagacactagcacgcattgtgaatgtaccatttgtcattgctgatgcaacaagtttaacacagatgacaatgcccagagatgctttacatcttggtggagtggaacatcgggagttatataatgcctatggatattactttc

SEQ ID NO: 254697 - DNA, 257 bp, Gossypium hirsutum
acgcggaagcgagggggaaagaaccaaacatctggcttattaactcaagagtggggcggggagacagagacagatcattatactactacccaaagcaagatacgctctgaaactggaagacagcagactatatgagggtgctacaagttttggcaggttccatgattctcaccgaacagctttcttgtacgcaccgtctctttgtctttggttagatgaggtctgatgcttcttcgcttaaaaaatcccacatattt

SEQ ID NO: 254698 - DNA, 379 bp, Gossypium hirsutum
aaaacaaccccttagaagacaacattaactactgtaatcccacttctttggaacctcaaagcaaaatctttgttttagttaatggctcaattcaccccacaaggacgtttgaagctgctctttcatggtgatggggtggaaccaaaggacccttttcattacaagcttgtcagcaatgtttttggtggttctggtgggctaaaatcacttcaaactcataagggcatgctcagattccttggttctactactagaagaagccacttttcttcttctttgaagaaaggcagcaaatttaatgccacggcaagcctgaatgtgagtgatgaaggactttatgatgaagaggattatgatagtgagtttgggactgatgagt

SEQ ID NO: 254699 - DNA, 224 bp, Gossypium hirsutum
gagaattttacttctttgatccaatgttagtacttatatccaaagagaggaatggggtagcgccgcctatgtaccattgaagatggcgaacatatgtctaaagatgggcgctttgaaagtgttgcttcacttgcattcagggagtaaggtgtgctccctttcgatgaatgcgaacaacgtgccgtgggaataccaatttatgctttacaggggatacacgagtt

SEQ ID NO: 254700 - DNA, 391 bp, Gossypium hirsutum
attttcatcgaatggctgctcttatcccattttcttctgaagactagtaccctcatttcaaaatcataaacgaaatttccatggcaatatataacgtttaaacttcaatccaggcaaagagagagagagagaatcacatggaagaaggcctttctccaccgttacaccctctctctcagtttctttagctttcttttttaaactccctctatttatataaacctttcaataatctaagagcaaaatttctgtgctgggtttcgaatttggtgatctgggtttttgttctttctgtgctagagacagagagagaggggtaggggagagtgatggaagaagggagatttctgcagtggggtgttttcagatctcttcttgcgattctccaatg

SEQ ID NO: 254701 - DNA, 373 bp, Gossypium hirsutum
atgcatttcaagagcaggggagactatctggaaagaaagcttatttcttggcttgcccacattatctatcacttcttaacaaaggataaaacgaagtcattacattacctaaactcgtgggtgaggcttctaattaaccacctacagatagatatgttatcaactcaccagcagatcagaagctgattagatagactcaatcaaacagacgtaagtggactgttgcacatatcttccactagagagaagagaccgcctagttgatagattggaagcccaaatatttatttaaagctggactcaaagaaagaccgctttggaacaaatgaaaatagatcgactgaagatatacgagtatgggcagccttatttt

SEQ ID NO: 254702 - DNA, 385 bp, Gossypium hirsutum
acgcaaaccttaccttatatagggttagggttttgctccttctgtgttcatctgtctggaccaaaaaggttttagcttttaacttggagcgagaccatgttggtttaccaggatctcatctacggtgacgagcttcttttttgctcattcccctacaaggaaatcaacaatgggatgctgagggaacgcctggggatgcgggtccttagacacaacccccttacatgatgatgaacatgatgcatccgcctgagaggcatgctacgactatggtgccgccacaacaagggtggggtgtggtaccatctcaacaacattcagcgggtcaacctggtaacgcatatgagggtcggactttgtggatcggagatttgcagtattatat

SEQ ID NO: 254703 - DNA, 253 bp, Gossypium hirsutum
ctaagatattactgcaaggaaaaaaaaaaaaaaccagacatgttttacaacactgcggcatccgctgatcttgttattacctttaacttgctgtacttaactttggaaagctatacctacgtgccttggccaccaccaccaacagaggcacaaggcctctctacaagagcccaccctcggtacctaaacagtcagccactttttccaaagatacactgaatatagaagcctttgcagaattgaagagctaaat

SEQ ID NO: 254704 - DNA, 257 bp, Gossypium hirsutum
caaaatccaaactctactatccttaatattatggtcagacaagatgggagatgagggatcggggatggctatgcttgtgctgatgatgcacaatcaatgatcagggatatgacaagcctattaatagggctacaatgaacaccatactggcctgacaacgtctagtttgagaacagacgaccaatttaatgtcatatgctagaagaggaccgctgaggatggagatgcctacaacggtgctctacagaaagataggc

SEQ ID NO: 254705 - DNA, 352 bp, Gossypium hirsutum
ataaaaaagaataaatacttctgcttggatgggtagagcgcacaccttcctctaatgatgcacctatggacggcactcaccgtcctctccgatctgactaaagtggcaggtcatgtgactgtgaggctcctcacatttgtataaatatagcgcccaaggcttatgatgtgccagcggagacatggaacccttgaccggcaaaacggttgaaggtcggttttttctgagagggcgttcgccttctgaaccaagggcgctttgtgtatcgagcatttagactttcaggatgccatacatgaagtgtgacgccatgtgacggcggagatgagcttattagtgcctgcaagcctgc

SEQ ID NO: 254706 - DNA, 239 bp, Gossypium hirsutum
  unsure (1)..(239): unsure at all n locations
cgaaaanagccccaaagcccaaccccnncccccanngaaannngaanaaaggaaaggggagggggcnggcnnncgcgaaacagaaaagacggcggcncgccaagaaagagacgcgaancccnanggggggccnngaagccgccggcaagacnaccancnngnanaagcccaagcacggggagaagggcacaaccaancccaccaaaggcgnnaacggggagaccggagaananaagaac

SEQ ID NO: 254707 - DNA, 120 bp, Gossypium hirsutum
acgttacttgtacttgtgttagtcagagcctaatagacgaatgatgactctgctggggaacgagcagcgagagctactataggtagtcattgtaaaatacatgaaccgaaacgcggatga

SEQ ID NO: 254708 - DNA, 149 bp, Gossypium hirsutum
aaaatcgctaaagcgagatggctttgcagttatgggaaactgtgaaggagggggggacggcgtatacgggtctatttccggccactttttttacggtgccagctctgttatgggctggttactatttattaaaggggggattttggtta

SEQ ID NO: 254709 - DNA, 167 bp, Gossypium hirsutum
gggcggcggcacgcgcccgctaacatattacgtggggggaaaataactccaaccagacatggcttccaggctggggcatccggtgcggtgcttcttacctttaactatgtaggcttcacttcgggtagctctacctacgggccttgcccacacagcgcctacgagcc

SEQ ID NO: 254710 - DNA, 389 bp, Gossypium hirsutum
gtagaagtacgcactctgatccttcattgcttagtgagatccaaaatcttgacctgtacaagtccgaacgtaatgaaacccaggaacacgtctttgctgagcttcctgcatgtacatctggatatcattcccaaggtgtattggcagatgagtttccacaccttgatataatcaacgacttgcttgatgaagaaaacaatgttgggagagcagttagggtaggaacagggttccgttctcttggcaactgttcacatttatttctaccggcaatttcttttccttccaatttgggcatgtcgggtgagatgggatcctcgaatggcgcatgcaggtttgaccgagcgcacaagttcaatgatgatggattccgacaagggtacagtact

SEQ ID NO: 254711 - DNA, 215 bp, Gossypium hirsutum
tcgggttgacatttgttcgagttatttggctataaaacccgtaaagcgcaagggagcttattggggggaattctttcgcggtacctcctcccaccaactttatttttttgagagggttcagtgggaaaatttctttttggacccccaaaagagggaaatttttctttgcggggcgaaacccaagggaaatcttggggggggccccaaagatattt

SEQ ID NO: 254712 - DNA, 312 bp, Gossypium hirsutum
tcgaattcgcgaagtatatggttatttctatagtgactatccttgtaaaggtgggagaggatcacacagatgttttgcatatactaaatgccatttatcataaaaatcattgagtatgcagactacctttctagaagatgttactgtctttgtgaaaatagttgattgagtgttgttatatatatcacactttgtggggattattccttagtcttttctattgtttttttaatatatacaacgttttaattgatttatttcttagagcttggaataatattttcgattggttttttaattttttaaatagtt

SEQ ID NO: 254713 - DNA, 117 bp, Gossypium hirsutum
acgcgtacgcgtggatctaattacaaagcttttagatgcaaattctctattaagaccctggccgcaaagagaagatgttaggctgtgagcaaataacgacagggaaaggcagtctat

SEQ ID NO: 254714 - DNA, 280 bp, Gossypium hirsutum
gttttcttattttcctttgtccatatcttacccttctctttgtccaaaaaggagggattctccgccattaatatgagattccgatcaacacctgtgcacaaattagccgcgacggtgatctcggcggttatcttcctttttctgatacacggcgcccactgcttcgaccttcctggtaccgctaccgagatcttccaaaagataggagaagagagaaaaatttcgttagctcctcattgcggctcaaatccacccatattggaccctgacaggggaggtg

SEQ ID NO: 254715 - DNA, 329 bp, Gossypium hirsutum
cgcaaatatcacttaaccatgagcactgtcgcctaagtcatcttcttcaaaggggttttaacatccgaggatggggagcccttttaaatacagaaagagtgctcctacccaccctagacagatgactctcctattaagaactctccctacaccatgggacacctatgaccatctatggcctctaagaccaataccctcttattctggtaactccaacatcaatctcgatgcattgagtagagtcattgccaaaccggacattgttaagacagcttaaaagcaaaggctgatgttacctccaaacaccctggctgtatatacacttaacc

SEQ ID NO: 254716 - DNA, 253 bp, Gossypium hirsutum
atcaaagactagatgaataatcctttgggtatagcgtccacagaaaaatggggtggtcacagaggaggaggggcctaattaactcggacgggaaaccattctaaattgatcaatcggggacgcaggaacatgctacaaggaagccttatagcatggacgaatgctctaataacagggtaccggtgtctaatggatcgagctagatcttacatagggtgagcgtatgctggatgaaacgcggaaaggctactaa

SEQ ID NO: 254717 - DNA, 366 bp, Gossypium hirsutum
aaaaatttataataatgtaaatatattcctttcacctaaatttattaagcggaaaaaaaaaaaacaggcatagatgtgttatgttagtctggtcgattccaagtctaagttttggtcgatttcaagtctaagttttgaattaaaatattttcaactcaaattcttttgaatattttggaaaacaaaaagaactttgaaacataaacaaatcattcaatgttgtactaatctaatccagcattttccacgtttaagcatagatattcctatatttaatgcttgtaatcctaaaattgtatattgaaagtgggagtcaactttttcttttagctttttggtatttccaatcccacgctactctaaaac

SEQ ID NO: 254718 - DNA, 391 bp, Gossypium hirsutum
agcacttttccatctttggtaccttttttcaaccttcattctcacctttgggggctcctttggttggtgctgtgaaaacaaccacactacacacactttttttttttatatccattcccaaaattcattccttttcggaaccataatcaaggtttccggaagttaacaacaccttttaattggttctctttggccccaccccaaaaaggaggaggcgggaggttccagaaatgggctcaactacaatttccactgagatattcctcctgttttgtctcttattctctccaggtcgaggtgtttcaaagaaggtcgatatatctagtgaacaaaaggacataacaactccaataacaacgatgccaacaataattccaaccacgactcctac

SEQ ID NO: 254719 - DNA, 357 bp, Gossypium hirsutum
tgttgattctttgtgcaatctgggtattaaagaaaaaggcccgtttcgtggggttatcagcttctgataggcaattcttgtatcgcttctctctccctatctcttctccagccttcattccatctccagctcattgaaaaaagcacgcgccggttcggagattgcttgtgcttcctattaagtgttcatcttcagggccgagtcaagacactgagtcacaagctggcacgacgtccgtgccatcctctccttctcttcctagctcattggcctcgagcaatcccacgtataattgccttgcttggatcggtgccacccagatcattcaaactgcttactcgacttacctcatgctct

SEQ ID NO: 254720 - DNA, 341 bp, Gossypium hirsutum
acgcctgcataaaaaattgactctcacaaagaaagtctcctggatttattcctctcaaggaggtccataattgggggggggaatcaaaccacacttaacccacaattcaagtctttctctccctttcaagagaccctttcttttactatccactattcccaagtctttaccagacaatggagctggggtttccgcttctgttgctgctgtcgaagacccagcattcaaccagattgaaaacgccgcggaagtctctgctgtgtctaacggagcggctttggccacatgggcttgatatgctgaggttttgagcaagtttgatgaccctaagtggattggag

SEQ ID NO: 254721 - DNA, 220 bp, Gossypium hirsutum
ctcatatcttacctggatggccccaacgctaggccgtatgcagacatgtgaggcctagagggatcaaataaaaaccaaaagaaaagtgtggtcctctgcaaatctaaaggcgaagaatgggattatcttgagcaccatattggaggacatgacgacattaatctgccatacagctatagtttgatcgaaggttggcccttgagtgacacgctctggaaaa

SEQ ID NO: 254722 - DNA, 334 bp, Gossypium hirsutum
agctttttcgcaatcctctgttgtcaatggtactgggttgagtcattatgaaggaggaaaatttcagttgctggtcaataacaatctggcaaggatgctagcattaccctcaacaaggttgcttctattgtttggagaatcattaccctcatctaggctacctaatgtgtctaggaaagtttggggccagaccagtgtacggtttgtgagtcaagttaatcctgataatggacctctcactctttccagccttggtttcaaaagtggctttgagaaaacaaacaagatcaaagcggataaaattgaaaggcttgatgttcctagtgaagcacct

SEQ ID NO: 254723 - DNA, 398 bp, Gossypium hirsutum
  unsure (1)..(398): unsure at all n locations
ttttcaaatccctaatcccctctgctaaatgccgattcatcttcaccatgggggactgttcgagcctgaaggaatcttagcccgaaatccctcctcaactccgatttcgacgaagaagggagaagaaatccatggcttgctcgcacggtaaggtcctttcctcttcactttatttgcttttgaaataaaataaaataaaaaaacaaaacaaaacaagagaataatcacaaaaagaaagcccgtagatttagatcggaaaatcaccttccgatattggttgtctttttgtattgcctattgtgcgtccaaaaaaatacaatgatcaaatgcttttgctttatagccgaaaatgatnganaataaataaataaaaatacaaaattctttcttttgcttcg

SEQ ID NO: 254724 - DNA, 370 bp, Gossypium hirsutum
gagagtcgtttgtctgatgctgagacagtagctaaatcatttcctcagtggtctgtttctttatctgtgatatgtccgaagcagctttcaaagctaaaagcaatctacagtgctggaaagagaaacccccgagcatcagatccacctgttgacaatgttagaaaccctcagtttcttgttctgatttcagaaaattttatggagggctgtgctgctttaagtcgctctggagttccaagtttagcacccaatcagagtcctgtgaaaatggacatggcttctgtcaatgcggttgcagggacacctccgacttctgttccatcagtgaatggatctattatgagccggcaacctgtttctgctgtaaatg

SEQ ID NO: 254725 - DNA, 296 bp, Gossypium hirsutum
ttcccccccatatctctcatcatcatcatcaaagttttcatatttcttcaaagtaatccctttttcttcatacaaaacccgccattttcaatgggtaattccaggttcaagttatcagacatgttccccaatgtctggttctacaatctcaaagacatgaacaaacccatacaccatgaaaaaaaacaccaccacccatcatcatcaaaacatgaataaccccattttaatcccagaaaatcctatcattttactagatagcttgttcctattcatgtttccccagatcaaccact

SEQ ID NO: 254726 - DNA, 359 bp, Gossypium hirsutum
acccttccgaaattaattaattacaaaatggttattagccgagaccaagatcgattctggattacaacttttgtcattccaaataaagggactataatcaaaacacccaaagagtttatatataaccaacatactctgcttttcaagaactcatatatcatagagttcttcctttttgccttttccgacccagcaaggcacatatacaacagggagaggctccatgtctctgctgtcctctcaccatcagattccaattaaaattatgctcatatagacaacaaaaaagagggctttggttttaaattaatattacaaataataaattggggcctatactctagatctacgctctcgaa

SEQ ID NO: 254727 - DNA, 308 bp, Gossypium hirsutum
ctaagtttatgcttacatattcttcgaaaccgtatccaacgaaactggggggtgtcacaggctgataacataaatgccggcctcactcacataaacctggtcaggtcgactgcaatccacaccttggatctcatcatcaacctttccgatttctataatcagaactaggagccgatgaaatccaccgttaccacggggatgcatgccgctaccactgccgctggtcccgcctacaggaaactcaaggttctacctgatcatcatatcgaatctcttgttaccagatttagtgaggggtccacacaaat

SEQ ID NO: 254728 - DNA, 178 bp, Gossypium hirsutum
ggagacgattatgaacataatagtagcagtgatgaaggaaggaaagaggtgggtgtttaccctttaagttgttactattttggatctaaagaagccatcgttttcatggttgtaacggtttcagctcggatttctaggacgaactttaagtattctgctaatcgaaagaggacgccgt

SEQ ID NO: 254729 - DNA, 234 bp, Gossypium hirsutum
aatgagctcactttttccttttccctctttcgagaccctacttttgggaagtgggtagtcttggatctaactaccaacaaattctttataaaatttcaacctcttttagagatctcactagactacctcctcaagctcataccaatttttgtatccgtatactcccataatcaaggccttttatcctcttcccgacccatcccccgtatttctaaccttctatccaacctatcc

SEQ ID NO: 254730 - DNA, 220 bp, Gossypium hirsutum
attcggggggcgaccacgcctgctctcaatttccccttcttcagagccgcattactcctttaaaaagcaacactgaatctctatattctgacacaaaattcctccaagaaaggacaacaggaagaaaaaaaagagagagagaaaaatacatcctttttaccctacgactccatatataagcaagttaaaataaatatttgttcgctcttgtccttacttt

SEQ ID NO: 254731 - DNA, 378 bp, Gossypium hirsutum
gttcgaagaaaaaaaacagccaaataagcttctttttttccttcacagatctcagatccaaaatccaaatctaagagtgtaagcaattacataaaatatattattataagagtaaaaagcaaagcaaaaatgtcaaggaggcaagtaagttccacacgccgctttgttgacagcggaaacttcccgttctctggtgctttacattctaaagcccgatcttctcctattttatctatcgctcttgtcgttgtgggagctatccttctcattggctatgcctatagtggttcaggtaaattccgaggtgaagcggttagtcggatcgaaggtgactatacatgcagtctagaagttcagagggcaataccatttttgaag

SEQ ID NO: 254732 - DNA, 267 bp, Gossypium hirsutum
agctttgttttgttttgctttgctttaacttgaaaaaattccaatggaaggaaaaaaaaggaacctcaaaacatttaattcaatttcccatcaacttaaagaaaaaccaagcccaactttcttgaaaaggaagcccttcaaccctaacaaacattggggcttccaaacctgttcatttgtttttgggcctcaagcatttgatattattgcaatttccacaattgttgaacaacctgattacatatgttaaaaattaaatgcattttt

SEQ ID NO: 254733 - DNA, 298 bp, Gossypium hirsutum
  unsure (1)..(298): unsure at all n locations
gggggggccaacccgcccccaagcagcaggccaaaaaccaaaagcaaagaagcaaaggcccacacncnggcagggaaaaaacaaaagcgaaaacccaaaaacccaaagagcagaacggagggaacgaaaacccagcaaagcgcagcccgacccagagagaagggaagagaagcagcccccgggccgacgaagaagcgacgaaaacaacaaacgcgacgcaaaagacacgcgcaagcgcggcaacggagaccgccaaggcgcagccggcaaagggaacaggaccgcacaggaaacagca

SEQ ID NO: 254734 - DNA, 328 bp, Gossypium hirsutum
tccttttttctgtaccaaatataattattaagaaaccggtttaattttacccgcggataaaaaaaggtttcgataattttatagaattaccatttaggaaaatcctgggagaggagaaagatggtatcctcacctgtcgtgaacacgtatccacttgtcaactacaccttctactccaaagtagcccgatatggataaagacacctcctttgccaatctccttgctctcttgaaagtcaatttttttaaataaggcatgaataccaattattaaaccatttttctggttctattacattatccttcctacattccttcttcttctaat

SEQ ID NO: 254735 - DNA, 321 bp, Gossypium hirsutum
ttcacatctagaactactgctatggcgatggaaacgtctgttgctgggaaggcatcactggaaggttgctgataggatcttatgctccaccaccacaccagcatcatcgtcgtcgtcgccggcgtcacctagggtggcaagtccttgaactatcccctctgtcgagcgggctctacacattgccaagctgtattatctatgtttcttctggcgaacctcaatgcaccgctggttcagcggctttgattatgcatatttctttcctgtaccatctctctaatatgcgtatcagtcgccgctgttcgtcatattgccgcataa

SEQ ID NO: 254736 - DNA, 213 bp, Gossypium hirsutum
ggcgcccactcgttcggcttgaaccaaaaagcacgataccagttcacagttgtctgccacttcatagcaaagcgtcccaactttccctcttcattcaaccaatgagaaagcttttccccttctaagttttggcacagcccaataccctttcggtgcttcaatgataccatgaaacaaccattttcgaagctaattaaagtaggttccggcact

SEQ ID NO: 254737 - DNA, 304 bp, Gossypium hirsutum
cctgagtaaaaaatctcaccttcctcacccaaatctccttctaattcaagagcgcggccatggccgttgctacctcttcttttacccgcaattctgcttccggtggttgcagctatagttgtttaccagcttgactcgttcgacgccgcccctatgcccctccacgagttgagtgtccccttcgagccgcccttgttgcataacgaccatatgctacaaggggcggagtttgtgggtgccggccagctttcgggaccggaagagtttgcgtatgattccagatctcaagtaatctacacgggca

SEQ ID NO: 254738 - DNA, 294 bp, Gossypium hirsutum
gcaaatccgaacccctagttaaattaaagatcacttttgattcttcagcttttgaaattcagagagtaggtcttcttcggagtaagccaaaaaactaatagaggaaaacgcatctttgttagttctgcccttctattcttcttgttcttgaaccttcttctttcccgtacttcttcttttatctgtaattttcgcctcaaacatggaaattaatcctccaactaaatcagttgaaattaaagagaaagacctcttcaaagctgcggagaagggcgattctttcatattcaaacc

SEQ ID NO: 254739 - DNA, 225 bp, Gossypium hirsutum
gaagaagataaagagccagaattctaaccaataagaaataactcttgctcggtcgggcgcttgatactccaaatggatctctcacggaaaagaaaacactacgcacgcaggtccgatcgaatcagccaagaaatatggccaatatatggatcgatctgtaggacgaggagcgtataatgtattagcgcattacaagctgggaaaaacgcttggaattcggtcctt

SEQ ID NO: 254740 - DNA, 346 bp, Gossypium hirsutum
agtttataaaagagaccaaaaggaggtctgtatccttggaagctccggcttcattggaccaagacgtttacccttaaccatacctcgaagttttaaacttcatccatcataaacacaaaaacaaaggcctcacgtcaacttaaaagaccatcatcttcatcaacaagtgatcgacgaacaaaatccaggttcaggatttctcaattataactcaaggggaaccgtaatcaaggcaagcttatcaggtggcaacttaaaataaggagctccatgttaaaggcctttttattttaggccacagccggttcacttaccagggattggcaccaccattaaaggcattaaa

SEQ ID NO: 254741 - DNA, 339 bp, Gossypium hirsutum
ctttgctcttaatcttaatatcttggatttatcctctccgctgcttgttggacgggattcgggatcgccccagtcaggttagttggcagtggccacgccgatgacaaaggggaggtggacgttacaatcttggcgtggaagagagtgggtccaattgtaactgacaggacaggacagaacagaacagaacagtacaggagatggcgttaagaataagcatttcatttctaaggattgaacagaacaggccaattgttttctttctaaggattgcctctactcagctaccctatttttgagttaattcgcatgtatgcatgaatgtcaatgttatcccaa

SEQ ID NO: 254742 - DNA, 289 bp, Gossypium hirsutum
ggtttatgtcggccaattttgtatttaagtatatacgatcaacgtggcggccgtgcggggacggcaaactagcaggcaagtgggaaactatactgcaattcattttaccctccactctctgtttatgtatatatatatcattgtgaatcccttttttgtagcaagggtggtctttgatatttaaattttaactcttctttctcggacaatagggctttcggttttttttggggggttcctagcgcatggaaagtgactgtaattttttatagacgtctatttcaactag

SEQ ID NO: 254743 - DNA, 419 bp, Gossypium hirsutum
aaacagaaggggaaagttctaaaattcaaaaaagtgaatgaagatggataaggaatagtcatgggctgtgtgccccaactcatcctacaccctttggctcaagactattacacactctatcgtattaaataataatggtacttgcaatccataaaggccattcacacaaaatataagagagactcaccctttctttttgccctgaccttctctctgcattctttcttctattgctgctcctttgaaatcatgagttcttgtgtcatcattactatgaaaagcctcactttctctctcactttgtttttgttctctttttacaattttagatacaaacacgtttttcccatctatataacacttggtttttttctcctacttgattataacaaataattttttatcaatttttttaaaca

SEQ ID NO: 254744 - DNA, 169 bp, Gossypium hirsutum
tacataagctttttattattcagaacaaataaaaaaagcactttcaaaatgttgaggctatcatcgcatcatcatatatatcttacgtcacagaaaatcccatcaccgacccttcatattataacactactctaccacctaaagggaatatatcactacaacactacac

SEQ ID NO: 254745 - DNA, 383 bp, Gossypium hirsutum
aattcatcgagaaggagccgattattaccgaggccacacctatgcattactgcatgcggggcatgaagctcacgctgtaacttgcttccaccggggacaggactacaccaagaaatgagtcacttggtatgctagcattgaccacccacggggggcgaacacgctccctagaggttaaccgcaatgggaacaaatactactatagcgatagtgggaagagaaaacataacttgtgcgtggcatatatccgaatctttctagaaaaaacatagaacgtatctttgtgaagcacaaatcctgttagaacatcactagctgtttatagcgaaaacatattgtgaacgacacactaatttttgggtgggtcaataataaataaataa

SEQ ID NO: 254746 - DNA, 376 bp, Gossypium hirsutum
ggaacttgtgctggtgtttggacttggattacttggagggacagagtgatcatgggggggtcaactgcaatgtgtgatgggaatggtcttggtgggacttgcaatggtggttgttgaaagtgccgttacatctatatacatctgttatgcagaagacccttccttgattcgaagatgggatcctcagttctttaaccaaatgtcggagatgctgcaccagcgtctgcaacataggagtgcacgagccagggaagtattgactcagaaccagcttgacagccacatgcaagatacattccatctttgaaaacttacctatatcaagtgtaattcatactctaaaattactattccaaatatagaagagtttgttaat

SEQ ID NO: 254747 - DNA, 331 bp, Gossypium hirsutum
ctatttgcgagtatgttttggctcccttattttccttgaatttttaaccaattttggggtggtttttgtgatggattaaatcaactcgttaatatcaaatccgtaataattggttttgtacatccttttctggaaacttttggcattcattatgtatctctcctcatccagtgcgcttttatgatgtgcaagcagctgtgagaaatcacattttcattttgatttttttaaaatctactgcttttatttttttgttgttgttgttcagtgaattgtgtttggtagtagttattatttcttcaaaagaatacaaatagtattatattattac

SEQ ID NO: 254748 - DNA, 340 bp, Gossypium hirsutum
gcacgcgaacgatttacgtcgctaacactcaacggctaacaaatccaattgaggtcggtacggactggctacacgatcttatatataatgcatgccatggatgtggactcgagctgcatcgaaagactaacaaatgctccgaggactgacacaaagtgcgattgtatataacatagacttatggttgcgctttaccgggatctgcataggacagggagaggatgcaatgctgtgtatatgaagcacctctacatgtgccgagttaacaaggctgctttgcctctattcatacggacgggataaacacacggcattgaggacaaaagggcagttattggta

SEQ ID NO: 254749 - DNA, 379 bp, Gossypium hirsutum
acaaacttcaaatcattattgtcgcaccaaaaaacaaatctgcatatacaccgggagagggtagcgaaaatggcaagcgagggacctgcaccaaaacatttctggcgtggtatgccagaggaagactattaccggtgagcaaggaatacgcaacatcaaatgttacttctacactcacaacggagcgctcttcacccagagctacttacccttggataaaaaagtgaaggcctacgactacacgacccacgggtatgggtccgacactggctggctcttccagaccatctgcgtcaacttttacaattggggccacgctcgtttcgcccatgatcttatcggccatggtagatacgagggactaccctgctatttaagt

SEQ ID NO: 254750 - DNA, 430 bp, Gossypium hirsutum
  unsure (1)..(430): unsure at all n locations
tcttaccaaacgcacctcttttctcttccaatcctcctcccctttctccgcgttcctgcagctccggtgacggccgaggccgtggccgcggccgtgagggcgcctccccttctggtgcgttcggtggtttcactccagcccttggaaaacctgattcagaggacacgaagcgtgactcggctgaatcacaagctgttggatcaggccatggccgtggaagaggaatacccttatcgtctgaaccaattatcccttctttctcttcttttgtttcccaaaatgggtctggtcgaggccgagtcaccaatgagtcagttcggccgatacctncgcctccgccttcgccggcttcgagggaagcaaagcagccgatctttgttatgaagcaggatgagattgaaactgatttgtctgccaagctacctgctga

SEQ ID NO: 254751 - DNA, 162 bp, Gossypium hirsutum
gtcggcagcactcctctcaattttctgtagttattacacctacatcctacaaccataagaaacttggacttaactggctaaagacttggaaaaataaattctggaatcttggctttcctataccagaattgaccccacatgtgcttaattttgcatttgggc

SEQ ID NO: 254752 - DNA, 218 bp, Gossypium hirsutum
acacctgcaataccggtccgggactcccgtgccggccgatgcattcaaaaaacttaaaaaacaaacgttcatctcggttttgccctaaatcagggttctattctgcgccggcgccggatcaactttataggactccaaccccatacaaatggtatccaatggcctcagccgcttcgaatccttccttcttcctctcatcagtcacactcaccatgctc

SEQ ID NO: 254753 - DNA, 418 bp, Gossypium hirsutum
aaggattctacccgccgctcggtgcgaattactctccacaaaggcgcgggcaacttggccggcgcgggcgctgcacctacaacacatacccttgggagccagaagctcctactaaaaaatgcaatctgactactgtcgcatacttcacttctaaccccgattctgacttaaatgcggtcaatcataatccaccacacggtagcttcactccactagcttttaaaccaaatgcgattaccaattatgcgaatcaacggttcctttcgaactaggctgaattacatattacgacaccgccatcaataggggtaaactaacttgctttatgacgatctaaccactaactacgttccctattggtggataaacaaacacacacttgaacaaatttgcttcacatttattgggggaaccaaca

SEQ ID NO: 254754 - DNA, 241 bp, Gossypium hirsutum
  unsure (1)..(241): unsure at all n locations
aacgaaaagagtttgcaagttccaggttccttttctgctttagtatgaagtcgatgcatagtcatattaggttgtttatgtgcttgcttgttagtccctttattggaataaaactagtcatgtaattgaatatgcattcttctggttatatggtggaatttggatttggagagttatatcactggttctttcgggttnaacctaataaggctacatttataggaaatgttgatttaaaacc

SEQ ID NO: 254755 - DNA, 164 bp, Gossypium hirsutum
tgtgaatcagagaaaaccctacctttgtttgtttatctaatgtgtttgaattggaacgggcaaacaaagggaggggttgttaatgatcacagttatattaccaaaaattatacatctttgaacatttgctaatgtaaagcgggtaaaaaggactgtagtatgaa

SEQ ID NO: 254756 - DNA, 180 bp, Gossypium hirsutum
gctggactcacttttctcttcacccttacttttctcctcttcaccttatctcaagcccgcttcatcacatgggaatcccaacatgatgtcacccccaaaaaatacgatacccattttccctaaatccacccccaattccccattctttttcccaacgagaaaccccacttttaacccccc

SEQ ID NO: 254757 - DNA, 375 bp, Gossypium hirsutum
tggaaatccaaaaatctcctcctgaaattcactcaatcttagtcttcccctacccttcggttctctttctcattccctctgcttctccctccttcgccttcggaacccttcattttccagaagcttgaaataccatttctctcttttggtatttcaaatcccccccccaaacaaaaaaccctaattttctctacaatcctaaaccaagtctctttctttcttttccggataaataatcagaatcgatgtgaattggagcggttggaattttccttctacagaattactcctcatctggtgcttcagattataataaactggatttaatggaggctaacgtttgtgacattaatcacttaaatgccgatgttcttt

SEQ ID NO: 254758 - DNA, 300 bp, Gossypium hirsutum
cgtgcggtgcacaatcatagtgtaaaatagccatgtattttatcttcttgtcaccctacattgttgtgctacttctcgtgggtactccaaactgggctactaactataataccgtgtatttgacaagcattaaaaataccattgatgactcttggtattacaaacccccttcatggacaaaaaaccccaatactgtataaaaattgaaccaattacatgtatttatttctcgaaaaataatcagaacagatgtgtaattataacgctgtcttttttcttactcaggagtactcctcatct

SEQ ID NO: 254759 - DNA, 455 bp, Gossypium hirsutum
cacggatgtattcctcattttctctgcttcaacaacgattagccattccgtttcaaaagtgacgattagctgattggttctgttttatcctccccaaccaaaatctgctgctccaccccaccctctccctcccaacatcaacagcaggtttcttcgaaccaaatctccaccgtctcgcgtttgggaagcgagaaagtgcgagaaaaatgagcggaccggggaagaaagtcgttgatgtcgcgttcaaagcatcaaagaacattgattgggaagggatggctaagcttttgatctccgatgaggctcgcaaagagttcgctacttttcgtcgcacttttgatgaagttaactctactttacaaaccaaattcagccaggaacctgaacccattgactgggagtactatagaaaaagaattggctctcgcctggtagatatgtacaaagaggcatat

SEQ ID NO: 254760 - DNA, 346 bp, Gossypium hirsutum
  unsure (1)..(346): unsure at all n locations
ataccgggtcggggcacccctcccgacccactcgtacccaaaagattcttactagcatatctttgctatttatcatcaattttgtgctgatnaaatagctcgaacagtttcttatattatcactantattaataataattactacgacttggttgagctttcttaatactttcagcattgtcctggtaaacctataaccaacatctctattactcatagacgtgtcacaacagcttttcaacaagctgataacccaagatttttgtctacattgttacaaacaaattgtggatataataatgccaactaacttggagcattttatttatacactctttttaattaa

SEQ ID NO: 254761 - DNA, 366 bp, Gossypium hirsutum
acaactttagagataaatatgcacttatgaacgtacttaacgtttaccatcaatttagggtgggctacttggggcaccacgagcttaaagttccatcggcacatacttcatactatgcaaaatgggtggtggaatgtataactcattccagagatgggacctcaatatttctaacgccggcaccactcatgttacagtcccaccacccttgacaatatccacattaaagcgatacttgacggcaacgaatatatacatcttgaaacatcaacaatatggaccccaagctggatggtacacattaatggatgctactcatcaaaatggcgtacaatgtttgggactcatggtcttaaatcatataac

SEQ ID NO: 254762 - DNA, 437 bp, Gossypium hirsutum
atcccttctccttcttctctgtaaactgtgaagtccaaccggtaggggcaagatagcagcgcggtctacccttatgcgcatttaacctccacttccatggccctcacttccactctccctctatactgtcatcccaagaggcttgtccttcaagcgttggcttcggaccacggccggtgtcttggtcatgattccgcttggtttattactaggagacgttactccagggccaagagattggtggtagcggcagcgtacggtgcggagggaggcgcgaggcggcgtgtttacagacaggcgcaggcgaagcagcctctcagtagtgctccgaagcagattgcaacctttgtggcgcccgctggcgtttttatcgcccgtacttttgctgacagtgttatggaaattgggggagaaactccttatgccgaagccatcta

SEQ ID NO: 254763 - DNA, 279 bp, Gossypium hirsutum
acgcggacacgtggtctcaaaacaatgttgacggatcctatatcttaatgggtggacctaaacagttggttttgcagtacaaggtaatcaactctactaaaccacttgtctatttcaaatcatctgtttggccaaatacacaagatggtactttacaaactgtgacactaaattttgacgaaacaaataatggctttgcttataacgatgtgttagactacacacgggctaactctttcatttttactccaaactttatcttgacaaggccgaaataca

SEQ ID NO: 254764 - DNA, 335 bp, Gossypium hirsutum
ctgctctcccactgtttctctcttcacccttggccatacatctccaaagaagtggattattttaaccagagaggaaacaagaaacaatttggagccatttagttaaaaaaatgaaggggaatttctagaaccccaaaatgaaggtgaaaaccccaatataatatgtttcaaggcttaccaccctttttctcatcattttaactcagtcatgattccgatgacaccccactcccaaacgccgacccgtggagtgggcggggaggagcacggactagcatgaatcagcgcaactagggccgcctctggtcaaaacagccagccacatgcgcactctg

SEQ ID NO: 254765 - DNA, 328 bp, Gossypium hirsutum
gacccacgccttccctttctagcttcagaaaggaagagtctcttcttgtttacaaaaaagggaaacccctagggacgaggaatgaatgaaaaagataacacaagtatcacactcataaccaatgcacatgaacttagttatcttgaggcttttgtattcactcctttcttctcccctttgaatctgtttcttctttaacaaaataaactgaattcttatcttatagcctagtgacagactaatacaaaaaaaatacacccattagcatattttgaaggacaatacaccttatcgggcttgctttagatttttgctactatgaagtact

SEQ ID NO: 254766 - DNA, 375 bp, Gossypium hirsutum
gtgggatattatatcttttttcatttttcccacacttttttgaaaacccattatctaaggatccactatggggtgtgctgtgaacttccaaatatctccttctcctccactcggtgggtgtaactcctggtagggggtgaccgccacgagacgcacgtgaaacctaaaagatccgagttaatggttggaaggtttaagaaatgtgtgggctgataaccaattgccatatgaaataccatatgggggcatagcgtactagtcatattaccatccacccaatttggtgcggtcggtggggtaaatcacaaaagaaactgattcgagagggcattaactaaatctgcaacattgattccaaacacacttcggtaggtg

SEQ ID NO: 254767 - DNA, 400 bp, Gossypium hirsutum
aggaaattcattcttatctcacgctctcaattatgtcctgcacatttcttttggccatgggcttaactcacattgatctttaccacagttcacttggaacttgttcattacccttcctctttgccttcatcaacaagagattactctactaataatcacacacaaattggtgaaagaagcagcattttctttggttttttttttttaatggtcagtaaggaatccatgttgcagagatctggactggctagacattctttgagaaaccttcatggcggcctcctccattgaaaagaaaaactccaactaccactgcttttcttgtcttaaccggttttctcatggctgcttttggtacatattcctcatggagtgacacttctgggggttttttcgagca

SEQ ID NO: 254768 - DNA, 349 bp, Gossypium hirsutum
gatggtgtaaaattgggcgtcttttctaatagggtgggggaaacatttgttcgaatttggagaggggggtcaggcttacacaaaaaggtggatatggtatttcttggggactccattactcagtgctctccgggtttgaaaggtgatgtttgtgatatctacccttcagctattcaagcagcactttctcgtctactcaacgcttgagcttcccctggacctaatgcacaagaaaatcgtcgacaatgcttgaaggttttgagactgaagctggaaagaagaatccttccagaatctgttgttcggcaccatatacgagaacttgattcccttagtgtttcatcttctg

SEQ ID NO: 254769 - DNA, 364 bp, Gossypium hirsutum
gacgcccggaaggggccgggatttattgggggggccccacgcgtcgggttccgacccatacactggggcttttttctgttttcaccgattcaaaaggaatttaaaaggaaataaggttgggccaaataggaattttaataccgttctggaaactcttgccaagaaaaaagcagacgcaatggcccgacagcggttagacagaggcgatctatggaagaacaaggctcgcgttttgcaactccagctcatgcagcgctttacgttgtaaggcgatcgccaccgaccttcagtccttgctgatcgttacttggccaagtcggttcagcgccagtttattcaccacttgcgccatatttttcttttc

SEQ ID NO: 254770 - DNA, 350 bp, Gossypium hirsutum
cggacgcgtgggctttgactgaatcctatatcctctctctgatttcgtttttagggttgtatttttctttgttctaattcaaaaaagaaaatgtcaagtgctttagagatgtcgctcgacgatctcatcaagcgtaaccgtgagtcgcgatccgcctcatctcgaggacaaggactcggtttcgcaactgcaccggaccgacggtttcatggtggcagagcatccccaccggcccttagtgcttgctgtacggctcctgtgacgacgtggtcagcgcttgctccgtccgttccgcgacttgcgtcgcgattccctcccttcttgctcttctttctacgcgaaaaaagtga

SEQ ID NO: 254771 - DNA, 282 bp, Gossypium hirsutum
acccgtgcggagtaaaggcccatccccttagccacaattcctctttctctggctggggggtccgaatctacggatttgcgggtggagcaggccagagctcatctctgtgcttcaaagctcgctcctttattcctttcaaaccctttcctttttataacttgattacattttctcagatctgttcttgttctctatctctctctctctccaggctcctgtacaggtagaatgctcttcttccttagcgatgtgatctttgtcgctcagtcgacatggcttcaa

SEQ ID NO: 254772 - DNA, 378 bp, Gossypium hirsutum
  unsure (1)..(378): unsure at all n locations
gtttggtgcatatatctgatttttaaccagattgttgataccaacattccaccatcccatccatcccttctctgtttttgactgtcactctctcaagcacacaagttagcagtgggtgtgctttctttgccttcccttttccagtgtttttctgaatatctctcccttcatgtggtctttaccttccttatttcttgcatcattttctgctattaaaaacccccaaatcctaaggagaaagatcaccactttcaaatctgtctgtcattgaactcgttataatcccaagaggagtcatttttataccttntttttttggaggggggtgtacccttatgaagaatgatctgcgttcacattggagtttaagaagatggt

SEQ ID NO: 254773 - DNA, 345 bp, Gossypium hirsutum
gaagaagaagaaaaaggaaacaaaagatggcaattgagattcctagagtgaaacttggaactcaaggattagatgtttcgaagctcagattggtatacgctagtctgacacggcactacagatcgaatacgaaccgagaaagcgtggcctatcaatcctctagaccttcggaaatgggagactgacatgtgtacaaacgtcctctatggacccaaaactaacgaaattctcgtccgaaaggcattgcatcatttttcactcctgaaaaggcagttttctacaaaattcggagttgaaaacaccaagtgtcggattgtccacccaccaatggcgcacgtgagctgg

SEQ ID NO: 254774 - DNA, 397 bp, Gossypium hirsutum
attccaaaattccttcctgccgactgccccgatttcattcccaaatcttgcttctctaaccgcgcagaaaatctggtaccagcaacagctctattctgattctccagaactttcattttgtttcctcgcttctctcgccgagaagacctcctttccaccagcatccatggcccgaattttgggccttttcctttgatgattgatgtatattttttcccgttcaagcactccgccgaaaaaggtccctctacggccgtcgactcctcacgaggattatttgccgggttcaccaaatccgcagatttttgggtcgccataaccgcgatgacccgggattcggcaattgaatccatgttaataccacactcgggtaacgttgcattggattgaaatgctt

SEQ ID NO: 254775 - DNA, 331 bp, Gossypium hirsutum
catacctaaaattactttctgacgactgctccgatttcatttccaaatctggctgggctaaccgcgcagaaagtggggttccaggaacagccctattctgattttccagaaccgttattttgatatctcgattctatggccgtgaagaccttcttcttaccaacatgcatggcccgaattttgggcgctctttctttgaggatagatgcatatttatataccgttcaagcgacttcgacgaaaaaggaacctttacgggcggggactcctcacttggattattcgccgcgttcaccaaatccgcagattttgggaacgccataacacgaat

SEQ ID NO: 254776 - DNA, 337 bp, Gossypium hirsutum
acgctcgctgcacgtctgactccgatcatagccgtatgtactctgccatatgggcctttacacacgagtggactggaccaaaaagggccacactctccctggcgtaataccgtctctctatgcacatcttactaacaaggtttctgggcggtcttacctaaatcctcctcacggaacaaattttctaggggctaaaacggcctcatcggggctgtacagacgagtggcaagtggtcaatattggcataccaattggttggggtaatgaaatgtattgcactgggggtgcacgtgaatccgacttggtaaaatactccgaaagggagacttctattga

SEQ ID NO: 254777 - DNA, 126 bp, Gossypium hirsutum
ctatatgctatttgacacgatattcctatcatctaataagctatataactcagattcaatttggggactatggcactgcggaagccatccgtctttggtaccggacgccctggaacagaggacaaa

SEQ ID NO: 254778 - DNA, 292 bp, Gossypium hirsutum
gggcgacccacgcgaccggcaggcagccaaggcaaggaacaaggtgcacgagacaaggaacaaaccagaggcagagctgatgaggcagcgcaaggaaataaaagcgcaaccaccccaaccacgagagccaaggacaccgggggggcccccaagaagcgcaccaagagaaaaggggagaggcaaagcaaagcacaaggagcgacggggaaacaccaaaaacagaaggcggccgagagggaagcttataagaacaagaagcccacagccgcgggagccccggcccaagaagacc

SEQ ID NO: 254779 - DNA, 268 bp, Gossypium hirsutum
atttaatcccctcccaacaatcttagggtctgtaattctcctataacatgcatagggtttgtggaaaagtgaggggggtcatcaatcttaacctctttacctatttattgtactcttttttttgtctaaaccccactaaacccccaagcaactttcaatatggtgttgttgggctaggcttagtatcagctatgactgattcaactcatacacaccaatttatgtgattagcttccattcacaacatccactcctatacctattttat

SEQ ID NO: 254780 - DNA, 207 bp, Gossypium hirsutum
gttgcttcggaagcatggacttcatagttactatgctggttttaggtttgggcattttccgcagcaaagcgtttgtcctttgcggtcctaagccagaggactcggaccttttgtcattccaatatatggaaatgttcccattgacttacccaacatgactgattgtaccaaactgactttaacatcgcatgcaaagaccgagctagg

SEQ ID NO: 254781 - DNA, 241 bp, Gossypium hirsutum
tcgaaaaagagaaaataggaggagttttatggttggggatgaagagtaccactgacatcatatatgttatttacatcaaattttcccattaccttcatatcttctgttgggtcctcttctctttttaattgcgtttgctttttttgtttgtggtttaagggaaaaaaatacttcctttttgtgtttccacttggttttggggtgaaatgcgcccacattaccttccgattttaaaccttgg

SEQ ID NO: 254782 - DNA, 322 bp, Gossypium hirsutum
attatcgattcttcttgattcatcttttcttttaatctttcttctttaaagactcggtataagcagcacgaacagtatcaccacgacatgttaatatgtttaatctctgtgctatcttagacgaatactaatgggagatgctttcctttggattgctctagacgttttctgatatcaccgagagttctcgtttaaactggggaagctgcaggagtatttttagggtctgcaagcatcgcagcaaaagaggctcctaaccatggctaccgaggaccaaattgaaagtgcaggatttcctactgatcttaaatgcggtgtgcgc

SEQ ID NO: 254783 - DNA, 401 bp, Gossypium hirsutum
aaacgcttcgatcttcactgtgaaaatggcttggcgaagtgcaggatccttgtctcgctctgtcatctctgccgcgagggctccttcactccgctcccctccaccgctaccccggctacgtccctcggtttcctctgctcctcgcctccagtcccgccgcctctcttatgctccttccagaaatttgggagaattgggatgtgtccaatcgttcttgcctctgcatagcatggttcctacggcttgtctcacgtcacacctgactgttaacgtgcgggcttgttgcgagctgtctcacggtacttgaaaggccatggatgagcacagcagagtgcaattggatgtcgaagataagtttgttacccgggggaaccagaggcttaagtcgtctgattagaaaa

SEQ ID NO: 254784 - DNA, 393 bp, Gossypium hirsutum
gtttctctctctttctctctccagaaagggcaaaacaaccctgaagaaccgggtacacccccaatagctccatggacgaggatgcgttgaacatgcgtaattggggctactatgaaccgtcttttaaaggacatcttggtcttcatctaatggctgagcgggacaaaaagcctttcattcctgggcgtgaccccaacaatctcatggttactaccaatgcttttcacccaagggactgcattgtctctgaggcacctcctatccgcatgcaatatgttagggatacttggattagccagagagagaagcttttcaacatgttgcctcctgtcactgccccgaattacgacattctttcagaaacttcggctactcattccatgccaatttggc

SEQ ID NO: 254785 - DNA, 285 bp, Gossypium hirsutum
cgaagacacatcgttcgagactctcctgatgttcctgatactcatcaactgcgtggatggatttacatcgttatcagaagtggaaacccaaagtgtatggggacacctaatacgagtggctagcaccaaaaccaacgtgtgggctttgcacgggggggggtgatactagaatgttgtttcactccaacgtaccagctgcaaagcactaatgatgctgaacgacaattgttggacaattctttttcccaaccaaccttgcctctctgtcttactcaagaccgattg

SEQ ID NO: 254786 - DNA, 197 bp, Gossypium hirsutum
ccggaaattactggccggcccaacccttccgtgcactatatatttttaagaataattgatggatttttttattgtttataaatgagatggctgcaaacactgatctaggtcagaacctttattttatagttccggtcattatggttggcagtaagaaaaccttccctaggaaaacttcatgaagttactttaaccgg

SEQ ID NO: 254787 - DNA, 329 bp, Gossypium hirsutum
ccttatctcaacctgagacaaaatcggttaactgacccttctgatccgagatcggtattggctgctaaaatcctctgaattttcatcaatggcgactaaaggtcaaggcataacttgcaaagtagcccgaggcttatgaaccgggcaggccactgaccattgtggatgatcaggtggctgcgacacaagccggggtggttcgactcaagactgtcttgactgatgtgtgacacgactgatgcctacactcgaagagcaaaggatcctgtgggcctattgccgagcgatgcttggacatagaagctgctgcaattgtagaaagtgcaaat

SEQ ID NO: 254788 - DNA, 383 bp, Gossypium hirsutum
gtgacttgcagactctttctgatgttgatctcaaactgattgccttgacttacacgttagagtctcaaattcatggaacaaatcatcttagggatgcgccgccccctgttcatgttgttaatgtgaagaggctgcctgaaagggacttgcctggatggggctctaatgtccctaatttggaagagtgggaagctctcgaaccggaaactggagatggattcaactctaactcgagaatccttcccttgaaagacttaaatatgaactatgtctcatcagataacaattctgaagatgtattggtggaaacaaagagtgaaacacattctgagaatcgagaagatattgaccagggttttaggaggcctaagcgctatttgccc

SEQ ID NO: 254789 - DNA, 373 bp, Gossypium hirsutum
gtgagatttatggttttatgtttacagtttactctctctttatatctgtttttatttaagagattattacggagattttttttctaaaaaaaccagtttactgctcttatacagttatacttatgaagttgagcagcaaaagagaaaaatggaaaaaggagggataattggagtggagaaaagaatgagaaaaggttaaaagctttgttggacttttttttcttttcatttatttgatttcgatttgagatatgaattatggattgctgagttttttttcaaaaagatctgtttttagctgatgggttttggccttgagtggttaaaagaaaggggaatggccggcagtcatgaagtcaacctcaatgagtgc

SEQ ID NO: 254790 - DNA, 387 bp, Gossypium hirsutum
gccttttcttctttcttctctgtccttccattttcaaaaacatgactgtcttgttctttttctattcttcatcttatagctttgtgggtaccccttaaaaggaatatcaattttgacttcatttcctagttttttttcctctagttattcagctttcttgggtaccctttactctcattctagttttttttttcgtaaattttcctgttattattccgtttggtggaggtagttggtaattcggttgaacttgcactgtggagaagaaaaaataaagtaaaacttggggggtgttcatggaaattgatctgaaccatgcagtaaacgaggtggagaagactgtactttgcaatgggagctgtgaaaaagctagtgcttgcgtttact

SEQ ID NO: 254791 - DNA, 381 bp, Gossypium hirsutum
aaatggttgaaactggtgaactaccttatgaggagataaaatctagaggtttgggtaaaaagagagtgtagggtattgcgattggaagagaaaaaatggggatgggtctcgggcacgttatatggacacagtgagtagctcctcctgcagcatagattacaacatgatgctgctgttattacggcgaataatattgctgctaggtcttgattcattataagcatgactcttatcgatgctggacgaaaaccaacttttcctacgtgggtgttgaacatacatgccggtaatgagattgtgttgagggtttcatttgtgtatgcaaggttgataaacttgtgttgctcaaagaggattgattggtcggagttggaggcacat

SEQ ID NO: 254792 - DNA, 387 bp, Gossypium hirsutum
gagaaactagtgcaaaaagattttactctattgcgctagatgtttaagtgcataaagtaaactcatgctcgggtaatcgactcttaggtctatgtcgaacatatggtagtcaaaaacactataacatctcatataagaagcgcgtggctaggttaatgagaaccacaccgtctctgttaactatgaatataaaccacagtcttcttaacctgtctaatataatcaatctggatagtatacccggccatactggaatcgatctcgtctttagtacgcgtcttgcgaggaagaggactgacgagagctctaagtcgatattgagaccccactagtacaacgtcatgttacttattcacgcacttaacatgcgaggcacactcaccattt

SEQ ID NO: 254793 - DNA, 392 bp, Gossypium hirsutum
atttctttctcctaaaattctattttattttttactctttttgttttatgttactctaatctaatgccatggagagtagtaaccggagacttacgcttttcgagcagatgtcagcggtcgacaacggccgcaccactctggccgctgctttcactctcgatgcccttttgggaaacactaaaccgcctcaacaaccgtcgtctcacaaccgtacgcttctggagattatattagacgatgggtccaacaaagacaagaagagttggaaggcgtttcgggacaagatccggctcaagcgaccgggctctgccttgaccttctcggttcatgttccggtttccgatgtcaatgttcagactgatagatctgagtcaccgaggagcggtccgttt

SEQ ID NO: 254794 - DNA, 355 bp, Gossypium hirsutum
accccttccgtcatacaaaaaactgtccccagggagtgaaaaggaacacaaaatcttctactcaaggaaagagcgaaagatcttacctagcgaaactatcagcacgaaaactaaaaagaacagtgacgagcaagcacaacgcacagcggagttcatttagtgcatgcactacctaaggctatgcacaaccagaatctccgaatgaagcttatacacaaggaacatattctccacaaggatataaaacaggatatgctccttacggacatcgtggagaatacgcccttcaatataccgctaagactactgctgaacaaccgaaaaacactgtgtgctgagaaaggagtacagatgc

SEQ ID NO: 254795 - DNA, 277 bp, Gossypium hirsutum
aagatagggaaacgaacgtgttatgctagagaccatctgacacgttccatgggatgataactccaacatatcttttgacactaggatctgttcctctgacccaacaagaccgaatcctagggttcatgcttttaaaaaacccaatctcctagaccttcggctcccgctaaagctgcacttcctagcctcagtttgtatgcccttatgacaacgatatttgaacgcgttgaagtgttggatgaaatggaacatgtctgtctccaactcaaaagcgaca

SEQ ID NO: 254796 - DNA, 351 bp, Gossypium hirsutum
gccgacccagtcgttcgggaagaccgaaaaaaaaaaaatgacgggcccaaaactctttgactgtggggtttgcaaaccagtacttgcgggcgaattaagatcttaaaagtgcctcaggtttttaattaaaggccctgattaccctataatggaaatctacaaatcaaaggtgaataaagtagatggacgaacgacacgctgacgtaaagtccaaacctgagcctaagattcaagattcaaaacacggttctttttccaggctagcaatgtacaatatacgctggtgctgttgccaaggaatacattaacattcgtattcagctgcgagacgaaatgaaaagcctgaccact

SEQ ID NO: 254797 - DNA, 386 bp, Gossypium hirsutum
ttctagtctcttcctagctaaaaccagcccaaaatcccatagaccggccaccggaaccgccgtctaccgctgttctccgccttggggcgcccctagcagaaatctttatcccaatccatctaggggatcccgtttccttctcttttcacattacctagataaattttccccaaacaaaaaccctaagaagccctcgatctagattgaaaatttggtactgccacctcctcaagtctacgtttccttttggaaatcatctcctagctgctaaaccttcttggcttttctggtttgggattttttattacgggattttctttgatcgaggttgggattgaaaattgctggctgaagtataattattttttgttgttgatggaaattgc

SEQ ID NO: 254798 - DNA, 379 bp, Gossypium hirsutum
gtgtgttagaaagaaataaaaacaacgcagggcccaaatctctttgactgagggcggctaacaccacttccggagggcgaattagatcttaaaagtgcctcatttctgcttctaatggccgtaatgaagttcacatggagatccattatcccaaggctttcaaagggtattcaataaccacaaccagacgccgttcccgaaccagcgtctcagatgcacgattcaacccctggttctatttccatgcttgcaatgatagatttaagttacccaagttcgaggttcaccgaggatcttgccacatcgcttgccagttcaaatctatatgtttttacactgtgcgaattaaaggcgataacacagtgcttctcatcggcta

SEQ ID NO: 254799 - DNA, 390 bp, Gossypium hirsutum
cggacgcgtgggtttttttgtatttttcaacttccttggtgttaaaatcagtttgattttctctccttttttccagattacattgcatttgactcctttcttcctatcaactgcctgaccaagtgacagattttttcattcattaaaaagaatgttaggtttaaagaaatctccattgaagactgctaagcataattcagttgatcctgcgcgtgtggccgcttctcgttccaacccctttgattctgatgacgagtttgacaataagcaaacccttaaaccttcaagaaggacttcttctgaacctactttgagtccaccgaattttggggccaatcctcttgatgacaatgaggggaaagtgaactcttcttcttcatattggcaaag

SEQ ID NO: 254800 - DNA, 230 bp, Gossypium hirsutum
ggcatttttgaaggggtcttaacaaaaacaatcggggtaccaatgatttgcaactacttatatattgggacctgtataaatttttagtggggacaagactgagagtgcatgttgattgaaatcaaagaaagggatgggacaaaagagaaggcgctgagaaaagtgtactgaacgtgacaaatgaatgaaacggatgagtatgatccaagacgcatgtctgataagaggag

SEQ ID NO: 254801 - DNA, 270 bp, Gossypium hirsutum
  unsure (1)..(270): unsure at all n locations
acccacgcgtncgctcttttgaattgtccctcacgcgagcagcttctatctacgaccaccgggcgtttccttttgagatggtgtggcctttaaataaaatatgggggcaattgtccataccgaacctgttttttctaaaccctttggggtttttggggggcccaaagcctttttccaagatgtgcttgggcaggttttttttaaggctttccaccggctttcctttcctttatccaccgtcaacgccgggtccagttctcgcagggcatt

SEQ ID NO: 254802 - DNA, 394 bp, Gossypium hirsutum
ccttggtctactacacgtctacggagagctacacactacgctacccttatcgttccctcgccattgccaagaacccagaagaacaggcctccaaaattggctgaaacaagttctcccatcttggttgttctgacagacaggctagttaaagataagaatggcgcacacctgcatttcgacatcggcatcgtctcttcggttgactagcctgcccttctcttcaaaatcaagcaccaatctttactctcataacttatctcttcctttccatccccttcctcccaggaaactgaagaagctatttagtaatcaaaagaatgcgaggggttctcagccaaaggctgtctacacaggtgagttttgggctccagagaaaagctctcgacatggaatt

SEQ ID NO: 254803 - DNA, 389 bp, Gossypium hirsutum
aattcattctcttcttgagtgtcatttctgaaactggaatctgtatcttgttttaacttccttgagaatgcccatatcttattttcaggtttttcatatgactttatttaaacacaaccctttaaagtaacctaacaccttatcaatgtgctcttatttttattctagattcaaaataacagcagaccaccatggatgattataattgcaagagacgtgggcagatttcagcatctggagactgggatcatgcaactgaattgcccataactcagtactctgaatctgctcgagaagctggttggattggtttaagctcttcatcagcacaaccgataccttatcttactgacgatgggaaaaccaaacatcctcagaatcatgttcct

SEQ ID NO: 254804 - DNA, 390 bp, Gossypium hirsutum
gacctatttgacctgatgacgagaaagtgatactagtgcaaaatagccacggcggggctatcatgtccttagccatgcaatgattacacatgtatggattgctctcttattaattaaaaggtatcatgccacatcatgattattctatggcaactggtgtacctgcatgcttcagaataagtttgacaacgccattcatgatttaacagccatggtgtggagatggattccaagattcaccaactgattcgttatgatgaacaaaacacatcttagtactgggacaataactcgaaccacgagaggatatatgcagaggtctactcgtgggcgagacaatgactggaccgatggaacgatcgcccatggaatcgataatattaaaagaaa

SEQ ID NO: 254805 - DNA, 275 bp, Gossypium hirsutum
ctgcggttatgattatcattatgcggcggaactgacacgtaaaaactgtcgtctaattactgccagcgaaccggactaagcacaacctgtgaatacattgtcgcttgtacatccaatcgctcttgtagaatggtactaagcgacggccctgacagagatccaatatcaagggctgcggtggggggaaataggcttggatagtccgtaccatgtccatccaagatgcgctaagtgctgagtcctttgcaggtgcatgcagccttagtcgttcgagt

SEQ ID NO: 254806 - DNA, 389 bp, Gossypium hirsutum
cggacgcgtgggctttgtcgtttggtttactaattaaacaaaaaaaaagggaaatggccgccgacgccgctgccactgcatcgtcttcggtgacagaggaggagctgaccttgacagtaaaatggagcgggaaagagtacacggttcgagtttgtggagatgactcagtagccgagttgaaacgaaggatctgtgaaatgacgaacgttttaccccaaaggcaaaagcttctttatcctaagatcggaaataagctctcggatgactcccttttgctctctcagatcccccttaagtcttctcttaagatgaccatgattggaactgttgaagatgatataatcgtcgatccagtcgaggcaccggagattatcgatgattttgaactt

SEQ ID NO: 254807 - DNA, 387 bp, Gossypium hirsutum
aggaagtccaaaatcagccatccttatccgcgctaaatttctttacctttctcttttccattagtctccaaaagaaaattgatcatcacctctcttaaaatgacctcttctctttacatgttccttctcatctccctaatcttaacatcactcaccaacggagatgctggtttaatccaaaccacttgcaaaaccaccaagtctgctgacctttgtgtctccatccttcactccgatcctaccagtctgaattcagacacaaagggcctggccctgatcttgatccgagttgcaacggctaatgccacggcaacatcgaccttcttatcatcccaattgcttactaccacaaatgacactaccctaaagacagttctaaaagaatgc

SEQ ID NO: 254808 - DNA, 335 bp, Gossypium hirsutum
ggcatttataggattatcaagcgctatgcatatgccgacctttatggttcatggagagcaaaccggaacaggaaagggtcaagaaaaactgggtataagtgaaagaattatgaaaccaaagtgcgaagctaggctacaatgcctaatccgggattaaatgctggctataaagatagacgacatggatgatgaaacaatgattacttattcatgggcagtgaagatggatatatggtgggtacacagcatcatagactctctgacataccgagctaaacatagatgaggggtctgccaaagcataacgagccggagcatggtgatggatttaatgc

SEQ ID NO: 254809 - DNA, 134 bp, Gossypium hirsutum
cttcttcaaaaaatgggttggaaaggaaagggtcttgggaaggatgaacagggagtaattgagcctataagatctgggattagagatccgtaggtcggcggtcttttttccccggttccttgttttccccattt

SEQ ID NO: 254810 - DNA, 390 bp, Gossypium hirsutum
cagtcctgttccatgacctaaacacagactcaataaatgtataaacgaaactaatgggatggattgtggggcttattgcttaagggacatactgaagtgtatcacgcattcgctttcttaagtgcaaatataagctggagattgaaactgttagaggaagtggtaccgtctcatgtgcattcatattcagaccattgattaagaaagctgcatatttagcatttctagagaaagatgatgggtgggattcactagacatcataggcaaatgtgggtgggacgtagttttcatggctatattgccaggtactgattggaaattgaaaggtatcaagaagattattcagccgtcagaagatgcaactgattcgtctgatgatgatggcatgc

SEQ ID NO: 254811 - DNA, 386 bp, Gossypium hirsutum
ggagggtcaacaatggctttgtatcttgtacgagcaatcaaattaacaaacacaataagaacaaccaccctactacttagaagctcaaatacccaaacccgcaacatctctcactttctcgtttctcataaccaattaactccccgttcccaaaacctcactcctttctgttcatttgattttcttagagattctcgccgtggtttcgccaaaggaaaaaaatcaaaggatgattctggtgggagtacaatggaacttgctcctgatattgggccttctgttaaagcaagtgctgcatcacagatggatgcagcaatagttgccttatcgcgggagctagccaaattgagaacaggaagggcatctgcaggaatgcttgatcatat

SEQ ID NO: 254812 - DNA, 384 bp, Gossypium hirsutum
gaaaaacccggactctcttccgttttgaataccacccgaacattcactttgcaaatattcagacggtagtaaagtgtaaagtgcatgaacgatcactgcgacgtgtagaatctatgatcatgagtcgtatgggaaggtgaataatgcgaactatgtaccaacttgcccttccaaaacgcaactgattaccattgataacattactacaaatcgaacggtttgaaaccattaaggcgactatgtaaaagaagggagcgcgatgtaccgggtcgctcttaaatttcaaccaccgtctactgtagaaggggagcctgcactgccgttccgtattagttcaataagaacagtgcgcgcgcctatgaacgatatgaatactaagagcga

SEQ ID NO: 254813 - DNA, 379 bp, Gossypium hirsutum
aatttttcctcttttgggagaaattttgatgccgcaaaaatttttaattaggtttattgggtttaatttgctgcggtttgtacttaaattgaaagcaccttttgggaattaaagctagatctcacaagttctacttaatggcataacctagttttttttcttttggaagatgatcctttcatctttgtgcttagatcatagtatatatctatttttccctaaaaaggctgatattttgccttatgttgaaatttgatcatggcattgaggcagcggactcatatgcatcataggggttcaaaagggattactcattgtctattagcatggagggagaggccatgaatttgacatattaaatagttggttctacaaatta

SEQ ID NO: 254814 - DNA, 411 bp, Gossypium hirsutum
acaaacttttcctggtccaaaatgccacagctctcagccgcttgccaatggctgccctaacattcattcaccaaaatcttcttcactctactccgaaactcacgacctcaaaaccaaaccttaaacccaaaagaaccaaaaccaaactctctatccaaacaattagagagtctccacaagcttcttttactgatcaatttgttctccaattagctgactcattagaagactctctcccttcttcttcttcttcttctttgccacttcaaaagcttagagacaactcctctgaaacccttctttcaactcaatggccctctcggaaagacgagtcttttcgcttcacagatacgtcttttatcaagaattcagatataaacccaatttctcacccaccaaattcccttgatt

SEQ ID NO: 254815 - DNA, 413 bp, Gossypium hirsutum
ttagtgatggggtaactcatatatgtaatttactacttcgatgctctcaagggtgctattgattgatctaccatcaaataaattcttggttatcgtttgatcttgttcatccatcttcatcacagattaaatttgattccccagttatggtgtaaagttaacactgttgaagcagctatttataaaccctaatttttttttcttgttgaatttagctctttgatcttaaaaccttcgacccggttcttgtttttgtgtgttggatttagcttgaaacgctggcgaacccttggtgggctaatcaggtgagcctaccgggtatggacccggcaggcaattcaccagctttaaacaaacgtgaccttgaaatttctatgaacgatgctaacaaaagtagaagcaacggaagaggg

SEQ ID NO: 254816 - DNA, 246 bp, Gossypium hirsutum
aaacttatctaggtagatgactactataataggccggcggatgctatggtgacatgcattgaagcttggaatgaactgaacccatcgggcgcatattcgcaggccgatttctaatggcgcttccacgtcaaaacacattattgggtcaaacgcttatcttgcgggctggggggagaaccatgaatgtgtgttactacacatctcatagggttgagtcatatatactgagcttagctgtacaatagg

SEQ ID NO: 254817 - DNA, 301 bp, Gossypium hirsutum
gcttcctctcccattcacgcgatttctcaatccctcgttttctcgttccgattcctattgatattttttattgaatctgggatataactctacccatgaaaccatataacattcaagattcctaatggcacatgcaaattcaatacacatttttgagggaaacaccattcttgcagacatgagggaaaaccattaatatctgttactacatatatcataaggtttaatcatatatactgagcatagatcaacaataggaaatcaatggatcgatgtcttgtatcagactttaagagttaga

SEQ ID NO: 254818 - DNA, 460 bp, Gossypium hirsutum
  unsure (1)..(460): unsure at all n locations
tttagaagaaaaaaaatggagagaaaatctcaagccaaaccaattctcttcttctttgttttagtttcggcactaatcgaaacttcctacgccggtgacatcgccatctattggggccaaaaatggtaacggagggtacccctgagtggataacatgtgcccaccgggcaggatataaaataccgtaaacatagggttttccttaaccacctttcggcaaatgggtgcccaactcctgggacttcaaaacttggcccgggtcaacttgtaaatcccaggcatcccaacgggttgggcacctctctnnntagcggtgaaaataaaaaagggttgtnncaaaaccaaagggaatcaaggggtcatgcctctccnncttggaggggtggcgcccgggaagggctactcacttttcgcttctcaaggaagaacccgccaaaaagcggtagctggaattatctat

SEQ ID NO: 254819 - DNA, 413 bp, Gossypium hirsutum
caaacgagcccagttacatatacacgtatttatcagatctaaaaaatcaaattgaattcaagaaaaattgaactcgtatatatttttgtcaatcctaatttaacgtcggtgtaagaaagggattggattctgcaatttgcagcgacttagcaaaaaaggaaaaaagaaaaaaaaaggatgcgatggtgaggctaacagggaagcagcagcatacaccgggaacgataagatttctgttgatatgcattggtatcggtcttttattgatcggtctcattgccgatattttctgggcttcatcttctcgtttcaagctttcatctctttcgatttctcattcatctgattttcccgctacatttccgttaatgttcactgagcctcttaattcgtcggcaaaccaaaaacccaag

SEQ ID NO: 254820 - DNA, 310 bp, Gossypium hirsutum
atcgggcgaaattgaaataccactacttttaacgttatattacttatgccgcgaatgggacgtggggcacggtccttatttttggacccaaggccaggttgggacgaccaatccacgtgaaatacattgcaatgtggggagagaaggatttacgacacatactatgaaaagactacccaggtgttcataagatagctaaaggagaacatgtgactgatgatggaacgcatggataacagttggcatggtttttatgaacatgaccaatacgatccgtataatgttaacaaaatactgcttgaaaccatgt

SEQ ID NO: 254821 - DNA, 102 bp, Gossypium hirsutum
gttgcaatatcatactcgatagcagtgttaattttctcatcccatgatcagtaccgatactaggcatttgaggcatcacgtatcaaaacatttcatcttcct

SEQ ID NO: 254822 - DNA, 394 bp, Gossypium hirsutum
  unsure (1)..(394): unsure at all n locations
accaccaccagcgccaccaattgcgaaaagccgagtcgaagaagcggaagccgagcgctcgcaagctggcttacagtccgaagcgagccatggttgagctgaggcactcgggcagctcgctcgggagccgagcctcttcttctccgatgaaacgcgacgaggatgcttcccctctcatcttcaacgatcacgtccttcgagatgatgatgacgatcatcctcgccattcatttcgagatcgttaccgttcgttttggtcacaaatttactcgtttttccctttccttaatgatgatcctaggttttctcaacacggttccaggatctcgcttctcttgctccttttcatcgccgntgctggattgattttctttttctcgatcttacaacgatt

SEQ ID NO: 254823 - DNA, 303 bp, Gossypium hirsutum
gtctgctcgaaaccttcttcattctcatccgctctccattgaactggagctaaacggcgtctgtttagagagactgtcatgaatggcgaacgagccagatctggtactgggggctggagctgtaagacacatagggtatgctattggacccaggacagctaggggagtcatgtagcgtgctgaccagtcggggtttctcaacatgctagggataggatctgctgctgaagcttgaggatggagtaaaatggagtggagggatgcatgcatggccgcacctaaagaatgtgcttataagcaagt

SEQ ID NO: 254824 - DNA, 343 bp, Gossypium hirsutum
atttcattcatatgcctttcttttctcttcgcggaagttcatgctgaggattccacaaagacagcgtactaactcccaactcatgtgactaaattctagttttgtttaggcggttatggcttggtttactgctttcttcacccgtgttaagttgtgtatgttattactataatttgtcgaccagacaaaatgactgttgtttcaagttttgtagtctgaccaagattttttaagaatggcaatataagaagagaaaaacaatgatttctatactgacttgcggttgcatgaagaatgcactcaaacagagctcatgactgcttatataaacttgacctgagat

SEQ ID NO: 254825 - DNA, 148 bp, Gossypium hirsutum
gcaaatggttctattttggctgatgatgtgtttggatactccattctccattcctatgattttgtctgcaagtcaggcctgtccgctgtatgagatttaagactacctttgaacttcaaatttcaaaccatctccccttttcgctttg

SEQ ID NO: 254826 - DNA, 410 bp, Gossypium hirsutum
ggagacgccatgattgcaaaaagtttgaaagacagatcagcagccatggatcctggaatctggagcaagctaccgcaggaacttctcgagcacatactctcctttttgcctctcaaaaccttgttgaatttgaggtcaacttgtaagcatttcaagtctctcgtattctctccatctttcatttccaagtattcttctgcttctcttttctcttcattctttttgctttctcatccccagtgctacagtaatttccctctctacgatactatctgtggggcttggcgcaaaatagcacttcccttgtcttttttaccgccttccgccgctcagtttaaccttctttcatcgtgtaatggacttttctgcttctctctccccaattcctcctctttccttgtttgcaacct

SEQ ID NO: 254827 - DNA, 441 bp, Gossypium hirsutum
gcccacgcccgtccggagcatagtcatacactttttacaggggtgcagcaaagacagtacagagcggcggtatagaaattggacgtcatgcatctcatacgaggcgataacaaatagtgtcgtagagagcacgcaggtgggttgcatatagccttacatcagcggtggaggggtagagccatctgctgctttcagtatgcaggtgaggcgatgacacgagagttcatgacgaacaagatcgatgtagcaaggaagctgtatatacattgcattacctgcgcgtaacaaacctattaccatttcatgggtccaaagaaggtggaatatgtacctgaatagcccaaaacttgaacccgcactatccaaaagtttcaactaagagctatggccagagcttctcaaagtactgacacaacagaagtggcttaacatcatgaaaac

SEQ ID NO: 254828 - DNA, 409 bp, Gossypium hirsutum
gttttctctcttctcccatttgagaattcttaaggaattctatttgtttgtaatattttggagatagtaaagttatcatctggtgttagtgcccgaggacgtaggtataatttaccgaacctcgttaaaactcttgtgttcttttttgtcctatttttctttcaatatttgagggtataatagtagtatttaattgtgctattaaattactatagaagggatattctgactaaggaaagacttggtatttaagagatcattgtgatccacctctcttccctgggaattgaactttgtgtgattttttagtacaataatttacacgcttccgaccctattggaacaacaaatgagaccatggtcagtacaatcaacatttgcagatattgagaggaaaattgaaaaggta

SEQ ID NO: 254829 - DNA, 405 bp, Gossypium hirsutum
attttggtctcccaagtttcaccaaaagaaaccccgtttcacattcaaagcctttgatgcactgataggaaggcaacatcacgttaacctctttattcatgtcagaccaatgcgatttatcgctatgtctatcaaaaccaacgcacatatatacgaataagtgtatgtgaggcaaaagcgtgagagggagattaaattgtatgcattgcgtatatttggttttcaatttggttggttggttgatgggttctacttctcttcaagtttgcatggattcatctgattggcttcagggaatgactcaggaggtgccaggaatggattcttcatccccatgtggggatattctcacatgctcaaggccattgatagaaaggaggctaagacctccgcaggaacaagctg

SEQ ID NO: 254830 - DNA, 284 bp, Gossypium hirsutum
ttttaagtgtgattaatgtgtttttttacttgatctgttgctgggcttttggatctagtgacaacaaaaacaaaatagtatgggatgaagaggaaggcactgaagatgaactagaactagaactaggtgaccatgccaagggagtggcatctcccattgtttttactcattgatctttcaatgctatgtttttacctagaatttgtgtagcacaatttattttctctttttcttttgtttttgttattatataaataaatataagtagctatgttttttcatgt

SEQ ID NO: 254831 - DNA, 282 bp, Gossypium hirsutum
ttaattttatagctttaatatgcaatttttctttaagaccattaccaataagaccataacctttgcagtggaaagcacactctccattgatcgtgtgaagggcatgatccgatataacagaagaatgcgccacgatcaacacaggcttatttttgatgatgaaacctttttggatggagagacactacatcactacgacattgaggaggagaacacccttcacttgtaacatatattgtggggtgagatgcaaatgtaagtataaaccgtcaacgcactgac

SEQ ID NO: 254832 - DNA, 333 bp, Gossypium hirsutum
attttcgaggcattctttgattccctttacgacctgttcaaatttgctgatgactggattggtgaatttgtgattaagattgatggtattctccctccagtcatcaagcaggcaatatccaaagtcgcctcggctgccaataatgctttaggactgactgttgatgtgcctactatggaggtccagagtactggagtgaaaggcacctcctctagattcctccagcagatctcatccggagccatcttggttgttgaaggtgtggctagtcaggccaagaattccggattgattcctgaagagctacaagtgctgaagtacttaaaatactta

SEQ ID NO: 254833 - DNA, 338 bp, Gossypium hirsutum
aaattgaatcttattactttacaataataaagggttgcgggaagtaataggtggttgtacctgaccctgaactgacacatcagtatgctgcaagcacatctaaattgtttattctgtgaagacctactgttctgatgccaatattgtgagaatggagcgcggtgaatataacgctttgagcaacagtactgcgcactatttgataatgtcttgcgtacatgcatggctgattctgctattgcagatcaagcacatgagagacagatggatgaaggtatcaattgttgaatcgatgagggctgtgtactgatctcgcctatggaccatgtatcaaggag

SEQ ID NO: 254834 - DNA, 298 bp, Gossypium hirsutum
gccatggcagaccgtatgcttcttgggttaggtgtcctgctactctgccttgcaaaggtttcatctgatctgaaggcagaagaagttataaccaatgtcggtgaggtgggttctttggttaccagaggcggaaacagatgactgatgctagagattgattgaggagggttctgcaggaaaagatgcagctaacactcgaggccatacagatgcaacagggcgtgtgtgacttgatggtagaggtgcacgttcttgcgagcgtttgcatggagaaacagggaggtcctactatcctgtt

SEQ ID NO: 254835 - DNA, 229 bp, Gossypium hirsutum
tgcagtgcaagtaaagttgtgtcaactctccaatggaaggaaggtttgttgtattctattatctgtttttcttttcttttaaattaacagtagggtttttctttcaaacttttgtgtttgaagatgaagctgcaagttgtagtttttgtttttttcgccttcaatatgaaaattttaatttaatattcattttcctctgctatccatcaaattcatggtttatatgtac

SEQ ID NO: 254836 - DNA, 367 bp, Gossypium hirsutum
cggacgcgtgggcgcctctttcgagtggtgagtcaactaatcttgatattgggcagaatagttataactctgaaatgtcatataatccaacacctgaaatggttcagtatagtcaaccggtgacttttagttctgaaaatgttacattgcggcaaaatgtatctagtgctggaaggattggtgataacaaatacaatgggcaatatataaggaaaaccacaaattagccaagcattggatgggcctctactgcgccaacaacttccattcacgaaaatatgaacaatgatgattgttacctgccagagtctgcacagacaatggcatttaagaaagcgccacacgtgttctatggtgccaatgagcc

SEQ ID NO: 254837 - DNA, 349 bp, Gossypium hirsutum
gtcggctacggccgggcgatccggtcgaaagacattgacaggtggggagttaggctggggctgcacatgatgctaaaagataacgcccgtgacctaagatgcgctcaacaagaacagtaattttgtgtggcacaaaagggtaaacgctcgtttgattgttgtttacactacgaatactaaccgcaaaagcggagcctatcgcctctttacacctacatacttttcagctagagatgcttcaaaagttaccacaatgcttactcgctatgggcatgcattcggcattagctacgctgattggtgatcctactatcacggctacacctatcattgaaatcggaattcacta

SEQ ID NO: 254838 - DNA, 401 bp, Gossypium hirsutum
cgattttgcatttagctgggaagaatgaaaatggatgtaaatttgttaagggtttaattgatgggattaaagctaaagagatgttgaatttgaaggatgaagatggtaacaccgtgttgcacttggctgctttgaggaaacagcatgaggtaatgaatttactactacaacaacctgaacttgatgtgaacgcagtgaattccaataatctaaaggctttggatatattgctaaaaggtccaaagcaatcaaatgatgaagagattgcccacatgctccatcttgcaagcatgccaaaactcgaaaaccaagtattaaccgacccatctcgacctaacaatgcagtggtcgatgcagtggtcgaagtagacatgacgatgaaagactcaacctcgaaaaag

SEQ ID NO: 254839 - DNA, 411 bp, Gossypium hirsutum
cgcctagtgcatttaccttagcggttcggatggatacaacacgtaccacgtggctattacaagggtcaggggaggccaacagggtgaacgatgatacagagaacaccagatggtgtatagtggctgacgagaacctggatgttggctgatgccggggggcaggtagactggcaaagtaacactgacaacacagctgaggtagggccccaaatgcgcaagtaatggtaacatgatgttacaccatttcaatggcacgttgatacggacaagttgtgatcattcaagtgccacaatctgaaggggctggtttgttatagcctgagagcaacagaaattgtgagcccggctaagctcaagaaaatggcaacggggcctatatctaggtgatagagcctaaacaggtgggtttgc

SEQ ID NO: 254840 - DNA, 355 bp, Gossypium hirsutum
caactagccaacgacaaacctttcattattacacacctgtttccattacttctctgaccaaaactccgcctctgacaccacctgccgccaccaatgtccatcgccgcctgccttctcaccccttccccactttcctctcctagttcccttaccatcacccctaaattccccaccactttccctctccacctccacctccgcctttcctcctccgccacctgtctccgtcacagccgatcttccccgttcttaaccttctgcgccggcggcgatggtggcgatattaacagcagcaacaacaactcgggtggcgggggtggaaacgatcatgatggaaaacacacgggtggtgatg

SEQ ID NO: 254841 - DNA, 153 bp, Gossypium hirsutum
cgaccccgcctccgaatttttcttattcttcttctattggtcttgctccgcttgctctgattttcaggggaccttctctttctttctaggggccttccacagtcgaagaaactgagcagccaaaatggtgggaaaggtattcgcgaccccata

SEQ ID NO: 254842 - DNA, 237 bp, Gossypium hirsutum
atataacctgccactttagttgacgacaccaaaaggaaaaatatctgaacaattacaacctcgtccttgttgactcagttgacacggcttcttttgttgtcttgaagtcggcttgagttttcggaactcaaaacgtgcttggatctgacctggatgccaatgaaaatcagacactggataagagtgcaggcactcacccttgaatgggggcggggaacttggctggagccattgacg

SEQ ID NO: 254843 - DNA, 432 bp, Gossypium hirsutum
ctcaactccaccatcttcaccatttttctcacttttttgcccttttggtttcaccctcactgaccaatgggacaaaaatcgagaaacaaccgtctctttcactcctccattattcttctcctagtttctctctccgccgctttatcctctcctttccagctccaaaccctactcccccgccctctcccttcagcacccaccctctcatggcacgactccgaacccgaatctaattcccttcaagaaacctgccagctcgaccctcttagttccaacaccacattggaagtgcagctggaattgcaccatgtagacgctttatcttcggaagatactccggagctactcttcgacttacgactccaacgggacgcgctgcggtctggaactatatactctcttgtctccaaagctgttgcgcggaaccctcca

SEQ ID NO: 254844 - DNA, 105 bp, Gossypium hirsutum
  unsure (1)..(105): unsure at all n locations
atagtgagtagatttataaagatggttcgagcagcaagaacaccggtccgattgttgtgaagaaacattggcaaaggttgtnnntnnnggatatgaaatagtaca

SEQ ID NO: 254845 - DNA, 389 bp, Gossypium hirsutum
cttaaactagaaacacgcaaagaaaaaacatggagcactttaatctacttttgtatcagaccttatccatacaaagtggatggaacattcgtatcgttcttttgatacgactctgctggagttatggcaaaggagcttggtggaggatccggttataattaatggctatgggtgcgtgaagcaaccgcatgtctgcactcgacaaactctaggaaggactgaggcataaaacctattggatgacctgaatgggatgcactgggatctgcagacgagcaggaaagagagccggatatgcattgttgctgtgcttgaggagcaagaacatcagatgctccctgactggaaagcccaactgactgaaccttctaagcatcttcattgaacaa

SEQ ID NO: 254846 - DNA, 355 bp, Gossypium hirsutum
cttatacagttatacttatgaagttgagcagtaaaagagaaaaatggaaaaaggagggacaattgcagtggagaaaagaatgagaaacggttaaaagctttgcacgacattttttctattatttattcgcatctgatttgtgatatgaactatgagtttatgagttctttctatcaaaaagatctgtaatgagacttgagtttagtatacatgcgactacaagcaaggtgaatggctgcttgtctagacctcaatctcaatcagtgcaggacgtcgcttccagtaaatgcattggttccaatttccacggttatagaagctgataatattctcctttcaccggacgcgacatttt

SEQ ID NO: 254847 - DNA, 435 bp, Gossypium hirsutum
cccatagctccttcgatgagattgaggagattataatttcgttttatctcttccatctcttttcttttcttttattaataccctttttgttgtttaattttgtttttattttgtttttagttctctcttacccatccagtgatcctcagatttctgggtttgcattaaattttgcttctctgtaagaagatttctcagctttcagagaatttcgaaacaacaatgctgacgtgcatagctcgttccaagctacccggtgatgactcggtgagtcaacaagaggaaatggactcttccactactcctaacactaagcacaaccaagccatcaaatccctcacttcgcagttgaaggacatggcgctaaaggcgtcggtggcgtacaggcactgtaacccctgcacggcgcacagtcggttgaggaacatgggcgag

SEQ ID NO: 254848 - DNA, 302 bp, Gossypium hirsutum
  unsure (1)..(302): unsure at all n locations
cgtcctngctttggaagggcatgganncttcatagctacctanntcctgtttctaaggctcttgtcantctccgtccacnncaaagctttgtgactctcttggcggcnncctcagcnncagaatgacnntcggacnnctttnntggtcatcnnccaatctaaaatggcaaatggttcaaccatttcaaaacccacccaaaccctggactcnaatcgttcaacaaacagtcatgaacanntgtgcatcaaaagggacccagcaaggggtcatagtacccttgtcgagcccttgtaagcccaaa

SEQ ID NO: 254849 - DNA, 313 bp, Gossypium hirsutum
atctcgctgaatttcttagttggtggttggttggttggttggtggtgggggtggaggaggatgtggcctgcttaatgtctggcatcgggtggggccgcatgcgcctgtgatgcgtgccaaccgtggtttcggggattagtcggagatctgccagggtcgcttattggggaccttttggtttttcttttggtggttcggggattccttgggagggttgcgcccctttgatggagaagcttccttggatcaaccatttccataaaacacccggccgggaatggtttggaaccgattccatgcttggggttaactt

SEQ ID NO: 254850 - DNA, 163 bp, Gossypium hirsutum
atcttgctaaatttctcagatggtgatgggtcgaaagattgttgttgcggtggaagaggatgctttctagctgacgcctcacatgcacagggtcaggaagaccaaggtcatgctatgaactcgtacaaggattcttttcctcaggctgaagacattatcaagg

SEQ ID NO: 254851 - DNA, 441 bp, Gossypium hirsutum
aaacaaagcagttgaacccaaaaatacatttataatggtgaagccacaaaagccgccatctggtcgtacaaatctagcttcgtgtattgtagcaacggttttcttgatcttccttgtaataatagttcttatcgtttacttcaccgttttcaaacctcaagacccgaagatctccgtcaacaccgtgcagctcccgtcgttctccgtcggtaacaacaccgtcagcttcactttctcccaatacgtcaccgttagaaacccaaaccgggccgttttctctcactacgacagctccatccagctgctttattcgggctctcaagtcgggttcatgtttatacccgcggagaagatcgaagcgggtcggacccagtacatggctgctactttcgccggtcagtcttttccgttagcgccaacgaatgaggcatcggcggcgac

SEQ ID NO: 254852 - DNA, 412 bp, Gossypium hirsutum
tgcatatataaatagcgacgcgaaaaatagaattagcgacccaaaaagaaaaacaagaaaagagcttttgcgggaatggtgctgcagagattagagatgtgcgtggagatggtgaaactagttataaagtttgtcatcgttgtggctgaagctgttgggattgtcattcaccaaaatgatagtaaccggcccgtcataatgtcgatgcctatccgctctcatgcagctccttcggttccatttgttgggtttcttccttaaatttagttttttttggaataagttctgggtttttttgcttctatgcgataaacaaacagatgattccttcttaagtatgaaaactttgaggttcgcaccttttctttttttctttttccctgtggttgtaattcaatttgagtgtatatgg

SEQ ID NO: 254853 - DNA, 390 bp, Gossypium hirsutum
ggaaaaagaaaaaaagtcaactttttttccatgttgctttttaatttgagtttggttttatggttaaagtgaaaaggaaaggaagatttagttttcacggaaaaaagtgtggattcggttcagttcagtagactgtgatcggatccaccggaggttcatgttctgctgtgattggaatcaattggactgcaatttgtaatgcaatctgttgacgtgagtaaggaaaagaatacgaatttgaaacgatcaagatcactattcgtgcacgatatgcccgtgactgacagcactgctgcgcgaacccttgaccattattatattataactgttgaagatatagttcaatcacctttacctgtatatgtagcacctacatctgttagttttagt

SEQ ID NO: 254854 - DNA, 436 bp, Gossypium hirsutum
caaaagtttagggtttcaactatagagttaaaacttaaaagagtgatggaaggcttaatcccttatctcatccatgccatgaagaagcaaaagcctggccacaattacaggtcgacgtcggtgggatctagccgtagctaccatttgttggagggatcgtctcaccggcgaacaatgtctgagttccagccgcctgcgacggtggaggttgttgagcaaaggtcaggtttggggtacaacaacggttcttctagtgttggttcctatgctcatcagcaagcttcagtggggaacactggtgatgttagacgacgatgattgggttgtttaaatgtttggttgcatggatttgtttatttattttgttgtgatgagcagaaagcaagagtgctgtaaaatagggtaaagtttttcatctcaaataatggctttttgg

SEQ ID NO: 254855 - DNA, 290 bp, Gossypium hirsutum
cgaaattaaagctccaaccttatgcccaccaaacggggaactgtgtttgatggctggttgcgttattttattcaggccatgaagcttccaaagcgtgtccgcaaaaccttcatcgcttgatgtccaatacggacgcaagccttatgttccagtcccgaacccgcactggtatgaatattcactcgagctgctcccgtgagaaagaactgctacccaacttattgacgggtacgacagcgacttccacggtttctcggctaagctcttagcgactgaagcccttaaacttt

SEQ ID NO: 254856 - DNA, 418 bp, Gossypium hirsutum
cggacgcgtgggttcccttagaagttgcgccgtttcagacacagccactcaaaggccccccgatcccacacccgatctctgattacgacgaagaggacgaggattcggcttcacaacaaaggtacgggtacaaaggtgcgcgggtgcgtggcagatgcagagggtacagaggctcacgtgaggggagcggctcgaaggtgcggttcgtgcgagggtagagcctgcggtgcctagatcttctggaaaccctaggagttttccgtttctgatttgggttttctggtgttgggccatttgggccgatttggttttaggtttttattttttctactggtttatttttggattacaggcccgggaaaatattgggccttacaggtataattccagttcctcaattgagttaccatcatgttcc

SEQ ID NO: 254857 - DNA, 374 bp, Gossypium hirsutum
aaaaaaaaatgtgcccgctgaggctgatcctcatattcctgtcggcaacactcgccggatttttcctccttagaaacatcaaatcccagccccaaaccaacgatgacgatcatacccgctccaacaacaataactcccactctgctttctccaaggtttgggcagctatagaatcaggattctgggcatctcttgacatggcaagtggtcgttacttgtggaggcatctggtttcctctaactccaagccttcctcttgattctgcaaaaaaaaccattctttgtaatggcagatgatgcagtgaaataaggcatgataagaactgcgggtttcaattatcttgtgccatacttatggttgtggatattggatg

SEQ ID NO: 254858 - DNA, 307 bp, Gossypium hirsutum
tttgtttctcgtaaagtagtactactgtttctttattcaactgcttaattgtgtccctatgaagaatcctttgggttctcttctaagcttcttaggtttaaagaaaaagtcccctcgattagaactaccggagggcttttgctgtcgtttttcactagcgcagatcaaagccgccaccaacaacttccacccactctcaattattggtgaagttcgttttgggactgtttacaaagggactctacatgatggaaccatagttgctgtcaagcgcttgatgagatcgtcatatggaggaggaggagag

SEQ ID NO: 254859 - DNA, 417 bp, Gossypium hirsutum
aaaaagagaaaataggaggagtaatatggttggggatgaagagtaccacttacatcatatattttatttacatcaaatttcccataaccttcatatctactcttgtttcctctctctctttcacttgcctttgcttcttttgtttgtgttttaaggaagacaaatcttcctcttttgcttttccactgattttcgtgatgaagtgcgccactatgacttccggatttgaaccctcgccgtccaaagacatgccagcggcggaggaggaagaagacgattggaggagttcgtcctcccccatgacctcctcttcgatcgggaggaacagtgatgctgacgtgtctggaagatcatcggacggcgacgatgaaaatgaggttcaaagctcttataatggtggtttaaacatgatggatt

SEQ ID NO: 254860 - DNA, 313 bp, Gossypium hirsutum
cggaacttggattattttgggcgaaggggggggaggatttgtaatatgacaatttgtactgcatcgaaaattgaatcgtttgcatcaacgaggaaggaggtgctcgcacatttcattgaatttttgaaagaagcttgattagcaaagggaggggcaaacattttttagaagatttgggcgcttaatgaaaagacttatagaatgggtgtatttgatgttaaaaagaatgagggatttaaccaacaggtggggcttgttttttttacactcacagcactggctttgaatatagcactttttgaattttttctgt

SEQ ID NO: 254861 - DNA, 336 bp, Gossypium hirsutum
cttggtaggattttctacggactgacttgcatgaatgatacgcgatgctctaccccgtgcactagtactttggttagtgataaggtgctccccctcacgctgctgttttgccgtctttcacgtcggagggggatgcagtttgagctgcgggatcttgtggcctaggcgccgactactaatgtgcacatgttgaggctatactgacgtgaaccctctttttccaccggagtactgagtttacaggctgttggctgtataatcgtgagttcaactggattatgtggttgttgtcaaagcatgatggggttattccagtgggcatttttttcagcatac

SEQ ID NO: 254862 - DNA, 348 bp, Gossypium hirsutum
  unsure (1)..(348): unsure at all n locations
agaaataagaatacataccctagggtaaataggacattcgtcttgatggtctgtttcacgactggtacccatntctgaactaaatgctatgggttttatatccaaagctgaaccttgtaaaagaggggacttaaaagaacacaagatttgacaaaaggtgaacgtttcactcttttttttttaattgcataattagagtaaagtaaaaagtggaaactgcatggtgaaatgcattggtgaaagcacccatatctttgcgaaagtgcttgagagaaactacacggtgttggtggtgagaatggctaattctgtggaattgacaaagaacgacaagaatttcatcaaaac

SEQ ID NO: 254863 - DNA, 171 bp, Gossypium hirsutum
gaaacttcaactatttggggggatctgaattgtaatttgttgaaggttccttaatgctttagacctcgatctctatttaaactcctagcacccctctgccataaacaaaaaaacaatattatttttatggtttaatggagatgtggacaatccaaagaagaaacccgggtc

SEQ ID NO: 254864 - DNA, 404 bp, Gossypium hirsutum
ctttgtagtatgtttctctcacacgtcccatctccttcctttttctctctttctttgttaatggaaatcaactaatcggcgatcatctcttcctctttgtgaactgatcgctgggtaattctataatgccaaccttcattttaagcttcctttgcttttcaatgatctcgtctgaatattgaccgatgattttgtttttgaaggtcacagcgagaagttgatatcattttttatatttatataaaatttcttaaaaggggttcggtgtcaaagctgagtcataatacgaaatgctagatcttaatctcaatgtcgcgtcgcctgagtcgactcatggattggactcggcggcaccttttactgatgagctcaacaaccaaggttcaaggaaccaaatggaccaa

SEQ ID NO: 254865 - DNA, 338 bp, Gossypium hirsutum
ggcagagagctgcccttttattcccatgttctatgctctcttcagtctctcccttttgacctttatcttcttcataattgttgctggtataaactggggaacagttatgactttgcttctctttttaccactgtctgtgtttatccaaataaaagattcatttcatggccaggtgaagagcatccatcagttctagttagtcggaccggaccttttgtacgttccatttcatggtcaaatgaggagtgcccatcagtttgtcaacttgcctgattctgctcctttcttttgatcctatcataggtatgtcttgcttgaagtttatcaggtttcttttt

SEQ ID NO: 254866 - DNA, 266 bp, Gossypium hirsutum
aaaaaaccgttgaatctcgggaagaggccgaccccgacaccgacgccgactcgggtcacgcgctaagtcagcgacagcatctgccatgaaactcgagcctatgagctcagacacatgcagagaatggtgtcccgcgcagggatctaatgagagaggtggctggacatgttccgtggacaagcaaagggataagggcagggggagttggacttcactgatactatggcatgctcattagaacgatgccgacgatgagcgaaaacttc

SEQ ID NO: 254867 - DNA, 228 bp, Gossypium hirsutum
agccgctcctcactttccgaaccagacaggcgcagatcctgtcaacccatcgaccatgacaaagagaacgaagaaggccggaattgagggcgaatatgttacacaccttagtgccagattgaggatgtatattaagaacatggaggcgtgtcaacagtctgcacttctgggagagctggggaaagtattcattataaaaaacgaatgtattatgagatgatgtgggga

SEQ ID NO: 254868 - DNA, 292 bp, Gossypium hirsutum
  unsure (1)..(292): unsure at all n locations
aaataaattcaaatttcattctgttattttattttattttattacatattttgcgagatttagaacgattagcgaaaatgaatatcttcagattagcaggggacatgacccattggttaggggtcttggtttggttctttagatccacacaaccaagtcttgtgctggggtttttctgtagactaaagaacactatattgttgcttttttactcggtgcttggncatatttactaattatattttaccttattacaaaatcatgaagctaatattcctgggcaggttttttt

SEQ ID NO: 254869 - DNA, 262 bp, Gossypium hirsutum
agaattaaacttttctgcgctcttttgtctttgccggttcctcctaatgtggtgaaccctgctggggaagatgtcagccagaggaccctggagcaacaagtgcttcttaaacttctactagttggctatcaaaaatcaggcacaagtaccatatataagcaagccaagattcttggtaaaggtcctttcttaaaaaatgaacgcccaaatatcaaattggagatcccatgcaaattgggtggatatcttgctatattgcttg

SEQ ID NO: 254870 - DNA, 217 bp, Gossypium hirsutum
agccgctcctcactttccgaaccagacaggcgcatatcctgtacatcccagcgaccatgacaaagggaacgaagatggcctggattgttgacaagaatagtacccgttatattaccaagttgaggagtcatattaagaagatggatgtttgacaacatgaagttcttttgaaagtgaagtggaaagtgtgcactgaaaagaaaggctttcagaatgt

SEQ ID NO: 254871 - DNA, 288 bp, Gossypium hirsutum
cacgacatacaattgatatagtgtcacctaaggggaagtgaagggtgcgcaacaactcgcactctttcttacagtcgcactctaattctaatattagagggtataaattaggataaggtctaaggtgggtgagtgagtgagaccagatccaaacctatcgtcatttcgaacggatgctacttctttattgcctcagggcgctgctcttatactattttcttggttggatggatgggttgatttatacacagtggccggttcaaaagtcagaaacctaactgcaactgc

SEQ ID NO: 254872 - DNA, 416 bp, Gossypium hirsutum
ctagaacataaattcccactctcttttatgcaaattagggtttaaaattttgctgatattttcgagttgcaatggatgtagaagatgacacaagagagggcttggcttcctccattatccttcaatctttggaatccactcggcagggagataagctttctgatgaggatttggcttgggttaattcttgtctggttacagatactgaaattttggaaagaaattggtcttctttcaaagatgttttgctggagatcattggtgaccaacctgagccacttgactcttctgcaactggaagcaatggttttttttagtgaactgaaatcagatagctccttccatcaaggaggcagaggctgccaattacttcaggagaactgatgaagatcttcttgtcatttcagtggatggag

SEQ ID NO: 254873 - DNA, 360 bp, Gossypium hirsutum
cggacgcgtgggttcggccaagccccaaaaggagcacgggatgtgcaagacagagcagttttttggggggggggggttgtttgggcaacaactcgtactctatgttacagatgatcccgtcgaactgcatatatacggagatcccaagggaattccaattcagcaaaccatgtatcgggatacccctgctccttttaactgcccattttggggtaataccggactcactctggtcagatctaaacctagcctagcagcggttgttggatgcatgatgccatttatgcttggaatctgctttctttgcccttcaatggactgcctttggcataagtattattattgtcccaaaagcactga

SEQ ID NO: 254874 - DNA, 289 bp, Gossypium hirsutum
acgcgtcggctgggcaagggccaggacccgtatgagtaggagggcgcggtggtcgtagaaaaaccctacgcgcgagcccggtcgtagcgagctttaatggagatctaggcgggcgtatcaaatatttaaaagagatctttgaatggggaatcgggcggtagatattaataactggagtggtggaatacatgttacgtcatcttaacttgactcaagttgggggggaccgctcaaggtgttgaaaagtttggggtagaatacaagcggttaaggacatttgcttttgttt

SEQ ID NO: 254875 - DNA, 315 bp, Gossypium hirsutum
tcgccatcatgtttgagggaggtgtgggataagatgactgttctgctccttaaagaacgataccatgaggagacggtttttgatttgcattagcatgcgaataatggctgttcgttataaaccagaacctgctatatgtggtctcgaatacgcgcctactttgatttgtttgctcgcatatgatcttagtgataacaactcgggattatgaatgctcgcgctgtaatatgggttttatgaatccggttttgcaatcttcaagggagggtcatgctgaatatagaacgcctagcggtggaaggcttagccagaatt

SEQ ID NO: 254876 - DNA, 368 bp, Gossypium hirsutum
gctggtggggctacaaaggactaggaattcactttgctactccttagaacaatacattgtaccttgtttgagctagggaaagagcaatctgtggtgaggtagaaccacaaggggccaattttgacagggaagatcacaatttatcaaatctggtacagataggtgtacccaacccagcggtccataatacatgattttatcaactctgtgagctctgtcgtataaaacaaaattatgtcgggacacttttggtgacaaaccccagggaaaaacaagtacgggtcctgcactttggatgagggcaaacaacttctccttgcaaatacagcgctcggtaaaacccttaataacgcacacttgtcagcgac

SEQ ID NO: 254877 - DNA, 170 bp, Gossypium hirsutum
gaagtttcttttttcgattttctatttagccaaccaggatgcaaattttagttaggactctgaccggcaggacgatcactctccaggtcgaaagctccaattcgttccacaagatgaagaccagaatccaaaagtgggaaggctattctacaaaccagcggagagtgatt

SEQ ID NO: 254878 - DNA, 425 bp, Gossypium hirsutum
gcattctccatgctgtaggccagatggaaatgcgatctgatctcatggatgctcatatgtatgcattcaagaggtctgtcctgcaagaagttttagacataaaggatacgtttcaaagcttgaaagaggatgtacttccttatcttgtccggagccagctgaaatccgaggccttactaaatagaacaccgcaaggtgaagaaaacagtaacgagaaggttagttcccagaacaatcaagcattcatctctcgaatccttgctaacgcatctaccccaagctttcacggactctattctgagaatcccgatggttcttcttctactcggaaaacccataaatgctgtgtttatattgcaagcagcagcagttattgtgtgcgcttaaattccattcaagcttttatggacataaatcgatatgtc

SEQ ID NO: 254879 - DNA, 185 bp, Gossypium hirsutum
gcgaaaacgcgtacctctatatgtgtgagaaattcgacgcaacacatggcaacataccaggcatagacattgtaaggctcgaccgcctgctaactcttttttgtttatatacgcggtgcaagatggacaaaaccagtttgttgctccttctggtgggctaacctctttgacgagcgctacaaccc

SEQ ID NO: 254880 - DNA, 329 bp, Gossypium hirsutum
gagccagatgagtaggagggcgcgatggagcgtaacacaatctgatgctcgagccgcgtagcggagcgtcgcattgtgactgtcttgcacagggccgtacttattcgactcagagcaaggcctgcttatatatgctaaagggatcctaggacacactgcagctgtgcattttgctgtggcattgagctaaagcttgcactgaatataatgaccacagggctggctctatgagggattttcagactgaagaacgcactatgtatcaccagcattggctttctacagtgttgaaggaaagatataatgtgagaactatcaaggaaacactt

SEQ ID NO: 254881 - DNA, 168 bp, Gossypium hirsutum
ggctacaacaagtcgccggttcaatggatcacaaaataactttcttctcctgtagacggacgaggcctaatgctaattagactggaccgtggcataacctattgaaattagaaagcgcggggccaaaaagccaaaaggagttccaggatccacttgggggtgtacctt

SEQ ID NO: 254882 - DNA, 312 bp, Gossypium hirsutum
acggaagattggagtttgcttctttttttttaaacaaaagaaagggaggaaaaccagcccttctttaacccatccgcgcccggaaggggcttgccaagaaacttaaggggggaaccaaaaatgccccaacccggctgccattaattaacctttgggccatggctttggttggcctcctggtggggtggttgctttttgatagaaaaaggtggattaggctttgaaagatattttggtttcaagttggtgatttaggatggattacactcacctaccaaaggattttggggctccatcccaggttgggaattt

SEQ ID NO: 254883 - DNA, 328 bp, Gossypium hirsutum
catctactgcttctctcatggcttcttgcttggctccggtttccatctcaggtggttctcatctcaaggcacgtgaggtttggttcactaagtccagcacctttgggaaaaaaccaagtttggtagttcgaaggaaaccattgtcatcgaaaaaccagttttcagtttctgctgaataccgcaatggcagcaggggtggaggaagtgattttgttactggttttcttttaggaggtgctatattcggaactttgggatacgtttttgcacctcagattagaagatcccttctaaatgaagatgaatacggattccgtaaggcaaagcg

SEQ ID NO: 254884 - DNA, 248 bp, Gossypium hirsutum
atcggaaaaagtggaaaaaagcgtcgtcgttttggggtcttattattcgtcgtcttaatggctctgtctctatatgtgactctgaagctccggtacttgctttcatttactcagttttagtaaaaatccaatcacggtgacaggtaaacaacctctcatctgctataatggtacaggcatcttgaaaggcgcttgtctccataaatgataataagagacaagggatgctactatgaatgaatggcccg

SEQ ID NO: 254885 - DNA, 257 bp, Gossypium hirsutum
cttacagctaagcttcaagcaaaatatggggtttgcagtaacaactaaagctgcctggctcctgcacctatcccttttcgtactgagtagcttcacggtgtcttatcaaatcttgcctgagggtatgcctccttataaccatggaatcttgacaagagtgccaactgatcacacatcaagcctctattactagagtcaccatgaacgaccgtattcgtatccgaatccgtattcaggtccttatcacccaaccattt

SEQ ID NO: 254886 - DNA, 293 bp, Gossypium hirsutum
gaatacttaactggaggatttagaaaaagaaaaggcagttaggtgtgcgaaccgctggacctcacggcctaaagcgcagacaaactgctcatgcatgcgcaacctacaccttgggtatcacctggagacaacgggtactcggtccatcatttatggcgttccaccagtgcagatgacctatgcgggaccagtggtgagccctactgcatcatgacatcaatgcaagtgtgggtcaaatagcgctagtgatccatgctaatgccataactcgaggtcaaagccagcttttgtga

SEQ ID NO: 254887 - DNA, 271 bp, Gossypium hirsutum
aaaaacccaaaattaattaatgagttggcgttgcaatcacatactaacgcagcatgattcatacaataccgcttccctttatttaatgatgatggaatatagcaagagctgccgccgatcacggccgtgatcttgaatgacataagggcattgactaccctgcgctgccgcttactttgttaaacatatgactgactactactacttagtcgacccattgaagagcgttgaaaacggacgatgctatatatgtacatgcccatcctgctcc

SEQ ID NO: 254888 - DNA, 389 bp, Gossypium hirsutum
gggaccacgcgtccgcgcctccaaatctttaaaacctttatacattccactggggcctaacaggggtcctccaaccacatggggtaaacacgtggtatgggagctgggcgcacgctgaggacccaccacaggctgcagaggtgggctgtaaaggcatacaagaagtctaacccttggaatgaaaggactgaagccatttggcgtttcttttcacatgctaaatggataggccattgaaaaagtaatgttcttacggctttaccttttcttagctgtgaaatataaagttgtcaaaagtgtaattgaccatattcggcttgatgattgatttactcggtacagcattcttcatgctatataaagaaaaccccaaaaagcgtaacttgatt

SEQ ID NO: 254889 - DNA, 206 bp, Gossypium hirsutum
ggccccagccatagacacaggcacagccacagccacagccgtagaagatctttataacatcggcgtagcatctgaggatcgctcaaaagctcttctatgtacgcctaatcgtatgtggaaaggtggtgttagtgtataatgcatacagaccataccacagatattaatgatagataccacgcgaatattacaacggacggcactgg

SEQ ID NO: 254890 - DNA, 375 bp, Gossypium hirsutum
aagattttatagcctgttgctgtgccagctattgcttttagatgccaagaagatgagtaggtgactattgggtgagggagaagactaacattggcattgaggtgatggagcacgtggggtctactaaataaccaagtattgtccatcggatcaacatgctcgacggtctagacaggtgggagcatgtaaggatgaagaaagagaatgctgatatgaacacgaagctgtatacgactcctttgtagcgtgagatgctcaaagctgacccggagcgaataatcactagtgttattgatttgagcggactggggagcacggattgcttgcgcactgagggtgacgcccctagacgccgggtgtttgtgaagggtttga

SEQ ID NO: 254891 - DNA, 426 bp, Gossypium hirsutum
cacgcatattgaaaaagcaaataaaaaaataaaagaggttgctattctatttttttctttaattttgattgcaaactaaaacggtgcggtgtagagggggggaagactcgcgcgcaagcccaatccataggctggatccgcgccttggtgtttcggatggtaaattttcgtgtcaagtccttcgtctttgcgcaaacttttcgttgatccttatttatattttattttgtttcaatttttctctatagtttgcgtgactttgcaattaggtatgcacttaggcgtcatgtttgggatctggattattttcagttttgatccctgagcgttcgcgcgtactgtgattcagttattatttcaatagtttatttatttattaattaatttttttaagtttgattttacttcaattaagtttttctatca

SEQ ID NO: 254892 - DNA, 427 bp, Gossypium hirsutum
  unsure (1)..(427): unsure at all n locations
aaataaacagtaaaaaagcaatctgctgctctgtttgggtttttttcgacaaaaaatcccaacaaaaccgctgccgttgttcaccttctccaaagcattgccggtgaattgctgattatcttacccaccccataaaataaaagaaggaaaggaagaacaaaaaaatgtatggaatcacaggttacagtaatggctaccaccaaaatcaacagcagcacagttcggaagagaagcgaggcggaggtcgacggaggaggggaggccgtagatcacgccaccgtcccggctttagggtttccgaccaccatcaccatcactacaataacgatgacgacgatgacaagcaagagcagaaagcacctncgccttgcacggacttcgacatggcctactttcactcttatgctcacgttggtatccatgaaga

SEQ ID NO: 254893 - DNA, 336 bp, Gossypium hirsutum
ttttatttttggctgaaaaaaacaatgaattgaaaggtgtctcagctgttcctctttacacttgagctgaggggaaacacatatttactactatatatataaaactcccaccacaagggggggaaaaacccatatattttaagccatgaaacagttacacaagcaatcaatctttaaccataggcgagatgaagagattttaatacctcacacactttcttactcacccaattcctaaaaacaccccagatctttccctagatccattttctttaaagaacaacgccttttggttttttttatgggcattttaaatgggtatactttttttatcct

SEQ ID NO: 254894 - DNA, 334 bp, Gossypium hirsutum
ggatttcactatcactcttgacggcagcaaggctttaaatgaagggggtggggttgtctccttgccgagagaagcttacctatactgtaaatccgagatctgcagcgccaatgtaagtaccttaattagtattattcaacttagattgaaggaggggacagaatcccagcggggctcttaagaatctttcgttgtcaggactaataacgcaagaatcgtatggtacttaagaaagacattggtgcagagaaagaagtacggcaacctggcttgttatatatggttatttgatgccatttgttgtggcagaagggtatcagattttaactggctg

SEQ ID NO: 254895 - DNA, 416 bp, Gossypium hirsutum
caaggttcgaaaggcaagccaaagtccatatataaaaagtaaacacagatttgcagaaatgttgaagcaagtttctttgatttgctttcttattttctcttgttatatgggagttgagtccaaagatttgaagcatcttaccaatgaacttgaagtaaatgtggcagcaagtagggtttgggagctttataggcaccttgggatttccatgcttactgctcgagagctcaaaactgtgatccaaagtgttcaagttttgaaaggtgatggtggtgttggaactatcctcaaactcacttttgttccaggcaactcaagctatactgaaagattcattaagattgatgatgaaaagaaggtgaaagtggcaaagggattggaaggagggtgtcttgcaattggttgctcggatcaaa

SEQ ID NO: 254896 - DNA, 380 bp, Gossypium hirsutum
cccacatcccccaattatatattttatcccaacaaacatcttcccaatcccaaactcgatccgatccatcccccatatctctccgttcatattgattcctcgtggcacctagctatctatcaaagtattttatgtatctcccaactacttagcatacatcattcattcaaaatcttttgagaaaaaaaaggtggatcatcgaagacatgggaaacggccactcccacccgaaacatcggcggagaaaagacaaggacccgatgacttcagaacagcttcttggcctgaatcagctgattcgtcagccatcgttacggctcttagtcaagtgataggcagcgatgatcagcagctcattggtttcccacaatcatcggcgc

SEQ ID NO: 254897 - DNA, 397 bp, Gossypium hirsutum
ttcattcgtccgcgaaaacccaaaatctctgcaatttccccgccgtgcctgaaaaacgtaaacaaaaaaacaaaaaacccatgtcggctaggttactgaagaaagtcctgaaagaacaagaacaaaagaaacagcacgtaatcgaggaagatgagcaagacgagcttctaaacgacgacgaatcggtgtccccagattccggcgctggttcttctaagaaccctttcgacctcctcaacgaaggtgatgacgccgatgaagataacgccgaccaggtttatgctgatgagacctcaacccgaaaacaagaaccgccaccatcagtgaaaaatgctcttaattcggcttacacatctaataacaaatcgaagaaaaagaaacaaaagaaaggaaaaga

SEQ ID NO: 254898 - DNA, 384 bp, Gossypium hirsutum
ttttaatgcgtatagtggtggatgcgagtgggctgagtttggaagcagtgactggtccttcacgtatggagcttgcagaagggatctacatgcaccatggtttgaggatagaggctggggaaacgaagaactttcagctggtcttatagcagcacaggctgtttcagcactgcaaatcacagaggacgcagatgtagtagacaccatcgtgcttgacagaatgttgagaggctagcctagcattttgttgttatatttgccactttccatgttgcttgctgtctttttatcttttattcataaatctgaataatggatctgtatatatatgtcatgactttgtcacgcatctggtgcttggtgcttctttatatattaaacttt

SEQ ID NO: 254899 - DNA, 227 bp, Gossypium hirsutum
tcgttttcctaccaagtgaagagaggagatgagactagacagttgaaaagatgaaccagtgcgtcttcctcctcctgtccctctcatgactcttctccttctccgtgacagctgcccccgggcctgaaccctctttcatcaccttggatacccatatggcaaaaccggtttccataatgccaggcagctttgattccggccttcagaaggtctgctccgccaccgat

SEQ ID NO: 254900 - DNA, 340 bp, Gossypium hirsutum
ggacgcgtgggcgcgatcttgtctagttttcctttcccagccattctcccccttctctccagcggcaacggtcaccgcagcactcaaccatcctcctcctttttctgtttttgaagaaattattttttttgtattattgcataatcaataagaagaaaaagggcgaccgatttttgatcgatttagggtttcagcggtctctttcatgatcggattctttcactccaagaattcccagacgcttaatcctaagcttcttccatccatcttctgttaccgatacaaaaattggggattatggatttagacggcggcaacaggcgcgtttttaaccgactcg

SEQ ID NO: 254901 - DNA, 333 bp, Gossypium hirsutum
atgtgcttttgtcaattgaagaagaagactgaaaggtaaatgatgggtagaaatcttagcccgattttgcggcgagagctggcaaatcttgacaaagatgccgatagtcgaaaatcagcaatgaaagcactgaaatcatatgtgagagacttggattcaaaggcaataccggtcttccttgctcaagtttccgagaccaaagaaactgggtgtgtgtctggtgaatacactatttcactctatgaagttcttgctcgtgttcatggtgtgaagattgttccacagattgatagtataatgtctactattatcaagacattagcttcaagtgca

SEQ ID NO: 254902 - DNA, 326 bp, Gossypium hirsutum
ttataacttaaacctaactttaaggcctgggaaaagaagcctgccaatgctataggtgatgatgtagctattaaacataaggctgcagaatcaacggcacacggaagaaatgaagtttccgatgcctataatgaagcaatcaataaggtaagaggaacatatgtatctgctgataagatcatgagcaaggatgttatggctaagtttgaggctgccatggagcaggcttcccatgctttaggtggtgctgtaggggtgatggaaggtgagcgaagcagaatcaaaatcacatggaagagaagaagattcaaatgcttatgatgaag

SEQ ID NO: 254903 - DNA, 483 bp, Gossypium hirsutum
ttggaattggaattggattcactaaccttggcaattgaaccacgaacttgaaaatattcggttaaatttgatgttttggctttcaacttttcaagctccgtctcaaattttattcattggaattccaggtgatgggagatgtttgttccgctcagtaattcttggcgcttggttgaggtcggggaagcaatctccaactgagagatctcaaaaagttcttgcagatgagcttagatctaaagttgcagatgaattcatcaagaggcgggcagacactgaatgcaagcacattaaaaaatcattttatttccactttctcactcttctctttccctccttaatcgcttaatcaagaacacccttagtactatatcttgagagataaaggtggtcaaagacctttgaattctgtaacactaaacattacaagcatttgataagttcgtggagggtgattttcgataactatgtagtgcaaatgcg

SEQ ID NO: 254904 - DNA, 369 bp, Gossypium hirsutum
tcgtccacgcgtccgagccctttcagacaagggaagaagaatctgaaaaaagaataacgttttttatagaggagtttccatttgatcatggcggttgctgagaacgctggggcgaaaattgggtcggcgggacagaatttggaaaacactgtagcgtcggtaaacgctccagacaaatcaaaacccagaactgattccgcgactgatgctaaagaagccaactttcaacagttaaagccagcagcagctaccatcaacgatggcgatagcaatagtaagatgcaaaatgggtttaataagaagaatcagcagcagatgctgacaaagacggctgggtgtaatgagtttagcaatatggaaaatgggggt

SEQ ID NO: 254905 - DNA, 359 bp, Gossypium hirsutum
aatttgggcagtagagtatacttatggtttacttgtaatttaggattaattatgctttatatgaggaacttgatgctggggatatggagcggatgagagatgtgtacaggtatctttatgttcttgcaatggatttatggttctgttggttgttactgttgctaaattgcaagtgaaataattgctttactaataaatcttgtcaactgaactctgcaagaaatttgccagttgcctactatttgaatgtttgcatgttttggtttcatgttctgctaacagtccatttcattaccatgtaatgtgccgataaaaagggaaaaaggaaggaagaaaatctaaaatttagcatttgatgt

SEQ ID NO: 254906 - DNA, 394 bp, Gossypium hirsutum
ttttggaagagattgatggagaagatccagtgaaaaaagctttcaggtccagtagcagttactcctcatacaggttcctgacggctattgtcatctgtttttggttgtgaaactggaaaccaaatagaatgtgctattgtgtttcagttgcttgacaagtttggcttttttgtaccatatggtgattggttgtcagtagaagatttctgtactaatttgtcagcttatttttatatttgaatgacatcatgtgggcacagggactcaattaagactaaatgaatggagaaaaatcaaaacaagattttcatggaacattctagagttagtaaacaatacaactctgtggagcatggaaatggggaaattcccccatgcaactcaagcatttatg

SEQ ID NO: 254907 - DNA, 321 bp, Gossypium hirsutum
tccacgcgtccgcggacgcgtgggttgcaggtagttcttcaaatcaaagaaggtttgttttgtcattttatagttgatcttcctttgctgctgatgctcttgttactaccattttagtctaggtatagggtttagggttataaataattcctttatttatatcaaattcatatttgtctctttattttacttccataacacttacgttttttagctttggtatttttgttgttaatgatggtaatatctgtctaattcctttacttgatccttttttagtgtgtttttatttatctgcatccttagcatgtgtaactaatc

SEQ ID NO: 254908 - DNA, 370 bp, Gossypium hirsutum
aaatagggttcactgaaatggcattagcagcatcccttagctcttcttcttgtatctgcttccacacccaactcccctattccaactcaaacagatacaaaacctcctccgtcaacttacctcttcgccttaatctccatgacaacgccccaagttccaacaaaaactcattgcttcttagtatttctgcctcaacatttgtgtttgtgggtttgggtctttgcatttgctcctccgcttccgcctttactccactgccccgtcacttccaaaaagtggacagcagttcaacagcaacactacaagaagaagatgatgagaaatcggacgcagcttttgagatttggaaatctaaatcttatgctctcac

SEQ ID NO: 254909 - DNA, 343 bp, Gossypium hirsutum
ttaataccgtcgttgaagctgagagtgacgatgatgacaatgacgatgacgacggtgataagaagagtaaaaagaagaatgaaaagaagaataagaagaaaaagaatagcaagaaagacaaaaaaatacgatgaaagtttccatacattgccggtcgaaagccttgtaaacgaaaagggtggtgacgggaataccgacgattcgtctcaactcgtcggctataatgtagtgacggctcaaactacgtttaaggggagttgggaattgttcgttgaaaactctggtgtttccgctatgcatgtggtgttgcttccgaatatcaatcaagctttgatttttgatg

SEQ ID NO: 254910 - DNA, 299 bp, Gossypium hirsutum
tcttttctagatcgcgagcggctgcccttttttttttgtgttttaatcaatcatatggacagccattgatccaaatgattgattaaaacacaaacaaaaaagggcttacaaatccaatcatttggatcaatggctgtccatattatttatggacttctaaacaaattccataaaaacaagcataaagccttgaaaaatggcattaatttgcagtctggtgcacgactgatcgtcaaagttcctcgctctagggtttttaagcttcttgctcggttcttgacggttttggctttgacctt

SEQ ID NO: 254911 - DNA, 399 bp, Gossypium hirsutum
tcttttcaagctaagctaaaactctgaactttccccttctcagtctcctcagggacggagaaagattaaacgaaaggaaaagaaaaagacttcttctttttttccctaaaagaaaagttgatctttttttgtttggttcgattctctttagccatttcctttttgcatgtagatgctctttggtagccttaactcgccacttcgactcacttcaatccatggctaataaccccaacgagtcccccgctgatgatttcctcgagcaaatcctcggactctcccactttgcgcctactgagactggcttagcggggcccgacggtagattgtctggaaacgccacgacggctggagcgccaatgcttctgcagctcagctccggcgggggcaccggacaca

SEQ ID NO: 254912 - DNA, 381 bp, Gossypium hirsutum
tccatgcgtccgcagatctaaaggcaacatattatgattctcttaaaacagatgaagagcgcttgaaggtacttgacccaagggttgttcctgaccaatggccaagtcttatctcatattggagctctgatgacacaaagaaacattgtgctacgaatagggctaaccgtttaaaacagaggagtggacattcttcagggactaagagttatgcaaggatacttgaggaggagcgaaacaaaaggcctgatgggaaggagccaactagagctgagctttatatcttaacacatacacgcaagaatggacagcctgttgatgagactgcagcagaattaatttcaaagatccctgaacaggaagctaagaaagagactacct

SEQ ID NO: 254913 - DNA, 330 bp, Gossypium hirsutum
tgaaaactatcaacactgactcagctattccatcacttgcagactcactgctccactcttaagcaagcaaatggaccgacattcatccgacgaagacgacgatcgccaaaccttaatccaccaaaacgacaccaagcaccttccacgccaaatctcaaccagcccacgcgcttccaccgctccaagatccggtttccacatcgaagagctggaatctcaaatccgacgacgtttcaagctcaccttcaacaagcgttacctcttcgccatcttcctccctctcgtactcatccctatcttcctctccaccgacattcgttccctcttctc

SEQ ID NO: 254914 - DNA, 394 bp, Gossypium hirsutum
tccgatcccttgggtttcttagcctccagtgcaccgccgccgcagccatgaagaccggtggccgacgacgaaggaaaagaggtgaaagacctcggccttagaataccccgagggctgaacccttcaaccttaaacaagaaaagaggaagattctcagcaccctctagatccggcggtcgcaaaggaggagaaccctccgtgagccggatcccagcgcttcctcggtgtcagacgcgtggacgaccggtggtaggcgagccttgggcggtggctgcgtgtgaggagctggagcggcgtacctggcagaggtgtgcatgcggctagggctaggtttttttttgctgaaacaaattgtaatttactgggctttgggctggaaattttgggttatttt

SEQ ID NO: 254915 - DNA, 342 bp, Gossypium hirsutum
tccattcgtccgcttcttcttcttcttcttcttcttctctgaaactcaaacactttgctgcaaatgcttcaatctctcctttccctcacttctacttcccctctctctctccctcccttccataacccatcttgttccccactcctccaaaaatccacttatttctcccctttatttccccattccaatgtccatcttcgcccactattagctctacctcgagaagaacctgtcactacccccatagctgaagaaaaagaacacgaagaagaggccccaattgagttacctacatcttattcttccttttcttcttcttctcctctccaaactgccaccacc

SEQ ID NO: 254916 - DNA, 358 bp, Gossypium hirsutum
gtatggttggcccctccctctcctttcaagccttgtccatgaaatcaccatcttcttgtttttcctccataagctccatgaagatgaaagctctaattcaaaccctaatctacactcaggctagtcggctcattcgagcattttccaaagcaaaatccattgtcattcaaatttacaaacaaaacaatcctatccaacatctcatttccatctccaagaccgcagagaagaagtacaagcacaacaagctattctttggttcattcaggctgcactataattggtgctcttctcacgtcacaccagttccagctccagttcttgaagggtgtaccactactcatttctactatgattc

SEQ ID NO: 254917 - DNA, 101 bp, Gossypium hirsutum
aggacatgttatttgtccttcaaatcttatcattcatcagaagctttggttctggcaaaacatatgatgaatgataagatttgaaggacatgttatttgtc

SEQ ID NO: 254918 - DNA, 332 bp, Gossypium hirsutum
tgcatacagaatctgatgccactcaccaaactaaaaggaaggtgaatgaaaatagtgatgaaattttgcacaattcttctcaatgtggcctcgaaagcggtcctgaaaaatcgactaacaatgacatggatgcgaggccctcaagaaaacctatcaactctgcagctagtaaaaagaagatccgaaattcagataatggtactcggtctatccatgcgaagcagagccttgtaggcaaagaacttcctacttttcctggagaagtgaaggtcgaaagacttgaaactgagtatgaacatacaacaatggatggcgatggcgatgtctttggc

SEQ ID NO: 254919 - DNA, 393 bp, Gossypium hirsutum
gtatcttttggcagccaggatggccgaaagagaattgtggatccgacggtgttgaccacttgctcacaggagtcgttatccatcgtagtatcaattactggcaaatgcatatgtcccgaaccatcatctcggccatcgcttgaggacgttctttggaacttacagtatgcagctcaagttcaggctgcagccgatgccgatcagaaatccgattctacatcgtagtcaattgtatatggttggtacacaccggatgttttgttttcggagaaacctgctgatactgctcggataaagctcttggaatgtgctttcctatataaaatgagttagagctagagatgtaaagctgaaaatgtcatattttagaccttataaatggaaaattttggt

SEQ ID NO: 254920 - DNA, 514 bp, Gossypium hirsutum
ctgttttttctttttaaaagaaaaactcagcgaccggggggaatcaaatctcgccggagggtcgcttattctgatcgtcagaatttgtgagttgttccttttttttcaaagctgccgagagaattgaatttcattttttttcaaattgatgttaaatggttatgtaattatggttttgtagaagaaaacaaaaaaccaacaaaaaaaaaaaaggggaaagtgttctctctctctcttgtggcgagtaatggcttgcaatgcagggaaaaagatgatgagatcccttgctttgtcttcttcctctatgccttgattttttttacccttttatctctctcggaattgctctttaaaaaaaaaaaattgaatgagtgttgctttcgacctgggtatcaattcatgaaacggcttgcagaaatttgaacaaattttgttttggcttcaaaaggtccatcaagtcaggtggagttgcaaccggcaaatgttggacttttagctttcagtttttcagatt

SEQ ID NO: 254921 - DNA, 461 bp, Gossypium hirsutum
cttacattaaaaaaaaaaaactccccattacggtcttatcttaccccttccatttttaatttcgatttttccaaggcttacaaggaaaaaataaaaatttccagaaattattaaattttatatataaaaaggaaaacccactataaaagattccaagaaattgagtcttttgatgaattcatcagtagtgtatctctttttgtttggttcctcggaaatctaaaatgcgaagaaacgagtgtttcgtgttatgaatcgagctttgtaaacggtgaagcaaacgagtagaaggagagagaattttgttttggaagatagaaattgaagggttgggagaaaagatcagagaaatggcgggagagaagaggagattcgcgattggttacgcgcttttgccgaagaaagagaacagtttcattcgagaatctttggtgaacctggcgaaatcacgaggagtggat

SEQ ID NO: 254922 - DNA, 410 bp, Gossypium hirsutum
cccacgctttcggttaaaaactggttttccactgcagtggcgtgtaccaaagagagagagaatgaagtgtcagtaggccatgttttccaccatatcttgccttaaatgacaaatattgatcatctcccactctattcaacagagacccaggagcacattgttgttctttaagattgttaatttggtgagatttcttcgattttgttgatgaaaaaaaaaaaagatgaagactgaagaaaaaacagtgacagatgaacatgatgctggtgctgctgcaagacgaggaacactttctgttgctattcaacaggtggaagattctttctgactaacctaggaaacagcggatgctcgaagttggaagcgaaccaacctctttctcgagatcccctcgagaagtttggatgatt

SEQ ID NO: 254923 - DNA, 379 bp, Gossypium hirsutum
cccacgcgtccgcattttccagctccgtcattatcttccaatctcctttgttgtgcaagtttaaatcgacggcgatagagtgtgctagctaaagagagtagtaaaaaaaaaagaaaagaatctcgtcgatgttcatttcatttaaggagaaataaatttactactattattatccaatcgatgtaaagaatgagagcaccgataatttattcgttgcggtagctgtttcttgtgtagatgatgatcgatcgacagtttgcgttttgttaaatggagatttcttcgaatcgatgaagtgtttccggttttgttatgaatctgagtgttagatcggcttcttgatgccttgagtttactttttttctttcttttggttttg

SEQ ID NO: 254924 - DNA, 104 bp, Gossypium hirsutum
tcttagaaaatgggaaactgctttgctcgtaaaacagtaacgaaacgaccggtcacgaaaaggttgcagaaccagcaaaaaggacccaattccagcaaccggtg

SEQ ID NO: 254925 - DNA, 468 bp, Gossypium hirsutum
ctgtctcgtgggttaaggctgacaagtcctggctgctgagggttttgggggtttctaagactgaagtgtgtttgctttcggcattttctgcttcgtatcttcatcatgtgggcactacgccgagttcctaagccgctcagagatacaagtatcagaactggagcttctttttctgcttctgctagattacaaacttcaaataccttcattgaaaaaaatgctattttttctggttcttctcaactggtttctgatacatgtccatctttattgagattttactgctcaacacatgcttcctctaatttctttgtttggagatgtggcctttcttcccaagctggtgctgaaagcagtggggaggaagatgacttggaagatggtttttctgaacttgaaacagctggtaattctgagaacaaagagatcatatttctaaggatgaaactgaagatggactggattctg

SEQ ID NO: 254926 - DNA, 295 bp, Gossypium hirsutum
ttttcgcgtgggtcttcttccagtttttgtaagtgatcattactgaactaagttcattaataagtactaataatccttaaatctacagccatggctgccatggcatcttctaccttcttcttcttcctactttgtctcacagtcaccgccaaaaagacctacattgttcacatgaaacatcaagacaagccactttcttttgaaacccacaatgattggtaccgttccagcttacagtcactcaccgtcaccccagctgagtctcttctttattcatataatgctgcatttaacg

SEQ ID NO: 254927 - DNA, 368 bp, Gossypium hirsutum
tttgtcacgcgtccggcaacatattaatggctggtgttagctaagctagccaacagcaaccattcacattcatcattcttttttattttgctttatattccatgttgcccaattcttgaaagtaaccgttgcggctcggattgattggcggcttgataatcggagtcggagaaaatgcggggaaaggcggtttccgggaaagcaattctggtattgtgcctggctagctttcttgcaggttccctaataactagccgaacttggacttctcaatctcataacaacaaccatcctattgtgaaccatgttactgctagcaataaattgggagaatttgatcacaaattacgtaaattaggtgaaggaaa

SEQ ID NO: 254928 - DNA, 347 bp, Gossypium hirsutum
tctcttcatcttttaacaatggtagatcagggggctgtttgctgcatgtgcggcgacgttggtttctccgataaaatcttccgctgcaacaagtgccgccaccgctttcaacattcgtattgcagtaattactacagtgagttcgctgagccgattgaactgtgtgattggtgtcgaagcgaagaaagaaactcaaagcatggaagctctttgaagaaatcaccgttgatgaacagaaacgaaaccggaatcgtaaatcgatctgagtattcgggtgataaattaaagcaacacaacgatgatcatcaacatgaacatcatcatagagggaagaacggggggacacc

SEQ ID NO: 254929 - DNA, 146 bp, Gossypium hirsutum
tgtggacgcgtgggtttctcgaagtcatttgtgaggtccccaagagcttgaatttccagcttcaatcaggaaatttccgtaccgtttgaacttgtatctgtttggttggatatggttactcagatgcagacattctttgatgggga

SEQ ID NO: 254930 - DNA, 370 bp, Gossypium hirsutum
ttataaagttaaagtctttctctttctgagtcagctcaggtccttaggttgggaacttgatagtcatggatggttggctgaagggatctaatagttttgtggatagggtaggactaaatgacagtacggtcttagctttatctggtcgggatttcgataaccggtttaagaatgagaattgtgtcgatattccttcttcggaacctgttatgattccaggaaattcagggaacatggtgtcttcctttggaacttgttctgatagagttggactaaatgatggtacggtgttggccttatctggtcgggatttcgatagccggtttaagaatgagaattatgttgatgttcttcctttggaacatgttat

SEQ ID NO: 254931 - DNA, 373 bp, Gossypium hirsutum
ttttacgcgtccgctaatttaaacacctccgccgcttttgctactttccaattttcccaggttctaggcatggtggtgtggcttaaagtggctgttataaacgaagaaggaactcaagctatttttatcagactatgaatgtcatctgaaagatatctccataaatgtagatggtggagcttcttggctttatcaaggatatgctatcgttgcctattcagacaactatgccaatccaactcttcatttttattgaagcatccacgtccaacatatgttcacacataagaatggggatatgatccttcaaggaccctccaaatacatagaatcaatcattattctgtcattaaaccatagggttttttataac

SEQ ID NO: 254932 - DNA, 304 bp, Gossypium hirsutum
cgtgggttgagattggatttcaataggctgtttgggggagcagcatgtattgagatccaaaacctgacaagagatctcatcaagagggttattgacggagcagccgaaattttctgggagatctttgttcaggtggaattacagaggcagagccctcctcctcaggatgggagcattccgaaattggtgagttctataactgattactgcaataaacttcttggtgatgattataggccgatcctgacccaagttcttgtcattcaccaaagttggaagcataaaaaattccaggagatgatcc

SEQ ID NO: 254933 - DNA, 549 bp, Gossypium hirsutum
tctttacgcgtccgattttactaaatattttcatattcacaaataaattcattcctttctcttttacttttattttattttttttacattaactcaaaaaacaaaaatggcaaagattgctttggttattgttttgatctcaatgatcgtggtcgtttcaatccattccgtcgttggtgacaccgccgcaacgtcacctacagcatcaacagaatcaaacgctgcataagctgaggcaccaggtcatgagggacacgatagttccaatgaatcatggaccgactgggccaaggacaagatcagcggtattgggggcatgttcgcttcttcaccatcatcctcaccagcatcggaaccagcaccaacaccagcaagctcatcagcggaaacacccgaagtcaaggtttgagctgcacctgtagccacaagcttggtttaatatgggatatcaaagcatggttctcatcctataatatagagattgatgggaaaagcactatcactatcaccatcactactttatttttttttttattttttgatcaaacc

SEQ ID NO: 254934 - DNA, 174 bp, Gossypium hirsutum
cacgcgtccgagcgggtggagttcttgtttggttggttcggaggaaatggaaaaccggggaggacaaaatggggaaagagaaaaagagggaggaggttgaagaagaaggacaaaacggttaattcatggtggttgatgaagggtttgccttagaattagaggatttgttaaggg

SEQ ID NO: 254935 - DNA, 305 bp, Gossypium hirsutum
tttttagattccctccctcttccttaagccttactccaaagaataatctctgactctgaactctgatctcatttcaccctctctgcttaaaccccaaactaggatttaaaatttttagggttaggccaaatattttccctattttttccaatggatttccagaggaaaagagttcagcttctgggcttcatcgtcggagtcatcgttctcagttacacagctgaaaaatgtaggcacctggttggagaggaggcatcatcccaaagtgggcaatttactttgttaaattgctttgatatgggctc

SEQ ID NO: 254936 - DNA, 188 bp, Gossypium hirsutum
tcttcgcgtccggcattcttcaggtgcagagctaccaaaactgaaaaaaccagggaggaaaaaacagaagtttcagcctaattttatgaaagtgctttggccaggaagagaattgtgactgctgaagaacgagagagagcgattaatgcagccaaagcatttgagccgactaaccctttctgcagggt

SEQ ID NO: 254937 - DNA, 113 bp, Gossypium hirsutum
tggtgtgtggaagctgcttcatatgccaatatcacagagctgtcaatcaacaaatgtcttgaagaatcatatgtcaatatgaaatgccaaaaaggatcatattagacaatgca

SEQ ID NO: 254938 - DNA, 115 bp, Gossypium hirsutum
gactcagtcaagagttagccgagagatccaagcaatggaggcttaggcttcctttggtttggctgtcaaagccagtgagatgcagttggggggaaaaaatagtaccaatctcact

SEQ ID NO: 254939 - DNA, 240 bp, Gossypium hirsutum
gattaaaccaaccattaagaaggagaaaaagcattggccaaaaagaaataaagaaatatctgacgatgggaagcgcaaacaccagcgctgctctaatctcccatttgcagctcaacagatgctgcttcaaactcgttgagtcaaccaggacccagctggagttcaactctctcaaattcaggctttcaaggagagggaagctggaattcgctgcttcccggcgcgggaaaggttttagaa

SEQ ID NO: 254940 - DNA, 204 bp, Gossypium hirsutum
cccactttgtggctctctgagttttctcacctgaaacgctctgcactttctccctcagtgcctccatattcctctcttccaatttttttgccctcttttttctgctttctttttctttctctcaatagattttgtcttttcctctctttcatttctttctcttgatctataaaattccatcgattgttggaaagagcaagaggg

SEQ ID NO: 254941 - DNA, 444 bp, Gossypium hirsutum
gcttattgtttcatctgatctgaaactccgtcgcccacttcccaaacaaagcaaatcgatggcgccgcctcctggaccatactccggcaccagcactcttgctctcgccaaggcaaggtctcaaaggaaagctgaagcaaaggctcaccactgaagcaggggtggtttttgttcatagctggtttgcatgagtgaattgagtttggcgtaggaataaagcataaaaatagtattgtaccagattttcatttcggcttaaagcttctatggacaatgacattcttgtccccaaatttttttagtattacgaactcggcacttcaagtattagtttttcggttggcaatggcactaccgatgtttagtgtctttagttaatgggaaagatgttggatgattatatgcttccatgttcaatgtaataattctcactttttggctccc

SEQ ID NO: 254942 - DNA, 303 bp, Gossypium hirsutum
atttaggagaacaaaaatggagaatggaggggaagatcctgtgttttcatattcgtattataggaggaaagaacgcattgcattggtagccattgtagtgcttgcttcagtggctgttgcttcgcttttagtggcttctagttactattggtatattcgtaacagggtcctctctaagcgctccaaatcccactctactgggggtgattctaaggacaaagcttgctccaccgatcttgaagttgctatggacgaagggcttcatgtctttacttttaagcagttacattcagtcactggtgg

SEQ ID NO: 254943 - DNA, 454 bp, Gossypium hirsutum
ccctcgcgtccgattttctttgcgaaagaaggtgaagattgcaaactaacaccaatgaaagaaaatattcaaccgtcggtaaccgtgcctttcgaacaaggtacaggacagaaattccaacagccgcccggatcggggatcagtttctttatgttcgaggaatcggaattactgaacgtgggtgaggacgggatttatcccctggcagtgaaagcagaggcatttcccgtcaactcaaatgacggatcccgtaatactcagataactctagccgtgttcgagaaagacatcctgattctcaccctctttttcctccgaaaatcatcggagaagctcattcattgcttcttacctatggataatctcacatggggcatatttcaaatctcatgtaatcctccatggctttaaaaggtgtcttaaaaagtgcagtatttgatttcaagcattttag

SEQ ID NO: 254944 - DNA, 512 bp, Gossypium hirsutum
cctacgcgtccgcgaaaaaccaaaccccaactaagaaactgccataaaagtaaaacaaaacatcgaaaagtcaaaccaagccacctcttcctgaaaatcttccagattttctctcacaaagtacccctttttttccctgtgtctcaaagacccagaaaaagcttcgcccctttattcttgttcacaaagatgtctttgcattgggcattgatatgccatgggttgataactcttacaatagttgtttccttcctttgtgggcagtggcctatcttccaaggaacacccatcagctctatccatcgtttcctcactttcggagcttatcaatacttcctgaggtttattggggctgtttttggagatagaggaacaaatttgatcctttccgttgagtattattgttgtgataggcctaatcctatcttacagcttatatacttggcaataattggaacgacttattacattatagtgaagacgtcttttagctatattcctgggtactatct

SEQ ID NO: 254945 - DNA, 393 bp, Gossypium hirsutum
aaaaaaaatttaggagaggcaaacaaaaaagctgcatccttctcctcacgcctctgaattttgtattttatttatttattttttctctgcgctttctcagcaaccaaacacatccttacacaatcattttactcttttgaatgagtatacacacttggcttctttgaaggttttaacttaaagaagagaaaatttggctttttccagcattttcatctactgcttctgcactagtcttaattatttggactctcgagctgttctacggttttgagatcgatcgaagctttcaattactcacttggattttgaaggagttccttttttctaaaaaaatattttattcaggttcttaggttctccaaattctgatcccatgggatatgctgatgt

SEQ ID NO: 254946 - DNA, 406 bp, Gossypium hirsutum
gtaacccttaaggaagggaaaaaaatgtcaaaccttgaaaaccctagaaactggcggttcacatgggaagcgcaatctcattctccaaatctgcgtttgttcctcttcgattctcaagcaaagccttcggttcaatgcagaaacctcgaagttcaactcaatctttctcaatctcatcttctcgtttcgtggctaaaagagggggagaaggaagaggtgtcggttagggtctctactccaagagttctgatagattctgaagctccggtgagttttagagctttggatgatcacattgaggttaagcttgctttgcttcttcctgttgatcatccaagcgtttccagctttgatttgatgttggattcgtctggaaatggctataatgacccctcattggatgctg

SEQ ID NO: 254947 - DNA, 454 bp, Gossypium hirsutum
tatatctctcttttcttcctttctccaccaaagaaaatctgatttaaattttaatccattaatggctgatgaaccttctctcactcgatggtcttttctggtactctctttttcttttctctttccttctttctttgtttttcttttccttttccttttctgtttggttgtcaaatcgtcgttttcttcctgatttccctttggtcaattgaactgtatgaagctaattgacttacttcgattgactattttcctttttttactcatttattagcttagattgcattgcattgaatttctttttctaactcttaaattttgaaccaactgtgaagaaatgtgaaggaaaagggaaaaaaaaaaagagttctaagcattttctttaagcaattatgttattattccataggattttaaactattttatgatgccaagtttgggaggaagagattg

SEQ ID NO: 254948 - DNA, 464 bp, Gossypium hirsutum
ccctcgcgttcgcccacgcgtccgatgagatcaaaccaggagatcatatttacacttacagagctgttttcgcttactctcatcatggtatctttgttggtggaagcaaggtggttcattttagacctgaacgtaacttggattccagcattgatacatcttctaatctattagatccgacattccctcaatcaacttgtccaactttccctgattgcggcttccggcagccaaacagtggggtagtactctcatgcctggattgtttccttcgaaatggatctctctactgttttgaatacggggtgaccccatccgttttccttgccaaagtgcgaggaggcacatgcaccactgcagcctctgatcctcttgaaacagttatccaccgggcaatgtatcttcttcaaaacgggtttggaaactatgacatattcgagaataactgcgaggattttgctctg

SEQ ID NO: 254949 - DNA, 417 bp, Gossypium hirsutum
ccttcgcgtccggttgtctctctctctctttctctctctctatctaaaaactctctcaaaattcagaaagctatttcttttttctttggtgggtgcctgagattttaaccggcaatatttttccactattcctcgggaatccctcgtcttcttcttcctcacaatcagtatctcctccttcgcaggatataatggtccaggttttcaaggtctggtttttgatctgatagaactctgactctaaaaagtgaaaataataataataataatggcggatgagacatattcagggctagggaatgggggtgaaatagataccaaagtggtgcagacatttcagaagaactttgtgcaggtccagaatatattggaccagaacaggttgctgatcaatgagataaaccagaaccatgagac

SEQ ID NO: 254950 - DNA, 426 bp, Gossypium hirsutum
tctttcgcgtgggcggacgcgtgggatgtaccaagcgatttgcttcctttttaatgtgtctgaagtgaatccatggagaatgttccgcagtaaggtgaatatttcgtatatatgcggcgatttctgatttgtccataacatgattctggcattttttgactatagaaagcgcatccccttctattattgtttctaaacccatctctattactgtttgaatcgcacataaacatgccagggactctgctgcaaaagcagatccaacattctcatgcagtttcgatcttgcaatcaagacccgaccctccccattccttgctactactccgaatgccgttcgagatctttgcctgtcaaaagccccatcaaaattgatctttattgctgtaccagataggggtacccaggtcgtgatttcagcatttc

SEQ ID NO: 254951 - DNA, 400 bp, Gossypium hirsutum
tcgcattattcttggacgattacatacggcagatctatcaaatcatcttaagcaagtacgatctttacaaatatacgcaagtttgagcgatagaaggccggagctggctgctctagtttgggatgtggggtcgtcaccgtgaagcattctcaatgtacaagaggatgccatcaagagatcattcaactctagttgatgatgtagaagagaattcagctctcttacagaacagcatggacgtggaaactacaaatccttcatggttgctttcctttccgcatgtagtagttgcgaccatatcttcactcctatttggctaccatctctgggtggttaatgaaccgcttgaaagcatctctatagatttaggtttcaggggcaatactctggctgaaggtct

SEQ ID NO: 254952 - DNA, 480 bp, Gossypium hirsutum
cccacgcgtccgcagttacaaaaaaatctttcctctatctgctatcattttcaattcacttcttatttgaaatctcttcaacctaggttccttggccattcctcttccaaagcaacttcattgcagatcggcacatcccttaccagggcctctgctacacacggacatgaaacattggcatgaagggtcattttttaggctttaatctctcccctccagtctcgaatgtcaaaagctgcatcgaactgtactatgtcccttgttgtctcctctctttgcccctgtgttctagcaatccccaaggtacgctttttctttcctactccttctagttctgttaaatagctctgtattttctgtactagatcccttcctgatgcgagttttctttcatgcaacatttggttctgcaagctccatataatccacagagcacagcaaaacatctgacactgttccttagtgccttttttgaaaacc

SEQ ID NO: 254953 - DNA, 309 bp, Gossypium hirsutum
cccacgtttccgatttattcttcgtgtgaattttcccccaaaggcatactattttcacttagcatttttatcaatatcgtttctgctgttaattaatagaacaccatatccttggctatagggttttgcttggtagctatgcagctatttattgaaagttgaaactcatgcctattttatgaatgcttacatgcatggcaagctgttgttagcctttctttctattatgtttgttgctttgtattagcattctctatgctacttgccctgcaaagttccaagtttccatttttattaaagatggcaatc

SEQ ID NO: 254954 - DNA, 325 bp, Gossypium hirsutum
tttgatcaacttggtgttcacttgaatgaacatgtgaaagagataaacaaacctctctcactggatagcagaaagaagttgctgtctgcgcacatatttcagcttctatcttcctctatttacttgatagcagcagcaggaagcaccccctgaagttcactcatcttctaccatagattaggtcaagttcctaaaattttacgttcttgttaattttattcataattaccattattaacttgtataaaactttctttattttcggtcattaaacaaaaatgcaagaaaaaaaaaaaagctaagcgaaagtccaccacttatcatc

SEQ ID NO: 254955 - DNA, 444 bp, Gossypium hirsutum
cttacgcgtgggagaaacccaaacaaattcaaaacccaaaacagcaactcgaccaagaaaaaggagacaacgtttgcggcaacaaaagccacaccctcctccctctgtcgtccagattgaacgtgccattggtgctggttccttccgtgacgctgactccagtgatttggaggagcaaaggaggaagacgatattcgatgggcttttgcctgtcactggtggtaaatttgaaggagacattgaaaagaagctccgcgagactggggagtggattggtaccactactgaagcaaccttccgttcctccggtacttcatttttctctctattttctttcaatcgagttcagataagttttagtactgaaaggtgaaagctacttgtaagacggaaagcttaagatgtatatgaagcatatttaggcataagaggtaggcaatatga

SEQ ID NO: 254956 - DNA, 273 bp, Gossypium hirsutum
tcgcttttttcaattcataggttaagaggtatgaactgggttcaacgcaagatctttctatacaatgtcacctttggactctacatgttggattggtgggagcgttgccttttcagtatccttttttctgtttctcttgcctgaagagatccaatctgtctcaggatttgcacacttcaaaggtggctgaagtatttttttgttcatctattacctaacaaaagtcaaagtatggtcatttttttaagcctgtgaccagattatactgatatt

SEQ ID NO: 254957 - DNA, 209 bp, Gossypium hirsutum
tcgctcacgcgtccgaaaaaaaaaaaaaaatagaaaatttactctcaactccctcttcccttttgaatctggcctagctccggtcagtacccctggcgccggaccggtcatcgtcctccgcgccggccaccgtacacggtggctggaaatctccaaaaaggtgctgtcagaggtgtggaggaggccggtggcagcattgcagcggagaa

SEQ ID NO: 254958 - DNA, 246 bp, Gossypium hirsutum
tcgatgctttccatcaatcaaaatgaatcattcaatttcaaacctttcttcttcttcttcttcttcttcttcttctttatggttcaactacacatgcactattttctccttcatcttcttcactttcacgttctcattttccctcttttcattatcaatcttcattttaagattaaaactatggcgtaaatgttcaacttgccaatcattcctcacttcaagttggtccaaagatttcaataacct

SEQ ID NO: 254959 - DNA, 157 bp, Gossypium hirsutum
tcgataactgtaagaaaaaaccctagcgtctaccataaccagcaattagcgtccgcctttgatattcgtgaaccatgatgaaaattaagaccccaaagaaaggaagagtcaaaagggaattcgattaacgagcgccaaagctagcggaaacaggaaa

SEQ ID NO: 254960 - DNA, 422 bp, Gossypium hirsutum
attttgtagaagaaaaaaatcctcttttggttttttattgaggaactcctaaagtaaatacccaaaatttctgcaaaagtttccgatcgaaaaatctgaaaaaaccatgtggcgaaactccgccactgtaagcttctcttcgaagcttctctcttattcttcttcctccgccaatcctaattacttccattacgcatctgctttctccatctttagtccaaacggcgttgtagatcagacgctttcttcttctcatcaacgcttttactgctcatcggcggtgccttcgccgtctccctcatccggttccgttataaagctaggttttctcgctagcaaatctgacgcctttcgccctttgtgtttgaaagctagagatgcggtccagcttgctcgtcactacggtcggtgttactgggagc

SEQ ID NO: 254961 - DNA, 226 bp, Gossypium hirsutum
cccacgcgtccgcccacgcgtccgcccacgcgtccgtgatgtgcaggatgaagatggatatggtaaccttgaggaatgggtcccaattttcaagcttgctatgcctgacaaacttggcatgaggtactcaggccgccaaaccgtacgaccagctcctactagctccaaaaaagaacttgctgcggagcttggggttgctgttgatgcatggcggagtgatggctgg

SEQ ID NO: 254962 - DNA, 479 bp, Gossypium hirsutum
gctatgggtaatttgcgtctgataatctttactgatgctatcaccttggagacctgatgcccttttcttgcgttacttttaaagcattatgtgctttgtcttttctaatttgaattgccttttggattcataattagcttgtcaagctgggttcaggttttatatcttatatttgagttatgattaagtgtatatctttatatttactgtatattgattcaaagtgtcattgtactgcatgtgacatctcgtaacaactatttagccccagttttgtttaaggggacctgtaatactgaatggaaccttaaatgggtttgctgattttcttttttcttgagttctagtcttctccagtggattattaacggtgcataatataatgtcacctcttcagaattgtgtgcgttactttttaataaaccttagttttgatttacgcttgtcatgccttcttcaagacaatctctgatattggt

SEQ ID NO: 254963 - DNA, 327 bp, Gossypium hirsutum
acgcggacgcgtgggctattttttttaacgacaacactctggggtgacggccgcagctggaacctgcaagcgatgaaaaccttgacgagcccttgctccaagccagactccggcaataatagagatagagggttttcttcttttcaacatctttctcttactagagctcatgggtggttattacctgctaaaaagcttgctagaatccgcttctagcatttgtgcattgggcggcctaggaccttgcagcctgtatgttgatcatgttgattctctccggacttacagggggagttggagacagcagaaactcaacctaaagaacac

SEQ ID NO: 254964 - DNA, 151 bp, Gossypium hirsutum
tcgagtgaagagagaagagacaattgagacgatgaaccagtacgtcttcctgctcctatccctctcatgtctcttctccttctccgtttcagctgcccccgggcctgaaccctctttcatcaccttggatacccacgtggccaaaccggct

SEQ ID NO: 254965 - DNA, 104 bp, Gossypium hirsutum
tcgattttcttcgagaaaaccatcttctccagaatctaaccctctcaccttatctctcaatcttccttcttatgttctgaaaattttcacagcatattgtgggg

SEQ ID NO: 254966 - DNA, 134 bp, Gossypium hirsutum
gtaaaatatcaaaagcaaatgagaggagagagatacaaagacttccgactctgaaaactccgtcaacgctagagcgatataagaggaagactcgtttctataacggcgtcgtatatcattcagtgttagggttt

SEQ ID NO: 254967 - DNA, 178 bp, Gossypium hirsutum
cccacgcgtccgaaaaaaattttatggctcttcaatttaattttatttcatccatgttaataatattacttttaaccatatcatccgctaaagctcaagaagctggtggcgttggcggtagaggaggaggagatggcggcgccttggccgctggagtcgagatcaactttgatagctg

SEQ ID NO: 254968 - DNA, 447 bp, Gossypium hirsutum
atataaatagcatctcaaatcaaagcatcccgaccagacaaaacaatgaatctttcgtcgtggtttcgccgcagtgtttcaaggaacagtaaaaaccacaaaaacccaccagatcaacctcaaccccaccaccaagaacaagaagaatttcttggaattacccaacaattaatcgatcatgtcaagtcttttactttagaaaccttcaagaatttccctatccaagatgatggtgacattgaagcccaaacttcttataatgtgcgtaaagatctttctgattggcaagagcgtcatgctgtcttagtgctttctaaagtgaaggaactttcacagcttagattcaagctatgccctcgtcatttgaaggaggaaaaattttggaggatatatttcatgcttgtcaatagctacgtggctgaatatgagctgcatgctatacagcgt

SEQ ID NO: 254969 - DNA, 189 bp, Gossypium hirsutum
gaattgttaccgcctccaactccccttcacaatttccctcatcgtcaaaccctattgtcaccctttctttctcgtggcgtttcgaaattaaagatttcaaccgtgtaatactaattcccatatgcaagcgaaaaaggaatcaggttcttggttgtgtggctgaatggcaagatttgagggtagggtttc

SEQ ID NO: 254970 - DNA, 272 bp, Gossypium hirsutum
tcgcccacgcgtccggcctgctgatacggaaaaaaaagtaaataaccaaacagattcctctttctttcttacttcagtaatggcttcttctatttcgattattccgtcttattttgcttccaccagccttcctcccctccccattgcttctcacttcccctttaacctcaactctttaaccttcttctttcctttgaaaaacgggtccttcaagcttcgtaatgcccctcctctctctcccaaggccctttcttctcgtgcacccaaagctg

SEQ ID NO: 254971 - DNA, 153 bp, Gossypium hirsutum
gtctactccactctcatcaatggctactaatgaaattgaaaaaccggatacctgaatatgttcaaagcacagtcaaagcccgtaagacaatgtgcctgaatgggcaccgggaccggcaccagctgaggaggtcagagacctctaacgcgttcg

SEQ ID NO: 254972 - DNA, 187 bp, Gossypium hirsutum
ctacgcgtccgcattttccaaattttgccctgcttcattttctccttcatctgccgtcatactctctacacaatttctgcccttaaactctcttgccatatttcagatattctccttcatcttctcccatagatctgcaactttctcttcttctgctcccatatttcagtttacagatgactatgat

SEQ ID NO: 254973 - DNA, 391 bp, Gossypium hirsutum
attatcctctctacttgtgtgtgttttttctcccatccatattcaaaatgaaccaatcccagttttcgagccaccaagctggccagaaaatgggccaagctcaggagaagaccagtcagatggctgacaaggctagggaaactgcacaatctgctatggattcaatgcaacaggctgggcagcagatgcaggccaaagcacaaggcgcaacagatgccataaaggatacaatggggatgaacaaatgaaacttctgctgcttgatcccagaccgcacctctccggcacctacaatattcatcttttgagctttagttttattttttggcaacattttcttaaatttgctcatatgttcttgagctacaattttcagtttcaatcatttcta

SEQ ID NO: 254974 - DNA, 482 bp, Gossypium hirsutum
cctacgcgtccgcccacgcgtccggcgagcaacaatacctaaaatccgggcgatcagccagttttaatcaacagcggtcctcctcaggcgcttacagtaagggcgctggcggcggccctgccccctcgcggtctccttcatcatcttcttcttctttatcttccaatcgaagtcttaagaagtctaacaatgcacaaggagggcaataccggttaaattcactggccgcgaattctaccgagtctagtaatacttctgctgcctgcaccaaacaaaatggcgctcatttacaaccccagctacagggagcatcagatgcatcgattgcaagcaatgttgcccagcctgttcaatcacccatcatccagaatagcactcgagctgtttcgaaagctccaacttctcaaccacccaccataagttccgacagtagtctccctacaaccgctggaaaggaagatccttccaaagcattctcttta

SEQ ID NO: 254975 - DNA, 162 bp, Gossypium hirsutum
ataaaactcttaattccagcgttagctaaaagctggatttctctgttatatgtatatatttacaaaagaaataaatcagcatcattctgccgttgcttaatgcagaaacaatcaataacgacttttaaagctctcttctttgcttcagatctttccattttt

SEQ ID NO: 254976 - DNA, 471 bp, Gossypium hirsutum
  unsure (1)..(471): unsure at all n locations
tattgaatccggtttcattctccaatgatgtcgacaccagttatggagcgaaataggtgaatgtctgcacaataggaagatattagtggttcccattttcgaaaagcattatgttacgaagaacgaattgtctttgaccaccccatatgcatctgttcctcaaccatcagaatctgaagcagaaaataaagggagaaaaatattacttgatattaacttaccttgtgacgtgactcttccggacatgaaccaagacattgttgcagaaaattcagccatagaaaaggaagcaaatacaaagctaccaagttccccacatcagtttgacttgaactcctgtgtcgatgaggatgaagcttcttttgtaccctctgttccgagcagtggtatgaagatgactcangggatagatttggaagtgccactaattcctgagcctgaagatgtcattcatggagaagaattactgga

SEQ ID NO: 254977 - DNA, 282 bp, Gossypium hirsutum
gagaagcgtggtatcatttatccgatgaatacccgatcaaatacgaagctgaacgtctccccccgcctctcgttgccgatctgaatggcgacggaaaaaaggaaatcctcgtcgccactcacgatgccaaaattcaggtattagagccacacgcacggcgtgttgatgaaggattcagtgaagcgcctttgctggcagaggtgtctctgttgcctgataagatcaaggttgcttctggtagacgtcccgtagccatggccaccggtgttatagatcgaattt

SEQ ID NO: 254978 - DNA, 243 bp, Gossypium hirsutum
tcctcgcgtccggatatatagaactggtcaagaaacacgacctggagatctcacaaccaggtttggagcccaatgtcggactaacatggcagatgacaaaaaggagagaagaccaagaagttcacaagtttaccaaggagaaacctggctggtgtagcgatccacattttccaccatgtgctgcgtattgcctctctccctgtctgtctcttatgaattttacaatttaatactgtgttagtg

SEQ ID NO: 254979 - DNA, 290 bp, Gossypium hirsutum
cccacgcgtccggacttatcccatcaacgttagctaaaccgtttcgcagagcaaaacccagttaggtgatgcaactggactcatcaggaagcattaacaatcacaatgatgcccacaatagttggtagcttaattttggtgaggaaaagccgaaagatgatgagggtatttcctccctcattattgaagttgtggaaggaatgggagatccgagcaatggttgtaaccagccttgtgctccaaattttgctcatttcatttggcaagcgcagaaaaaggagttcaaaaag

SEQ ID NO: 254980 - DNA, 253 bp, Gossypium hirsutum
cttctttcatttccccatattacctgttttctcttttctctcatctttccccccaactcttgtcaaatgatagaaaggaaacatgacagtaattcaagccaagtgataaaaagtttcagcctgctgttactgtctctggtttcttttgaccgttttttaaaactctgtttcttaattcgttgctcctctactttgcattcattctctgttttcattgacatgggttataaaggtggtctgatgaagctaaata

SEQ ID NO: 254981 - DNA, 321 bp, Gossypium hirsutum
aaggtgcctgcatacttgggtgcaatttcaggtttcgcatgctttatggctgctttggtgtcccttggaatttctatttcaattgtgcctcgacaagtgatgccatggactggtttgctcttgatgtatgagtggacgttttcaatcttctttctttcattcggagcatttcttcatttgatttatctgtggggaaaaagagaaccagggccagtttcctctcgtatggatcctattgattcggattctagaaaaggttatcgacaggcatcctcttgcgatattgttacttggtattatgggttgaggatggcttttttg

SEQ ID NO: 254982 - DNA, 315 bp, Gossypium hirsutum
tgctgcagccagccacagcattcgccgcacggcatcagtctcagcaggcggggaagaatgtctcacaggaagttgaacacccagctgtgtcctagtatttctttcatgctcttggcttgtctcatttcctgcactacagcacgggattccagcagagaagctctacaagttacaattggtattggcaatggcaacttaagcaagggctgtaatgataaacaccataatcttccattcaaactcaattgtaagttgccaacaacccccttagcaaatgaagtattgaagtttgctgatcaaagactggctttagtg

SEQ ID NO: 254983 - DNA, 177 bp, Gossypium hirsutum
attaaaaccctaattttgaaatcaccagcgtacttttccgagttaactcgccggctcaggggaagatgtacggatccgatagagccggtgacgatgcagagcgaacagcttttagaaaaacagaaaagaagtacaagctttattacgaaaattcgaaatccacgaaaaagaagaagc

SEQ ID NO: 254984 - DNA, 268 bp, Gossypium hirsutum
ccctcgcgtccgaccaaagcccccccttgccgaccaggaaattaaataagcagttcagactttaaggattctgcttcatcatggtcaacgcgactaaagggctggtcgatgctcgtgacatttccatgccacagtattatatggacgtgagagccgtgccacccacagatctgaacaagaacactgagtggttcacctatccaggggtttggaccgcttatatcttgatcgttttcttttcgtggctcatggttttatctgtatttgg

SEQ ID NO: 254985 - DNA, 468 bp, Gossypium hirsutum
tccacgcgtccggcccattcattttatcttgcagtattgtttacccgatccaagacctccagtcacatggccctagttcggagttttcagttggcattctccttgaggagcatctctctggatcaagaaggagagctgctacgcggtattcttgaacaaatttaaaaaggaatttacaatatgggaagtccaaataaagatcagaataaagggtttttctcagcgatgacctcgggtttatctttgtttggcaacgccatgcacagatctgtcaacgggttacttggttatgaaggggctagaagtcataaatccagaaggaggaaaagaagatgctgaggaggaagctcatagaggaagatggaagcaggaggagcgagagagctactggaaaatgatgcacaaatatataggttcagatgttacatcaatggtgactctttctgtcctcatatttgaaccgatgac

SEQ ID NO: 254986 - DNA, 326 bp, Gossypium hirsutum
ccctcgcgtccgcagagcgatatttgttggtgtgcgaattggtgatcctactgccgtaggccatgccctgacgacttttaagagatccagagacaactatattagtttttggaactgcaaccatggtcatttctcggaagtcgacaaggttgacgccgtcgccgctcttgatgactgccgttgtgtaggcaaagtttgtgtggcggatatcatcggttttttatgtaaggaagaaaacctgttgaatcctggaattgctcttcaagctccagtttccgttttaattcctaaaacaggagactttgttcgacatttagaatctaatg

SEQ ID NO: 254987 - DNA, 285 bp, Gossypium hirsutum
ttaagttgtaggtatttctgtgctgttaaagaggtcaggcagcagcaaggggcctgttgttctaggtaggacctttgctaccataccatctgaagatctttcttatgcaagagacagttctaacagtttcagaagctctgtcggacatgggagtgtatctgcatcatcctctactgaattcagctcatctaggcaaacagatgcgcgtgtacaattaaatggtagaaaatctgagttggagaattacagatatgacttgaatgcaaagcctcaaagctttacttt

SEQ ID NO: 254988 - DNA, 192 bp, Gossypium hirsutum
cagctttcaaaatagttccccactttctttctctcatggtttcatttcaatcacataacaagtaacatataggtttaaacatagtaaaacaatgagcatcattatttctttcatgctcttggtttgtctcatttcctgcactacagcacgggattccagcagagaagctctacaagttacaattggtattgg

SEQ ID NO: 254989 - DNA, 430 bp, Gossypium hirsutum
ccgtttgttttgacctccgtcgcactcatgcctgatttttcttctgaaggacgagcttgcaaggtgatcacggcttgtgtttcttcccaagcgccaacatctagcttctttttcttttcttattctaagttcaaattgcatcaggccttgttggctctgcttctctaggttgagagcccattctggtctcctttagagggtgcgttaggcctttttttcctgatctaattctgtttgtttaagcctggagtagttataatctctttaccagtggggggttcttgtttgtgcagctatagattcctcggcagaccctaactccttttgtgtcatgttgatttctttagtgggcctattttcatgcgagcccattttatcatttaaggtttctagcaattgtaaccgaatattttcttgcatcttttctctg

SEQ ID NO: 254990 - DNA, 211 bp, Gossypium hirsutum
attcgattgcataaggacgattcggttgcaaatactagcccaattaggagaagcattactgttgatggagatgttcaggatgttatagttggtactgggtttaaattgtctgtatcatgttgtttctatgtgcttcttgtgcaagttgtggtgctaggatttgatggttttggtttgataagagaggctggtgatgggaaagttttggatt

SEQ ID NO: 254991 - DNA, 476 bp, Gossypium hirsutum
ttcacgcgtccggtgaaattgtagaccataaaaatataataaaaacaaattttaatgtgttggatttgtggtcccgaaaccactgttccgactaggccctaatttgggatgttacacatcatcatttgaaaaatatttaaaaattagaaaatggaaaaaaataatttaaattttataaaattataaattagaaaagaaatataaaaatataaaaattattatttttaaatttttaaaaaaatatattagaagtttaatatctttaaaattttataaatcacatttactggagcttgaacatgagattgttgtcgcttagaatgatatcacctactataattgttttataattcaatcaaacaaattttataataactgatagatctttttaggtgataaattggataaacttttttttcaaattatttaaataaatttaaataataaataaaattatttttattagtttttatcta

SEQ ID NO: 254992 - DNA, 305 bp, Gossypium hirsutum
atttctttcaattttttttctccccagaatcaaactgatcctttagtttttatcatcagtttgtttcagagggtttttggttttttaaactttccttatttttggagccatacctcaggagacttcattaattcatttggtgtttcatccttttttggtttcggaaacaggaaaattagcacgggtgatagcagaaaaaaagaataaattaaaaaaatgttgggtgatttcttgaacagattgctattgttggtttttggatatgcatatccagcatttgagtgctttaaaatggtggagaagaa

SEQ ID NO: 254993 - DNA, 183 bp, Gossypium hirsutum
gcgcgttctcggggggactatccgtgtcatccttttgttcccgaaattcattggcctttgcgcagatttctagggtttgtggcggatttcaattcccacttttctgtttctgtttctctagggttttaactcccggtcagctttatttaattattactcttgcttgtcttaatcttaatcttc

SEQ ID NO: 254994 - DNA, 357 bp, Gossypium hirsutum
  unsure (1)..(357): unsure at all n locations
gaaaaaaactcagaatcaacagatcgaagtgaaaatggagtgtgtgttcgtgctagctgttcttccccaaatcgataacccacctccaccgatccaccattccacctctggtgtncagtcctncacaactccacctccgctctagccttcaacgtggtagaatttcaaagggctgaattctgagatcaaatacaagtatattttttctgcttctttcatgcatgctggttcacaaacagcaggtggtagccttgtcaaggcttgtggtagcttgggtgctattaaacaagatcatgaaccaaagaaaatggatttggatcggngaaaaataaaaataattgaatagtcggctattcc

SEQ ID NO: 254995 - DNA, 318 bp, Gossypium hirsutum
ttcaatttctccggaaacggaaaaccagtaaagtattgtttggaaatttgcaatccaagtaaatgcaaaagtcgtgtcgtttcatttctcgcttccttcgctcctccaagcacacttcttcccctatcattgttaactcatcgtttaacaatctctcccattttgattttttaaacccccgaaatcagagctttttccaatttagtccccatacaacaaattctgggcaagccagaggtttgaaacgttgcgttttgctgggttttgtattgaccgctgatgatcccatctattatcagcatcatacacatttttact

SEQ ID NO: 254996 - DNA, 190 bp, Gossypium hirsutum
tattctgctgttagactcttaaatcgaagaacccctggcatgtctagtccaatgccttgacggacaagtcttcaattgaacatattcaggctttagatcaccatgttgatcgggaaccggtttcaaagaagacaacactatgagaaaacagtttggtttcttctataactttccatgttttttcttttca

SEQ ID NO: 254997 - DNA, 420 bp, Gossypium hirsutum
ttctttggagaattagcaacaaatgcaggacctcagccatcagtaggatatttaagaccaacaccagaaacatgaaatccctgatgacatgtcatttgtatcctgcgaattcctaaggttcgaccgggactcaacatccgccaattcatcataacattaatacgattatacatcgatccatttacattaaaaataacatagtaaacattcaaattaaacaacattaatatgataaccattcatacaaacttaccgtgacaactaggggcgtgaaggttatatcgagctaatcagaagcttttgcattacttcgatctaggtccgtacatggtttatcttgatctaaatagaaaatttcaatctatttaatatttgtagtactcaatttagtccacatttcatatttatgaaaaattacca

SEQ ID NO: 254998 - DNA, 312 bp, Gossypium hirsutum
gaataaacaaaaacagcaagctatcacatgggtccaacaatggcggcaccagaagaagagttgaggaagaggaaccaggagttagagaaggaattgaaggagagtagggaaagagaggagcagatgagaaaggaattacgaaagatgtgggaaaggctgagggtggcggaagaggcggaggaaaggctctgttctcagctgggcgagctggaagcagagtccgttaatcaggcccgtgcttacaactcccacatacttaccctcatggaccagctctccaagggtaacaaccttctgatgaacaaccaccca

SEQ ID NO: 254999 - DNA, 295 bp, Gossypium hirsutum
ataggaggtaaaatggcatatggtaatctggaattgagcccgaatcagggagagaaagaggaatctgataaaagtagaggtggaatggacatgcttctatctgctgccagtactctacactttgtggagaagttgaatgcgaatggcaagaagagttagaaagaccttgcacttgggaggacataacatgatatgatttgtttttcacggtataatgcctttaccttttctattatggatagctcagattgacaacttattttcacttcattttttgggctgggaagcagattgg

SEQ ID NO: 255000 - DNA, 150 bp, Gossypium hirsutum
agaatatgagtcttggaaatctggcgagtgcagtcggcaatgttgtcggcgacattaccggccttagtaaacccagcaagaacacaatcacaggcagtgttgttatagttaagaagaatgttttggacttcaccgccgtgcattcaactg

SEQ ID NO: 255001 - DNA, 333 bp, Gossypium hirsutum
aaatttcatggagattttgaggcttctccggaggacaaaaaaagtgtttattttccatggaagacaaaaaaggctataaaggaaatttagtagtttcttcaaatcctaaagcacttcccaggagtagttttaggcagatcactgcgataaggaatcatagaaatgttaagggtgcagcaggtcatgtagcgatatttttgctcaaagttgctgcattagaaacagttaggcgggtctcaaaggccaagtgtccctttttatggcgcggttttcaggctctgcaagttatttgctatccgccctttaactttgtccagaaatgggttcccttta

SEQ ID NO: 255002 - DNA, 413 bp, Gossypium hirsutum
cgggcctctatcctccatctgactccaattgcgatggagcagaaggaagatcggccactaggtacgacgcatggagggtggacgtggcatgtatggaagcgcgcgtgaggccgagggaatgccctggtggctgcggcggtggaggctcgcccttgctgctaaggtttctagttctttttctgttttgggcttcaatgtaattgggccggggtatcgggctactataattgggccattcgagtttaagtttgattttagtctgtaattttggacatttgggcctttattttatttggtatttatttgtgtacgggccgggcaatattgggccattacaatacgtattagaaaaggtagcatttttcaaaaaatgttgctatgattaaaaatgattgtaacatctaataacattc

SEQ ID NO: 255003 - DNA, 368 bp, Gossypium hirsutum
cccacgcgtccgaaaacaggaagctacggaggaaaaaggcgaattgcagattgggagaaagagaaagaaaaaggaacaatatttcactgaaaaccatgaatactgtcttctcagttgacgatttctccgactccttctgggcggctccggcttccgatgatgcgcttgggatgacccgaagccattccgagtgggcgttggaaaggtttctggaagaattttccggcgccggagtggcgatctctgggtcgcatgcgggcgagaatgtgatcggtccgtccttgatgtcacctcagtcgtccgttttccaaagtggaagaaggtaacgtggtggagataaaaaggcctaatagccagaatcataatca

SEQ ID NO: 255004 - DNA, 416 bp, Gossypium hirsutum
tctttccattcattttctctctccccaaacaccattgtctctcccactttctcctcctccgcaacacttccatttctttcttgtgttggactctaaaaaaggattcattaaagctttgccttccatggtggatatcgcaaagtgcttgccattcaatggaacagctatcaaaacagagtttaagaacctgtgttcgatcgttaaaacgagtacaacactggctctcttcattctttccttcgaagcccacactctattcttagctttgggcccttcttctccttggtttaccacttcctctgactcttatagatcacaattcccttccctttttggttacttatttcccaacacttcatctccttcatcatctaatcacactctgcaaccattacccaacgacaaaaacaaaggca

SEQ ID NO: 255005 - DNA, 183 bp, Gossypium hirsutum
tgaatttggatctaatatgcaaattctcaatctgggggcttttaatttaggtttaaaaaataaaatctaatctgccttaaatttaggaaattttttttggtaataactgaaaattttcatttcaatgtaaaaattatgctttgaaattaaattttttgcttgagttttgggctattttatttt

SEQ ID NO: 255006 - DNA, 266 bp, Gossypium hirsutum
  unsure (1)..(266): unsure at all n locations
gatatctgttccttccgagtctctctatttctcaggcagtcaatttatttttaaaaaataaaatctaatctgcattaaatttaggaaattttttttggtaataactgaaaattttcatttcaatgtaaaaattatgctttgaaattaaattttttgcttgagttttgggctattttatttttaaatccggacatgttttcgatccagctgaataacgatggttagttgaagcttcgcggaggattatcttcattncaaatgcctgg

SEQ ID NO: 255007 - DNA, 237 bp, Gossypium hirsutum
cccgattctgaagctcctgcgaaattaaaagctcctctttcaatctcacaaattagggttttccgtaacaaaatcccttattagggtttccctcccattcttcaatttttcgagctcgttgtcttgcaagcttgttttattagatacataaaatgtcaaggacaagggaagagaatgaagagcagatagaccttgaaggggacaatgaacaagaggagaccatagaggaggaggttg

SEQ ID NO: 255008 - DNA, 432 bp, Gossypium hirsutum
caaaagttgatggatgagataagtagtctgtcctctccatcttgctggagtaaggaatacagtaggcttggcgatatgcagcctactaatcttgctgatgcatttggatcactcgatccttccttgctatctccattgcatggactgtccgtaaaatctgcaacaccaacccagatgcaatctccaactgctcttcaaatacgccaaaaccaactccgcgcaacctacccaccaaaccattcatcctcccttgtaaggaacccctcggcatatggtttcgactcctctgctgcagtggcagcagcactaatgaactcaaggtcttccgcatttgcaaaacggagccaaagtttcatagaccgtggagcagtcaccagtcgtgccggactcactgcacctgctaattccgcaaccatgatgtcctcaaacata

SEQ ID NO: 255009 - DNA, 336 bp, Gossypium hirsutum
gcttcttcatattttgcctgcacaagcataaatacgaaggaatcacaaatgggcttttgctccgaatagtaatttctcttaaatacttgcctaaaattcattaatatgcccatttcccgcttcattttcttttccgccaagcaccgcttcgcccatgcttccaatcttcttccaaggtttggttcatctaagagaattcaatcttgtggctataccaaatcagcaaagaacaattattacaaaaagccaactggtcatcctgttgggaatgttgaaacacaggcttctcgctcgtcgggtgcttatattattccacctattttactaggatttggt

SEQ ID NO: 255010 - DNA, 198 bp, Gossypium hirsutum
ctcagaaactcagtttctttttctctctcttgatttattacattcagtacaggtagatctatctatcctctacctctgttctccttacctgttgtttgtttttcattttacttatcctcaaactctttccttttgaagaaaaacttgaatttttttatctgacaaacaatggtgttcttactgtttttcttatgatct

SEQ ID NO: 255011 - DNA, 147 bp, Gossypium hirsutum
ctcttacttctgccttgatatccttagatcaagatctcttctgatttaaccttgaatcagcaatggaggaatcatccctagctacaactttacccaaaactttaattatttgcgctttacttataaaattcatcaaatcatcggaat

SEQ ID NO: 255012 - DNA, 487 bp, Gossypium hirsutum
cccacgcgtccgataaaaacctctgtttctctgttccattacgttatttgcttcttcttctttttgttccgcctttgtcgaatctcgtaagaactgcattttagagaccggttcttcgtctgggtttcacctcgttagccagattttagcacattctggtcaaattcggaaatcatattactaggcaaataatgttctgttatctgccataaatgtggtgtagctttggagatgagaagtttcgaggaagcccgcaattgatggactgctcacccagcagtagtgataagaaaacattgaagaggtggtttttcattgacaagagggtcggataaaaagttcttgtaaggattgaaacttcataactctacttgacaaagctgattctatcgtaaacaatctagtttaacctggtataagtgtattaaaaagtgatccgaagttatcatcgacgaaaaggaaaaagaagtggtctgaatcttatgga

SEQ ID NO: 255013 - DNA, 334 bp, Gossypium hirsutum
aaaaccctctttctacatttaccgggcttagattgaaatctccagttttatttatttatttttatttttacgtttctagcattattatcacaaggatttcctttttcttcttttggtcaaaaacttagattcattttattttattttgaggcttttatccccgctgattattcaagcaaagtgttttttcccctatttcctttagttgatttattggaagcttcgagttttcagtttggtaagtcgagtttgagagtgtgttggattagtgggtaataagtgccgactttgacacagatctgagttaaaataaccaacattaagctctttgggg

SEQ ID NO: 255014 - DNA, 369 bp, Gossypium hirsutum
ggataaggttcataactggagagattacctacgattacactgctatcctctccacaagtatgttcctgagtggccttccaaccctccttccttcaagtaagcctcttctctattcttcttcctttttctaatctccccccaccccaccaaaaaaaaaaaaaaaaacaccttacgttagagatacgtaattcgcttaacgtcatcctttttcattctatgtgtcatgcatgttctaagtatcgatgattcagctatttgtcgacgaattgcattattttattttgcgctcaagtaatatatatttagtaatctgacaatttgatttacatattaataaaactcttgagacagacaggacattttgcatgg

SEQ ID NO: 255015 - DNA, 367 bp, Gossypium hirsutum
ttgacgcgtgggcagagaacaaaagcccccccccatttgcgccgttctgtggagcagtcgttcgaaaaggaaatctaaatccttgctcaaaatccgattacgacggagagaagcaaggtccggctaacaggtacggatgtatgcgggcgtgcgtacggcgtggtccctggtggtggcgtggctcggctcggaggcgctacacgcgggcggacgcaacacgcgcgagggggaagcctggctctgttgcggcgctggaggcttaccttagctgctagggttttccgattttggtctctgttaggctaggtgtttggttttgattttgggctgcaatgggtttgtcatttgggcctggggtagggtcatg

SEQ ID NO: 255016 - DNA, 396 bp, Gossypium hirsutum
cgtacgcgtgggaaaaaaactggaggactggcactccaggaaaatcgaagaggcctcatcattttcaagcaagaactagggctctgacaaggttattgatctccaaattctgacaaggtctcaagaattcgttgatcttcatcctttctagctctgcagtgacttatccgaatcatctctacgcgaattatgcagcacctttcagctaagcattgtaatgatttatgaggcttaatcagaaggtattgatgttctatgtgaaattttgtaggtaagagctattagctaccgatttgttccagacataaatcgttggcaagctaaagctctagttgcaattcaagaggtttggtaacttatccaatcttctaaactaaataaaaattgtaagaattc

SEQ ID NO: 255017 - DNA, 276 bp, Gossypium hirsutum
aacttacttaaattaatccctctcaaaagcaatttaacccatccagttgacaaggtctaggtattttgatgaaatcaaccttatgcaaagtgtaccgtctatatccacacttgttcatatttaagctttagaggcaatgaaagcactttctgtctctaaatccttttgtatgccatatatttttgttttgaaagtttggttgtaaatgggattttgttacaattttatttctacaaataagatttgatgtcaatgaaaattctttgttattacatc

SEQ ID NO: 255018 - DNA, 334 bp, Gossypium hirsutum
ctctctcttagaggaaaacagaaccacgcctccacctttctcactcttttctctgtttccttcttttttccggcgactttctaccggaatcgtaccggcggtggtcttctaagaagtgggttttccttgaaatgttgaaatttgaatgaaacccaacatttttcatcatttgagttctcagatttagccttgaaaaacttcaaaaaccgtagcgtgttggagtgtaattcttgtttctcttccacctgtgtcctctcttgtgtttgctttgccaaaaggatctctctgttttaagctacattttggcttctctctttttacctttttatctctg

SEQ ID NO: 255019 - DNA, 253 bp, Gossypium hirsutum
attagatttctgatttttttttaaaaaaaatttttttttcccaaatttccttttccaaacatttttctctcctctatcattttccactttcaatttttcatttccttcttctgattgctatcatttttctcattcaaattgttgctactgcgatttttgggttctttaatcggcttagtaagtgaagttttgtttattattaacgattggtttttggaaatgtgggcaatgctagtgatagcagataattggt

SEQ ID NO: 255020 - DNA, 233 bp, Gossypium hirsutum
tccacgcgtccgcccacgcgtccgaattgtagcactagcaaccaattatgctttgggttttgccactactttgttgtataattctgaaaccacagctacaaaatattaatatttactgtgtattatacaggtaggatagttcacggtgagtgagagcagccaaataggcacatagagagagagagagagagagagaggggatattaggggacacctcacacgatctgtggagg

SEQ ID NO: 255021 - DNA, 190 bp, Gossypium hirsutum
tgccaagtaacactaatccttttttttcttttaactaatgatagtatttgagtaacacttagctttcaatggatttccattactactagcttttgcttcggatctgctgctctctgtttcacgagatctcctcactttttaactcgctttgatagccaatggcgttgaagcggggactatcaagtgtgcg

SEQ ID NO: 255022 - DNA, 270 bp, Gossypium hirsutum
ctcttcaaggcacaaaaaccccttagttccctaacttttcccttctatctgctctctatttctgcaaacatttccttcaactttcccgagaaaattctatccctcgccggaaccaatgccagtcaccggcgaaaccgatgatggcaacaataacaactctatatctcacattctttcatacaaaacgcccctgttcaaccttaagctctacttagtaatctcaatcttcctggccttttttcttcttctattctcttttacgatcttcct

SEQ ID NO: 255023 - DNA, 234 bp, Gossypium hirsutum
ccaggaactctccattaatttgtaccaaatgtggagtaaactcaataatttacataggccagatattttactaacaaaatagtgattcaaacgtgtgagcagggtcaaactactagcttctattaatggaagctaatcattattccttatgaaaaagacaattgtgggtgagattgtgcggccttgacatggtttcggtcacattttgggtggtggggttatctctcatctctt

SEQ ID NO: 255024 - DNA, 440 bp, Gossypium hirsutum
gtaatttaattttcttttcggtttcagattgaaaacaggaggaaacaaaagatattaacggatcaataattcgtttgaatctggagacaaatttcaactctaaatcttaaaatttagtgtttctttttactttttagatttctttgtttcttttcatatatttttatttcaaaaaataaaatgaatgatcagtctcagatgatcaatcagccgccacaaatgatgatggacccgattcagtcgcagatgatgaatcagtctcatcagttgatggcggcggcggcggcggctgctcactctcaggcgaggagccaactgggggcggttctgtcgcagccgatgagctctggtcatcagatgatgaatcagcctcccccgacgttgttgaatagaagctacatgccttggcaatcccaggatccaaaccctaaccctagcaa

SEQ ID NO: 255025 - DNA, 307 bp, Gossypium hirsutum
ttcactcgtccgcttccttttaattattttcttcgtcatttgccagataatttttttttttaataaaattattggctgaattttcgttgtttggcacgttttcatacagagatttctctgtttattgcgctgcgttttgttgagaaattcgaaaagcattaaggctgcgccagtgctggtcttttgtttggagtgaagagaagagaagagaagagaagagtgagtgtttttgctttcttttagatgcggaaaggtggatttggtttaaggaaagaagcgatgggagattttggttaatgaattctaa

SEQ ID NO: 255026 - DNA, 185 bp, Gossypium hirsutum
gactacaaccacaccttttcagatagcctttcccaaaattttacaatgtatttgctatccttgaccactcccttctctttccccagacaacttcaatccggatttcccgttccatctttcctctggatctgctactctatggaccgtcatttcccccaccaggtatgattcttcctttctctcta

SEQ ID NO: 255027 - DNA, 103 bp, Gossypium hirsutum
atcgctgacgcgtgggaacccatcttgccctgtgctttggtgttgtaatatcatcatagttatgagcagtgatatagagtgtgtctgggtcttcgcccttgca

SEQ ID NO: 255028 - DNA, 137 bp, Gossypium hirsutum
  unsure (1)..(137): unsure at all n locations
gctgacgcgtggggaaacctcaaagatgagcacgtatatgagtcgcttgtttccaaaatctaattccagcatgttgttatgtagnggacaagccattaaagctgatgttttacgcttaagggatcaaacgttgttgg

SEQ ID NO: 255029 - DNA, 158 bp, Gossypium hirsutum
gttgcttactgcttgatgtagtgaacttttcaaaagccaaatacaaaagcaactgtagtattacttcagagtatataaatataaatctatataggagtgaaatgagcctttaattcaaccactgcaaagaccattgaatctggttgggaaggaggggg

SEQ ID NO: 255030 - DNA, 213 bp, Gossypium hirsutum
ctgactcgtgggcggacgcgtgggtccaaatcttctttttctctttactttgaaaaagcttacaactttcttccaaatctttcttcttaaacttctgggtttttctttatacgaccaagcaaacgcctcattgctgtgtcgaaagcacaaaccaaacggaaaaaattgagctccctagaaggattgggaaacttgaccagtgaaaagaggcga

SEQ ID NO: 255031 - DNA, 143 bp, Gossypium hirsutum
tcgttaaaagaaaaagccaaaaacccgatattatatccaaaagaaaccaaaattttatttgcatgcttttaaatttgatttcatggctgtaacaagcacatcaaacagaaaagaaatggatcggatcaaaggttcatggagcc

SEQ ID NO: 255032 - DNA, 418 bp, Gossypium hirsutum
atcaaccactacctcccacaatcattccctattccaacgtccacatctcctctcaatcccagccgtcaaatttccactgtcggtcgcaatctcaaaatttgaaccctttaccagttaagatcatcctactaaaaacccattacactaaattcgattacaccggattagataccgttgctttgattcataatttccaaatttctcacagagcaacaaaaacagagaaaaagggaaaatctcagttagttcatttttaaattcaaataaataagtattcttcttgatttgcttacaagcctactctctcagtctctctcttgtagctgctttcttgtgatacgctttgctttctattttttttctccattttcaatataagcatggggtttctttctctaaacttttaaaaaaaattcat

SEQ ID NO: 255033 - DNA, 120 bp, Gossypium hirsutum
ctcacgtgtccggtgatgacggtggagatggaggtgctggctgctgaaatggaggaaagcctttcggttcggctccgcgctctattggcctccaaacggctactgataatggggatcggt

SEQ ID NO: 255034 - DNA, 180 bp, Gossypium hirsutum
ctgtcatgtgcggatgtgctggcgcgggcgtggctgctggacggtacggagcgtacggcgctggcatcttacggaggtggtggcacgcgtgggaggctgacgcgcatgcaggaactgctagggtttctgttataaaattttcgggccatttgggcctatgtaattttgaggatgggcttg

SEQ ID NO: 255035 - DNA, 303 bp, Gossypium hirsutum
ttgcttacgcgtacggtcgactccggcatccccggtatggctattgaaactgctttcccaggtccaaccgctaaaagcgccaccggagatacacgaatgtcaccgccggctaggataggttaagggcaagctcaatagctgcaacagacattatctgaagatattctttccggaacatcatcaaaaaacatactggctattgacatttaagcaagaggttctgcaacaagatttggagtttcgaactgattttgtttcgacctggaactgaaagagatatggaagatcttgaaaatccaagag

SEQ ID NO: 255036 - DNA, 466 bp, Gossypium hirsutum
ataatttgtaaataataatttatatattaataatattaataatatatattaattttatttgtagttttttctccaaacaatcccgcgattacgggttgtttttttggtttctttcaatcgcccgctcgcaaatccatcgtctcgatccaatcccagaaacgtccacttttttcttgagctttcttttcgaatccgtaccgttcaaattgatggggtttccgccgccggcggatcttttcctgttttgttttgtttgaattcgcagattcctagggttttctctggtttcagatctgggttcttttttggaggcaatttcgctgttaaaatcttgcaaagatgttttggcgtatgactggatattcatctacttctcctattgatgcaattttagtcaaggacaattttacattggaggagcttcttgacgaggatgaaattattcaggaatgcaaatccctcaatg

SEQ ID NO: 255037 - DNA, 335 bp, Gossypium hirsutum
ttaaatctttgctgctgaaactgacaagctcaaaaaaaatggcagcactttcctttccatggtacactaaaaccctattatgtcccaaaaccaccaaggtctggtccttagcttcccatggatcaatatctactagcccttttgttttcccacaatttctcaatctctccattaatcatcacccataaaaatctgagctttacactctgttctaccctgcaagaaatagccttggagcttgaaccaggaaaacccaaaaaccgaatgtgaaaaaaaagctctttgtcttgaatttgccttgggcttctactggtgatgatatcaaagatctcttt

SEQ ID NO: 255038 - DNA, 214 bp, Gossypium hirsutum
tcgatttgtcaaatattgcctagactaaccatgttgcaacctatgacatttccgatgaggtttacaagggttttgttgctttgtcagtttaagatgccccattgttttggttaagatttcaaacaagaccaggtggccttcccagcaccgtcacgcatacttctgaaactcagtgattatagcccggccttggacttaaattctcaaagaagca

SEQ ID NO: 255039 - DNA, 117 bp, Gossypium hirsutum
tttgttttctcattttcgagaaaagggagaccccttcacttgttatacccccacacaaacaggaatcataagcattaagttttggttttcattttcttcatcagttttaggaggatc

SEQ ID NO: 255040 - DNA, 169 bp, Gossypium hirsutum
tcgttcagtagggttgaaacaatggctttcctaagtaaaattgggaatatgcttaggcagacctcgacaacacagatcaatgctcagttgtctgcatcaagtccaagcctctttcaagtgttccggtgcatgtcgaacatgccgagctcaaaactatttgtgggaggta

SEQ ID NO: 255041 - DNA, 350 bp, Gossypium hirsutum
tttatattggcataagtgcagacatcacaagtccaagaccttggctacatgcgcaatgtgtactgaagcaccggaaccttagatgactccaaacagggtgagtttaatttatcttttcaccattttgctagtttcaaacattttaggatttcatccatggagatgatgaggaatagtatttcatgttccaggttaacaaggaatcgtatttaaataaagaatatctctttcttctattttattttccagaattcatccatagagatgatttcatacataacgcaataacattttatgttgcagatatgcgtaccagtacccccactttttatttgcatagtgggatgctt

SEQ ID NO: 255042 - DNA, 234 bp, Gossypium hirsutum
ttcctgtttctgattgcgacgatggtccaaatacaataatgaaagatgaggatagaaatgaccttctagaggtggtgtggtgccgagcaaatgttgtaattttcgcctgggggaagcgaattgtatgatattaaaatctataaattttgcaaaaagcctatcgaggaaattatgttggggcgttcctctgaggcttcttcactccacctggatgcatatcccttgagggcttgc

SEQ ID NO: 255043 - DNA, 169 bp, Gossypium hirsutum
tctttagcttcaatcttttttatcaatggcggcttacactacctgcgacaaaacatccattgatggaagtcggacaccattggttcaaaatctagattcggatttctcttctgggtatcttgaagatgctttacttgaattcactgaaatgtcaaaacggagacgattg

SEQ ID NO: 255044 - DNA, 329 bp, Gossypium hirsutum
tccacgcgtccgaacagccatcctccctctgttcccctctccctctccctctcccttctcccatttgttttccttcacattcctctcaccgttttcagccgggcctacaattttcttttaaaagaaaactatcttgagaatcaataacgaagggaaattgaaatcggatcgaagggttgagggcgagaggagaagaatgagcactaagaagaaaacatcgcagggtcacttgagtagaacacgcataggaaagtacaatctgggaagaaccctgggtgaggggagtttcgcaaaggtcaagttcgctgagaatgtcgagaccggtcagt

SEQ ID NO: 255045 - DNA, 161 bp, Gossypium hirsutum
tcggtgctgttctctgctctcaccagatcaaaaggaaattcaaaagaaataaagatcgtacaaataagaatctatattacgctactgagaactctgccgaggaaaaagcagacgcaatggccgtacagcggttagacagaggcgatctatggaagaacaag

SEQ ID NO: 255046 - DNA, 408 bp, Gossypium hirsutum
gctgaaaaaggttaatgaaaagcaattagatgctctaaaatctatagtccattattcggaaaatcgtagtattgatgcaaccgagcttcttggttcatggcaaattaaagagaagatagtgacgttggaagaagaaattgttgagctaaaaaaaattattgaggagaaaaaaatgaagaaaagaaaacggaaagaaaagggatcatcaagtacagttaagagccaagaaatgaagcgatcacggttggcaaccgaagggtcccctttgccaaaatctgaagcaaatcagttgtgtgagcaactgaccactattctttccgaaggcgatggttcggtccctatttctagtaatgccaacaattctcctgttacctcagctgccccacatggatcaacctgttgttttcc

SEQ ID NO: 255047 - DNA, 243 bp, Gossypium hirsutum
tttttaataaataaaaacctgtctttctctctcttttgctagcctacagtccaactttcaaagctaaaacaaaattatttttcttgaattttaaggatttacaagaaaaacaatgagtgcaccaaagagagcttggattgtggcagcatcaatatatgtagttgaggctttgaaggaccaaggaatttgcagatggaactattgcctaaggcttgccaagaacaattttaccaaaccattttc

SEQ ID NO: 255048 - DNA, 283 bp, Gossypium hirsutum
ctattgttcacgcgttcgcccacgcgtgcgtccacctgcaccgtcaagaccttcaccgatccacctccggccggtttgtttattcccgaatagccaagtagaagcaagcatacaagaacgaggagtttggtacaggagttcctaacacgttgaatgtgagcaccaatttcccatttctgattgagggtgttcttgggtttgttctttgccttggaggaggaagctttttcaatataagattgccaggagagctgtggggctggctgcttttctatggaggaac

SEQ ID NO: 255049 - DNA, 321 bp, Gossypium hirsutum
aagaggctgttatctcgctttatgtttatagctgacgcatactatttatggcatttgtaggaagacacaggtgggttgaatatgcaaaaaaggatagatatgatgcatctcaggtacccccagaatggcaaggttggcttcacttcataactgatcacacaggagatgagcttttgatgctaaaacctaagaggtatgggttgagcacaaggaaaacttatctggaaaggggagtgaatttatctaccattctaaaggacatgcacttaatccttgtcagagagagtggactaggtatcaatcatggcaacccacgaaacc

SEQ ID NO: 255050 - DNA, 379 bp, Gossypium hirsutum
ggagcccacacaggcatcagtagtcggtcagtcactggggctttcgccatcacttcatgtgctagtgctgcgtaatagtccccccccccccccccaaccttcatcttctgcgatctggcccttataaacccaacccccctccaacctttcattccattcccaacctctctgttttctcctttctgtcacccatggaagtcctcataatgtctccctcttcatgttcttctctggtttccttttcccaggaaactccgtcttcaacccttcagcagaggctgcagtttgtaatccaaagccagcaagatttgtgggcatatgctatattttggcagacactaaacgatgacctgggtaatctgttcttggcttggggaga

SEQ ID NO: 255051 - DNA, 433 bp, Gossypium hirsutum
gggagattctttttctttttttcttttgctgttgtaacactaggggttttttttttatgatcaattataatccttttgttgtaaagttcttattttcagagggtactttgggggattttattgcttggagatgatggagaacagtgaagaatcagcagtggatgatcaagggtcaggatggtttcaagtgaaaaagaagcacagaagcagctcgaagttttctgtacaaagttgggttggggggtattcgaccaaaaatgctaataatttggtgagaggtcggccattgtcgaacaagaagggtggagctgtgcaaggaaaatatagatctttgcttcgatcatctggggggaattcagatggacatacccaggatggttttgcaaattctactgccgagtcaaatgaagatgaaaagagcctttatcccact

SEQ ID NO: 255052 - DNA, 355 bp, Gossypium hirsutum
tttatatttaattttctttcttaatcatcctccccattcatctgtcgctataaccccaaaaagcctgcaaaccctagtctcaatttgtagaactgagcccaggcttgctgatttttctttttctttttcctactttttttggttgctttacatttttattcggatttatttcgttttatttttaaggtggctaataaacttgattaattttattctgaacactgttagttccatactgttaataatctcaaaatgttcttatttggttcttttaaattgcaatgttgtcattatatagcagcctttaatgcagttccttgaaaaattatgctgttactgatttttggaatgatga

SEQ ID NO: 255053 - DNA, 195 bp, Gossypium hirsutum
cgatttttccggcagattctttttttttctttttatttaccgataaaaacctgaaccctaactatttaaagtgtcttgattttcagtgttttctgcatgttcgcttggggctagacatcctgtcggttagtttctaagtagataagttcatattatagagtctgtgcagtttgttttgtttgaaaggtacggatt

SEQ ID NO: 255054 - DNA, 248 bp, Gossypium hirsutum
tcgttgatctactactaagcagcaaaggccaaaaccaaaagtgttgagcctttcctatccaaagcaaaaaaggagtaaacaaaatatttataaataaataaataaaattgaatcaaaaactcgaatggcgcttaaactggcattctctcttctttcatcaactcacagtctgtgaaaacttccaacacttccggcattaaggtttttccggtttatataaattcagggcttccttaatccccccaaac

SEQ ID NO: 255055 - DNA, 161 bp, Gossypium hirsutum
tcgtccacgcgtccggtacttttgcagtttctgccatgaatttggtgacaagtctgtttatcactgctctagttgtaaattggactttcatattaaatgtgctctgtttacatttaatattgctgagaataaacaaataaaacctattctaatggagactt

SEQ ID NO: 255056 - DNA, 427 bp, Gossypium hirsutum
gaaaaaatggattttcctttcatttcattccatttcggcctgaaatctgaaaatatgattaattttttggttttttaggttatatttacatgtaatttcaatgttaaccagttttgtgtttaaatttcgtctttgaaattttacattttcaatcgatcaactgtacataggatttgattaatgaagctaatagttgtgaattaacaaaagggaaaggttttaatgcctgctgtaatttgattgatttgaacactatatggtgtttaaggcaatcgattattttcattgttaaaatatacctctgtttgtctgttttagctcgttggatagtagctctataaatatttttttttgtcggctatgttgctgctgatgaatgttggatatgggttcgagttttctcatttaagttttacataaatttgga

SEQ ID NO: 255057 - DNA, 257 bp, Gossypium hirsutum
ttggttttactagtatggtggaaatgtttactgtttaatgctgtttatctgcataataattctttttcttttttccttattatgtctatttagttttttagattatgtcgctgattcgattcctaacttatttaggaaccccattttaagattttggcttaatgctggtaaaatgtagcatggattccactttggtaaagcattggatgattcattgtgaggtctatctgctttggcctaatatgctttactctttt

SEQ ID NO: 255058 - DNA, 305 bp, Gossypium hirsutum
catgaatcgtacaactgcaagcgcgcttggatcaattccaaaaacatttaaaggagtacaatgttttagtatcttcaggcaattgataaaccggttaatgaagctggtgaaacccattgatatactgtggagttcagcctgggtgtggacttagacctgcctttgatttgattgtttcttctttgatgctatggctttcttcctccatttttgatgcttcaggttagtttactgttgtgactccatattataaatatatgcattgctcctcccttcgttataaataaaatgtgtgaaatttattc

SEQ ID NO: 255059 - DNA, 446 bp, Gossypium hirsutum
cccacgcgtccgcccacgcgtccggttcaaagctgtcatttcttggttatctatctctgttgctgccatagctagcaggtgatttagggcactggtaagtaacttgttccagaaatatttttgctttcattgcattgaaaatttaataatagacaaaaataaaatctttgctttcatttcattcaaaattaaataaaagacggaccatgaaattattttttggtacaaaggagatcgtagataggggaggagttccaaatgtcgagatttgaaccctagacctgatgatgtcacttataaagccgtgtctacatgaactaggtttagtgtttcaggttcatgccttcaaatttttgtttagttggttatttaacctaggcacaggtattatgaagtccatttccaaagtgtattgaatttatcacaaagagaggtggtttctcttt

SEQ ID NO: 255060 - DNA, 385 bp, Gossypium hirsutum
ttcactcttccgatccaaaatagtaatactctcatattttcaacaatggctacccctatctcactctcactctcatcactagcttctaaatcccagcaactggtgaggaatgagcgtcggatgttggccgcatccgacgatggtgcaatgatgaagcaaattcagtcgactcatgcccccgatggtcgtgttgttgatgttaaaccaattctccaagtcattgacaatgtgttgcatcatatcattcccaacattgatcatgctatgaaatggtggaacgggacacatcgatgctctcgatgatcggaccaactcgtctgccgttgatggtgcacttgatgctttggcttatatcgcacacaaaatctgctgcgaggtatcatgc

SEQ ID NO: 255061 - DNA, 418 bp, Gossypium hirsutum
ggaggatgtctgcctagttggagattttacaggaaactggaaagaaccaataaaggcaacccataaaggtggagctagatgtgaagttgaaatcagacttccccaaggaaaatattactacaagtatattattaatgggaactggcggcattcaacgtcttcaccaacagaaagggatgaaagagggaacattaacaatgtgattatgattggtgacactgcaagtgtgaggcccacaattcaaccacaacagaaggatgccaatcttataaaggtgatagagaggcctttgacggagaatgaaagattcatgctggccaaggcagctcgttgcattgcattctctgtctgtccaatcagactagtccccaagtagtttttgtcactgcaattccaccaagtggaatgtgctttggtc

SEQ ID NO: 255062 - DNA, 407 bp, Gossypium hirsutum
gtcgactggtatgcggcaattaataaaccagctgctgttgttcattggctcaaccatgtaaacgttgatgctgagtacatagttatccttgatgccgacatgatcttaagaggcccaattacaccatgggagttcaaagcagcacgtggccgaccagtttcaaccccgtatgaataccttattggttgtgacaatgagcttgctaaacttcatactcgccatcctgaggcttgtgacaaagttggtggtgtcattatcatgcatattgatgatcttcgggaatttgcactgctatggttgcttaaaaccgaggaggtccgagctgacaaagctcattatgcaacaaacatcactggagatatatatgaatttgttggaacagtgaaatgtacggttactcgtttggt

SEQ ID NO: 255063 - DNA, 353 bp, Gossypium hirsutum
cttggtttcggctttggcgttgcacgcaaatctctcgctcaacgctatgtccgaaacgactgagggatccgaacttcaaaatggtttccagccacaaccccgacccgaacccgaaccggaatcggaattgaaagtagaatctcaacctgaacaacaaccggaagaggaactgaaaccggaacctgtagtaactgatgccgatccgaagccggagccgaacaatgagagctcgatccaatcgaatgagacgaccaaacaagcttcaaccgaccaagttgctcctccagggcggcgtaaagatgaggagaaccggactttcacgatgagagaattgctaagtgagttgaaaagcg

SEQ ID NO: 255064 - DNA, 162 bp, Gossypium hirsutum
tcgttcgtagcccctcctcccccgatcccttccccgtccgtcatccccgtcgtccctccttttgtctctaaccctacgacggcgactacggtggctggtggtccaccaccgagtttcgatcacccatcttactctgacatgatatgcgaagctatcggggct

SEQ ID NO: 255065 - DNA, 291 bp, Gossypium hirsutum
cccacgcgtccgcggacgcgtgggtttgtctttaggcaacggtccgtcgtgcggaaggtcgaaggtcggtagtaacggcgaatgctccacttcttccgtcgttgacattgtgcttgacggtgtctcggagacggtggaccagatgttggggaacgctttctgttggaaccgtactgactatgttcgaattcaggcaaacggactggggagtggaaggatgagaatggaggaggtactgaaggaaagaggggtcgagtcgttacccgttggcgggaagaggttactgacaga

SEQ ID NO: 255066 - DNA, 377 bp, Gossypium hirsutum
gaacctataaagctgatcttcagaaactaaagaaggagaaggaagaggaggagattaggcgactcgaagcattgaagatggagagacaaaagagaattgctgcaagaggcagttccgttccagctcagtcatccgtggcttcacaaagcaagaaacaattgccatcaaaactttctccaagtactcataagggatcaaagtttactgatggtgagcctggaccatcatcgccgctacaaagatccatcaagcctgcttctgtgggatcagtttattctcataaagcctccaaaccgagtaaattgaatggtggaactccgtcccgtggaaatagattaagccactcagtttcatcattgctggaaccaaagaaagac

SEQ ID NO: 255067 - DNA, 320 bp, Gossypium hirsutum
tctgaagaagaggaacagcgattagaccgagttgactcactccacgagccggacctgacttcaaccagctcaagcctgtcctcggtattcagtgcggttgattctaggagtgcgacgagttccggcgatatatccggaacgagcgggagttccggcgagatcttaacggcggatgctgtggttccgaggctgctcgagcctgcgcctgcatgtgaggagttgaaggtgacggtaacggcgaggcagaaatgtgttgggaggaataacaagggagtgacgtgggggttcacttcggtgatcgggagacagcgagagatgga

SEQ ID NO: 255068 - DNA, 360 bp, Gossypium hirsutum
ccgaatcagaaatcaacagcttcgatgatttccatgccgccattcttgatatcttgaatgttattagcacagcattacctgtaaacattatgatgccccatctcgccgtgaagtcgagaaatgttttaaagcatgggaaaacgaaaaagaccctgagaaaaagaagaagatatttatgaaatttatccaggaaataaaacttagccagctcgataacacaaccataataacgggaatagtgacgccgccagcagccatggcagcgaagaaagcgggagaatttttgcctcatttgagcgtgataaagacgattccggatgtagttttcgtaccatcggtgacaatggcgaccttagtcat

SEQ ID NO: 255069 - DNA, 330 bp, Gossypium hirsutum
cccacgcgtccgcccacgcgtccgcccacgcgtccgggttttcatatttcccctctttttttaatagaggagctcttaatcaaccgacccaatcaaattcataaattttagagttttgaatgggtacggagagaaaaaggaaggtgagcttgtttgatgttgtggacatatggtgagttacatttttatttttgttcccattatttcctttaacatatgttttgcatggtttaattattatcataagtggattgatttgccaattaaatcacttatgtaatcaatccaaatatatgtgagtattaagttgattggagcctggcaagggcc

SEQ ID NO: 255070 - DNA, 334 bp, Gossypium hirsutum
gttagctatgtcaggggagccgtccttcgagcggagctcccgccgagggcgcacatggagggtgtacagcgcaagggtgattcagaaaccctagggtttctgaattgttttaggctattgggcctttgggcctgtaggaattgggttaggggtttaggttttgtctgaaaaatgggttaaatgtgatttgggctttggtaaatagattgtaataattttggacttttcaattctttgggttttattattattgttgggttttctgacgggccgggcaaatttgggcttgtacaatgaccttttacttcttttatgagattataaaattttagtc

SEQ ID NO: 255071 - DNA, 310 bp, Gossypium hirsutum
aaattgcctgccttcttctctccaaaaattccccgtcgatttcatatccccaaatcaagccaaatcgattcgccttcatcttcttccaaccaaagcgactgagaaacactagcgggaagggaggtaatctttttctgccctcatcaagcttcatcctctccgacgtttcccttccattgattgcagaggaacgaaaaatgtcatcactttcacatatttgatcttctagcaccgccgcctgtgcctctactaccagtgagaataccttgtcttctttcctttaatttctacacttcagatctttatctat

SEQ ID NO: 255072 - DNA, 313 bp, Gossypium hirsutum
gttaatcgtgaaggataatttaaatgaaaaactttcatatagagactgtgaaaagattgcaaaggatcttaatctgaccttggaacaggtacttcgtgtatattatgataagcggcaaaagcgtcttaatagatttcggggtgttccaaatagcaatggagagcagtatcaaggagaaagagataaacagtcatcttctcggaaaagaaagagatcaactgtcaaatcaatagaaggaataaaggctgatgcaagaatcatacaattaggtgaaaaggagggtggtacactatctgatggaaatgatgagcta

SEQ ID NO: 255073 - DNA, 467 bp, Gossypium hirsutum
gtcaccctcaccacaagaaaccttctgaaaacagtgtcgatggatgtttgtcgggccaccaaactattcagaagtaccgttagatcgagcaaacttctcgcttaggaaacgttggccatcattagcagaggagaaacgtctaatggatggaggagacagaccgtcgtaatcctgattgtaacggtagtagcgtcattgagccgaatgaccgtagtgactgcaaatctgacattgaacccgtggccgaaagtcgctcctattagaaccagataaagaacgaccgccgtcatgagtaggaccggccaccgtcgtgtttaacggtacctcaaccatgttcacatgaaacggtacatcatgcatcgtacgaagctgctgattctcaaaatccaagagaaccccaatgattttttgaaacagatgtggctcagaggagaaagacgtcagcgttatcacggaatcaaaatctg

SEQ ID NO: 255074 - DNA, 300 bp, Gossypium hirsutum
tcgctcacgcgtccgacccgcacaggcaacaccaccactcgcgctcgttctctgcgcgtgcaatatctttgccttctcttccttttcgggcaccttctcccgccccaccgatcctgctctggttcacccgattcctgacccgagttatcgcttccggtcccgccttcaagttctcgacgggtcaaaccaaaacctataaacaaaactattaaatgagatgagttttgcaactgattccccagtacactcgtctagcagtgacgattttgctgcattaattgatgcggagcttgaagctgg

SEQ ID NO: 255075 - DNA, 480 bp, Gossypium hirsutum
gtagttcactttggcggcagtttctcagttgtcttcttcttcgctttcttcgtcttcgtcttcttcttcttcggtgattgctcgtttcagcgctgattctggagttgcagagctgcggtttcaccgagattcggaatttattgatggcttcaatgtcgatattggaacctcgcagctcttcaagctgggaccggttcaatcgctttgtgtttcagagagttctggtgccagtaaagagaaatcatattcacgggcagtgaccatccagtttagaaacgaggatgaaagcagggacttccattccgcatttgagcaatggcagaaggatgttattcaagcaggaattcatttaccaaatggggccattgctgcttctaagagcaagtttgattataaaattgagccatcttctgctaaaatgtatttccactattatggacaattgctacatcagcaaaatatgttacaggattatgtgag

SEQ ID NO: 255076 - DNA, 278 bp, Gossypium hirsutum
tttgactcgtgggctttgtttaaaaattttcaaatttatttttgcatattaagatctaaccttttcatttgcagacgcactctcagatcccagctctagaacttcaattctctccctaaagtaaacctcccaaatatctctgttttttttgtttgaaaaccctaaaaccctaattgtttcgagttgctatcctatttaaaaccctaatattttctgcttgatgtagagtttgtagacaaatgggagaaacaagagacaacgatgtctacgaggaagat

SEQ ID NO: 255077 - DNA, 433 bp, Gossypium hirsutum
tcgttcacgcgtccgcccacgcgtccgtctttacattcctatttcattttggaattccattatccactttgttttctttttcttaattcaattgagcattagattattttgtcttctttttacaaaatttgtctaattctctttgcaatttttcctatccatttccactacctttttcatataatttctatcattttcataaccttcaagcatgattaaattcatgccacactaaacccctttcaggtttaagccgatgttaaccccgtcaaaatacccgtgagttatgaacccgagctatttaactcccaactttcgatatttattatttctccggattaagagtatgacttcgtcaactcacaaagtcaagtcaatactaagtcaaaaaagacgtcgtttgagttagtgtggctagacgtacagttggaat

SEQ ID NO: 255078 - DNA, 405 bp, Gossypium hirsutum
ttcatttttctcacacccgacgccaagtcaatggctctctcaaaactcgaacaacaatcacccacacaagaaccgccgtcgccatcccactgctacactgctttaccaacccaatcttctgatgaaaactacgccgttttgcccttctactcccccgggggacgactccgctggtgcggttgccggatgctatacaccggcacggcttccttcttcttgttagctaccttggtgtacattttctggccctccgaccccgacgttaagatcgtacggatgcatgtgaaccgcatgaaaatccacaccgtacccatcatagcgttggatatgtctttattgattacgttgaaagtgaggaattcggacgtctactccatggacattaccagtttggacgttgccgtc

SEQ ID NO: 255079 - DNA, 212 bp, Gossypium hirsutum
ttgttaaatcgtcgagcttatggtggagagaattcactaggtaagaagattatcctgttgttgatacgccgactccttcggattaagctcaagagtaccatcatgtgcttgtacaaatttcgactgcacagtaacagaaccatcaagaaaaccatataaactataaccattaacaatgaaccgaacctgttgctttcactgaaggaaggtgc

SEQ ID NO: 255080 - DNA, 417 bp, Gossypium hirsutum
ttctttaaaccgcagaacaaccaagaatgcgaggggaggaagaaggagttggagtcagcgagggagcaatacatcgccgtcgcgacggaactcgatgccaagaagcaagagctgaataaagtcaggcaggatttcgacacggcgttggaagtgaaattggcggcgtttcagcaggcggcggaggcgcagctctcggctaaaatgcattccgagagggttaccgagctgacgaagcaaatcacggtgatgaaggaagcgattaagcaagtgaaattcgctacgcaacaagtgtacaaagagcaggagagcatagcggcggataaagaaatgttgcagaaatcttatgagagtgctaaagaggaagcggagaagaaattgaaggctgcgagggaagcgtatgatccagagctagcgaga

SEQ ID NO: 255081 - DNA, 415 bp, Gossypium hirsutum
tctttacgcgtggggtagtttttcacgaaaataaaaagtgatcccgtcggtgaaacagagttaatctcagagttgaaaaatgcaagatgaataaaataggtaatcgttattcagctttcatgtgcaacgaaatgaagaaacaagattatccaaagaatcttcaaagtcgaaatgatgcagtaggaggtgatctttggacagatggacttatttgtgcttttgaatatgttaaaggccaaggtaaaagaggtcagccaaaatcaggtgcaaaggtcttgtctgcacaatatagtttgaaagaagcttctagaagacggatctatgctaatgaacccgaaaatgttaatttctaacaatttagctaaatcttcacccttgaaagactccgtagtcacagttaaagatgcattatatg

SEQ ID NO: 255082 - DNA, 323 bp, Gossypium hirsutum
tcttttattctccccgcaactaaaagcacgatcccatcttttccttacagagcagcaccctttgtttctctctcacgttgttcttagtgattgtgtgaatgtgcgactgagtgtatatataccattgctgcttttgtcgattcccgaacaccactcgcctgattcaaccgcagtccaatatcccgtgtattacgccccccttgtcaaaagcaaaaaaggaaaaaaagaaattcgtgttgttgggttcgatccttttgcctttgataaattgtgaaagactgagagaaaaaggaaaatgtcgatctctgtgtaacggctacttt

SEQ ID NO: 255083 - DNA, 481 bp, Gossypium hirsutum
ttcacgcgtccggccagcagccgaaccaccataatatttggtgatcaacagtacgcaaacagtacccgatcctaccattgaaggtgctcgaccatgcctaaaaggatttggtaagtatatttttcctccttttcttctttattaaaaaaaaaacttcaaatctcatgttgtttttttaaaaaaaccgtagaaaaattcataaaataaagaagatttcatcactattcgacttctcgcccttacctccgcatttctgaggtatttaggctctcattggtgtcgattcacatgctaaaaatccaagccaatagaaagaaaataaatcagaatagaggaaataaaacttgaaatcacctttgctaaaagaattgctttttctttcttctctatgcgtgcgtttacgttcgtaagtcctttttgcaaatacaatcatcggcttttatagccggatttacagagtaaaataaaaaataaaaataca

SEQ ID NO: 255084 - DNA, 153 bp, Gossypium hirsutum
cggactctaggtttgacgcgtggggccgttttgcatcatcatcatcatcatcaacctccaatcgtctatctctatgttagtgtcatattttccttacaacgaagttcttggaattgcatgttgctcgccgcctggggggcctggctgaagaaa

SEQ ID NO: 255085 - DNA, 482 bp, Gossypium hirsutum
ccctctcataattcatcagcaattacacgaaatggaacctcccctcttcctttcagatgaaaggcatgaaatcatagaaaaaaacgagagcattccttcttgatctgataaagtcggagtccaaaagtcattaatccttttgtcattcctgttcaaccatcatcggtcctgatctgcctctctttccactctctccggagcttcttcaatccagtacatagagcaagcatgatacttcccttcctcagccaagatatgagcagtgttgtctgcttttcgagtcaaggtatccccttccaccataatcctttgaaaacccaaatcttccgcaaagattagggattgtagacaagcaggtgcctccgccactgtggaatccatcacatactcattcaggacttaccgagtaaaggggcactcacggatcaagtggtccactgacttcgcagcagatcgacaaacagggcaagatttatcgcagc

SEQ ID NO: 255086 - DNA, 175 bp, Gossypium hirsutum
ctcttttttaataatttaagcaaactttatctttatgctgggggatggattcaccagctatgacgagcgatggggggtacaatctagcatagatctgtcagtatcccgcgagtgaatctgggttaaggaggggccagtttgcgaatgtgccgtcgccttattacgaccaccccaa

SEQ ID NO: 255087 - DNA, 144 bp, Gossypium hirsutum
ttttaacaaaaaaaaaatccgtttcattgggaaaaagtgagcttttgggactctgtttttcatcgccaaatccattattgaaaccgtagcttgcgatcttccattgatttttcgaaagcgttttcgtgctttacagattctttc

SEQ ID NO: 255088 - DNA, 165 bp, Gossypium hirsutum
aatttaattagagagatggaaagaaagagagataaaggggtggtttttatttgtaaatggcgtggtttatacttttgaagaatgtacgagctctgatatctgctgcaatttatacaggttgatgggaaggagattagaggccaaacagtgagttgtttgtgtttt

SEQ ID NO: 255089 - DNA, 278 bp, Gossypium hirsutum
gggctgctttcacggcggcccaagccaaaaccttctaggaaggctgactttgacttgaaagaaacagaatagacccatgttaaaagacccagtgtcgggatttgtagtcagatagagaaattggcttcttgtaattggtatagggaagcgctagaattgtttgatattttggaacttgaaggtggttttgatgtgggtttaagcacgtatgacgcattagtgagcgcttgaattgggttgggatctgtaccagcagttaatagagtctttagttacat

SEQ ID NO: 255090 - DNA, 337 bp, Gossypium hirsutum
cggacgcttgggttgctttcttccttcaatctggttcttttagcctcggagttactgctaggatggctgccgcttcagggactcgtccgaccagataggctcctctactactcttcagcgcttcacttgctaatatatgcgcaagataatcaagaatctattgtcaacaaggaggaaaatttaatggatgaatcaccatttcttaaactgaagcggtggcaatggtggcttttggtggcaatcaacatattcttcctcattgctggccaagctgcagcagttcttctggggagattttattatgataaaggtggaaacagtaaatggatggccactc

SEQ ID NO: 255091 - DNA, 186 bp, Gossypium hirsutum
cccacgctttcggtttggctctcgcaagatggtccagagcttgaaggagattgttaactgccctgaacctgagatctatgctatgcttaaagactgtaatgtggaccctaacaaggctgtcgatcgcactcctctctcaagatccttttcacgaggtgaagagcaaacgagacatgaaaaaagaga

SEQ ID NO: 255092 - DNA, 412 bp, Gossypium hirsutum
gaatacttttcttccagaaattgaacaatatcttttttttagtatgggtaatttcgtgcttttccctcacattttactgcctagcatctaatacattccaaaaccaatatcttatcacttccattgaactgtataaccgatgaacatctgtcagctttttccccatgacattattggcaattttttcccaatgtaaacaataaacaaaatgaaggaaaagggggagagtggaggaaggagcaaagaaaacaattgaacaaagtattaaccggttcttaccacacaagctggagcaagaggaacaaaagtgagatttttcttgctgtcttcagtttgcatatttaaagtctgaaaatgttggcatcgtgttactttaaaagttaataaaacaagttaaaagaagattttttac

SEQ ID NO: 255093 - DNA, 253 bp, Gossypium hirsutum
caccactttagaacggtgccggactgtgtcccgtcagtccaccatactacccaagcccaccaaaaccagtataccaaccactgcgcatctccgatccagtatgagcaaacgagaatcgcgccaccgtcggagcagttagaccatcatactcacggttgaaccggtagaagcaccgttacgctagatggccataataaccgtaaatttggcactgtatacgaggacgaaagccacgcccgcgcaaacgaccacc

SEQ ID NO: 255094 - DNA, 116 bp, Gossypium hirsutum
cccacccgtgcgacctcctttaccgatctcttaaccctgattactacctggacgatgatctcaaaacctttttaggccttaacatcaaatccaaaacaagggactggtatttcttc

SEQ ID NO: 255095 - DNA, 304 bp, Gossypium hirsutum
cccacgcttccgtccacgcgtccgctgctctctgcctctgcggtgcgtcactctgctatttttgattttcagctttcgatcctactgctcgttacttattacgccgtatcatctcatcttttctctctctgtttactttggtgagaagcagatatttgttttaaagctatccgtttagcggaaatagataaagttatcgccgctattttccgttacaccgcctattgagatctttatagtggcagacggggccgatattgcaaaatagcgacccgcggcatcgatatttgaaacactgccaata

SEQ ID NO: 255096 - DNA, 168 bp, Gossypium hirsutum
attttatttttcaatccaattctttatctacagtagaggacgggttactttcaaaccccattttgttcctagagtgatttcttgtatttggacgtcccatcatccatttgattttggttaccctttgtctttttgggtctttttcttccttcaaaatctttctattat

SEQ ID NO: 255097 - DNA, 315 bp, Gossypium hirsutum
cccacgcttccgtgcttctgacggtttttgttgctagagaggggaaaattctaaccgattcattgctgattttcttagccagctcagttctgtgggcaatacaaggggtagtcattcatgcagctagtggtagctcagaatactatgaaccagatcccttcacatgcaaccgtcatccagacgttactaacgcaacacagtcaccggtgccgccacctcagtttccgttctttcctcttaccaatggatctccaccttttgcaatgctttccacttattctgctgagcctagtgaaattcagtcatgtgagtcac

SEQ ID NO: 255098 - DNA, 430 bp, Gossypium hirsutum
cccacgcttccggattgttacccccgaggttatgaatgttggcatcatgggaagtggcacagaagcaacttgttcgggtttgaatcaacatagagttccaaatccctgcaactcttccgtggaaggaggcatctctccatttgttcctgaaggtagggtgcatggtgggagtttgatggcaatgcttgcaggtggttctggtcttggttcaggcaactgcgagggtttggctggtaatccatcagagccaaataaatctcatatggcgccccaaaagtggatgtaactacaacttaacaacaattgtcaaagtggtgttggaagttggcctccttttcatgcttgtttgtgtcctttgcgttagtccctaagtgttagaaagtcgtcgtcattcattggtctagatagtgatatgacaaatgtggtggaa

SEQ ID NO: 255099 - DNA, 489 bp, Gossypium hirsutum
aatatcttccttctccccttctctccatccccttcactcaatacttcaatctttcccccatgccagatttatatatgtatagagaaatatgagcttcttgttgaagatcattaacatcagcatcagcaccaccccatagcatattgcactgttccatgcattgtcatcaagcatgacatgcaaccatgcatatgttttggcatccatgtgtatatcatgtatgtgcctggctccctgtatgccatccgcagaacctatcgaacaacgatggcatctgtgaatggcgtatgaggagtcaagcatatatttctattttctacatatatatctccatcagtatacctcttttgcaggctttactgttttaatctttttgctttccaattaaactgaagggcttcaaggtacttcattttcctcatcctcatcttcatcttcttctttaatcttaatatctggtattagggttggtttcttcttctttgatat

SEQ ID NO: 255100 - DNA, 339 bp, Gossypium hirsutum
gatttattcatgttttgcaacagttgttggtcagaagatagtataaaatcaaaacagatgcaaaacttgagtgaggaggctcatgtatatgattgttatagctctcaggaattttccaatgatgaagactacaaggaagagcaaaggaggaggaagataggactggcaaataaagggagggttccatggaacaaaggccggaagcatagtgctggcagagacacgtttacgaatcaaacaaagaacaatagaagccttgaatgatccccaggttaggaagaagatggctgaacatccccgcactcatagtgaggaaagcaaggcaagaattgggtcttc

SEQ ID NO: 255101 - DNA, 340 bp, Gossypium hirsutum
cttcattactctctcttcaaaatgcctcctacatatttgcctcttcgttgggaaagcactggggatcaatggtggtatgcatctcccatagattgggcggcagctaatggccactatgatttggtccgagagcttcttaggatagatggcaatcacctcatcaagctgacctctttgaggaggatccgccgccttgaaacggtatgggatgatgaggaacaatttgatgacgttgctaaatgtcgttcccaagttgctaggaaactttttcttgaatgtgaatcaaagaaatcaaagaattcccttatcagagctggctatggtggatggcttatataca

SEQ ID NO: 255102 - DNA, 255 bp, Gossypium hirsutum
cttacatatttctatattatatatagtatccacccctttctttctttttctactcagcataaagtaaagcatcttacttccttttttctttagtctttgttctttaatggagttgggttcggtttcaaaagatacaagctggtgggtttatactcttccagctttctttggatccaaaaatttgttcgatgggtatgttttgttttccctctttatggcatttctttccattgcccttttttcttgggcttttgc

SEQ ID NO: 255103 - DNA, 429 bp, Gossypium hirsutum
cccacgcgtccgggaactgcatccatctcatctcatctcatccaattccttcaatcaaaatccaaaccttttccatcaatttccctacttatgaaacaaactgtttgaaaaagaaaaaagaaaaaaagaaagatgagccctttcctttgctttgttttacaagcatggaatcctagctcttgtcaagtttcctccatggaaacttctcgttttctcagagactatgctgtttgggaaatcaatgcttttctttggatttctcttataactattacttattttctttcttataagctttttaagttgtttaagttatggaatcaagcttgcaaaatcccaggtcctccttctccttccttttatggtcatttcactagtctctccaaacaaaatctcacagaggtattgtcagattcacacgaggaatat

SEQ ID NO: 255104 - DNA, 177 bp, Gossypium hirsutum
cctacgcgtccgcatcactgtctctttagcctttaccctttgtttcgttgatttgtttctaaggatttaatctccaaaccttcttcccatttcttcattacattgttcaagaaaaaagaagcaaaaaaacatggccaaagttctgttgttcattgcactatgtgtgcttccagcttt

SEQ ID NO: 255105 - DNA, 326 bp, Gossypium hirsutum
gattgacttgatttgagagagaaattttatattttaatatccatttttcttttaaaaaacattacaccgtataaaatgccagaccattgaaccaggggtggaaaccttgttttattacagcccacctcttccttctctccctttttccttttttgcattacagaaatctccctctttcattctgttgtctctgagatggcccggaacggtggcgttgcttggatgaggacgacggagaagatagacggctacgatctttctacttctgatactgaagaagatcatgttcttgccgttgatgatagcctcgttgatcggaaagtcat

SEQ ID NO: 255106 - DNA, 439 bp, Gossypium hirsutum
cttacgcgtgggcagctttgtgcggagaaattgaggataatggcggacatttcgaagctcttctccttctcttgaaattacactctttcaccaactgtttagctaactaactttattcattcattcttctcgattttgccccccgtttttccctctatatttattttttctccagctctcgctcgctttctgattgtcgatttgaaaaaaaatctcttcctcttccaatggagtcctccgctgttctcggatcatttcaccattctgtatgcgctgtttcacaagcaccttgctcactcgaaaggcctggtactgcttgtatgtattctggcggctggcccgcttcaagaaaatcatgtctcgcaggcttgatatttggcgagaagaactgttttccaaaacaacaaattgtaactctaatatcatgcatgaagacacc

SEQ ID NO: 255107 - DNA, 442 bp, Gossypium hirsutum
atttaggcctctcgctcttcatatttttttttctctctctctctctcttttgttgggtggatgctgcaaaatcgatttttcgttctctctctttctatcactctctaatttttcatattgtctctgctaattttcggtggaatctgattgcagagttgtcaaaaccctagatcttgcttgtttggttcctgtatttcgtctgatttgggcatttagcggttggatctcgatgttttcgtaaccgtttcagctcgatttccgaagatcttccccattaatttacgtgaaagtttcgggagcaaatattttgcttattagaccgttagttttttcatcttcttttaattgattttgtcgatggcttcgaatcctccattccatgtggaggatacgacagatgaagattttttcgataagttggttaatgatgatgacgatgaca

SEQ ID NO: 255108 - DNA, 228 bp, Gossypium hirsutum
ttttcgcgtgggttccgcttagtattagcgatgatgtattgtccctttttaaaatgaagatcatcctcatgattttgtcttttggaaaaatatacactgttgatttactttatgtagtcatagtgtaattaagtttgtaatttcatgagagcttgtattgtacaagcgtttaacgcgcttaataatgtatgttttttcgtttttcaagaagtttaacattatttactc

SEQ ID NO: 255109 - DNA, 499 bp, Gossypium hirsutum
  unsure (1)..(499): unsure at all n locations
cttttaatttattttatatattatcttttatatacatatatatatgtgtgtgtgttttcatgctgatctattttcgttgttctctccttgttgaaatccaaaggctctctttatcgttccttcaatggcagttgaagctcggcatctgaatattttctcttctcagttcatcaccaatagtcacagcagggtttttattaaatcaaatcaagggattggggaaatatacaatacccagatggattcttgtgttcctttaattgattcaaattcaatgcatgaaggttcacaacttttaccattatatcaacccctcctttgtcatccaaatatttcagccaacaaagctgatagcggtcttacaacttacaacatgagtatcccagtttcagctccaagaaaaaggtctagagattcattcaccaatggctntgattcgtattcgctccctcaaaacatcaacctttctggtgcttcctcagacgttgatgatgatgtc

SEQ ID NO: 255110 - DNA, 458 bp, Gossypium hirsutum
tttacgcgtccgcccacgcgtccggtgcttttattcttccaagggttccatcaggccttctttcttaagctttgggttttcaagatgaatcattgcaatcttcagcagaacgccaccgtttcggcttacgaagagttgagagggtttatctcaatcactgatcatcaaaagggcggtgccgttgtttgcaccaagcctcggcgaattcaggtcctcgccaataaccctaccaagccattgagattgcatatgagtcatcaagccgaggtaagcgattcgaaagctggtgcagaccttcttgatatcatcctcaataaggaggatttagggacagaagaagaacaatctatagcatcatcacctccgtttttttgtgggtcgcctccaagtagggctgcgaatccacttgtgcaagatgctcggttcggagatgaaaggcttgcacaagccctttcgac

SEQ ID NO: 255111 - DNA, 294 bp, Gossypium hirsutum
ccttctcgtccgcccacgcgtccgcccacgcgtccgatcaaaacttcatccacatgtcggagcttagtttgaagaaaaagtggaagaaaaggttagggttatgagatgaataatgatcaagtagacagaaaatggagggaagggttaattatccatgcatgttatcattttagctatagaatatcatttttttgtgtatgtgtgtatatatgtatattatattgagctcattgtgaatattttgaaatattgaatagaaagaagaacgagaaaggaaaaaggaaacaaggggaa

SEQ ID NO: 255112 - DNA, 445 bp, Gossypium hirsutum
cccacgcgtccgcccacgcgtccgcccacgcgtgcgataatatttgcacatactatcagaaaggaatctgttcttatggtagtcaatgcagatatgaacatgtgaaggcatctcaaacggatttatctgcttcgtcttcatcgacaaagcctcgtcaatttggggtctcgggttctgctcctttaggtccttcaacgagtacatattgtggttccgttgtacttccagctacttctggcgagtttcctggttctaatggaggcttcctccctccctcaacgaatcaagcatggcatttggaatccgggcaacaagatcttttggatgatggtgatgttttgcagcctaagagtgctaatctagtcgaacttcctatttgctcatttgctgcagctggtaattgcccccgtggagataattgtccccatattcatggagacttgtg

SEQ ID NO: 255113 - DNA, 425 bp, Gossypium hirsutum
cccacgcgtccgcccacgcgtccgcagaaactatagaaaactcaaacaatcatcaagctagttctgtggttgaaggtatgactccaacccatgaggccgctactttggatgatgctcctgttgaaaaccgagatgtggagggtcaatctgggggaaatgactctaagaaccctatacctgagccagttctttctagtacaactgaatctgctgatatagagcttgttccacaagatggtggagccttgctacaatccccggtggttcgagataaggagggtgatgttgctgagattcgccatatggtagtagatccctgtgagaccaagttgtcttctttgaaagattttactgctgaatccgccaacagggattctgctacagaagttgatggtgggaagcaattgtctgcgggagttcaaact

SEQ ID NO: 255114 - DNA, 494 bp, Gossypium hirsutum
cctttctagtgtaaaaggaacccccattattattgctttcactgcacatccccatccctctaaacctccaactcttctttataaacgccaccaactttctcctccaatccccacttcttcttcgctgcttcttactttcttactttctttctttcaatgatgctgctattttctttttgtttgttttatatatatcttgtctcctttgggaaagttcctacatctcttcatctttgtcttgggattctgggttctatttcattggtttagagatcaataatgattggcatatcatgtagcagtgtttttcatctaaagtcttgcatgtggaaacgaggttatctatctatatgtgatacagccaaggatgacttgccggctcacttctacttaacataaatcatgctctctacataagcagctaaaagttagagcactaagctaaaacctgtatatgttgtcatcaattaatttataataaatgttaattgatc

SEQ ID NO: 255115 - DNA, 440 bp, Gossypium hirsutum
tctactcgtccgcggacgcgtgggtttccccatttccaatcagacaactaaaagggattcgtccccatggcggcaaccggaccttctctgtttgtcgccagtccgttagtgacgtcaacggccggaaactcggtgaggaaccggtgcttaagctcatttcgagcgatggcggtgtctgcagatcagaaatcgtcaccggcgacggttgcaacgaggtcaacggagaagggaagatggttggaagagaagaataggaagggaaggaaggaagaagaagagttaacatcgaatatttactcgaatcctcaggaaataaccgacgagaatggaaacacgttgagagaatatttccaagagtgcaaagatttgatgatccaatcaaaggcagggccgccacggtggtttactcctttggagtgcgggtcccatgctcctgattc

SEQ ID NO: 255116 - DNA, 447 bp, Gossypium hirsutum
cttacgcgtccgggggcatcacaacgcattcgctatgcaactctctacactttctcttttccctttctctgttcccaaatttctgcatattaaggcgagccgtgagcgtgaatctcggtgttattttactctaaatcagggattcaatagatcaaacaaattgtccagatacatagttacaagatctcaacttggtgggactgggatccttgatgctaccaattctttatcagaaattaagccgagtccgaaatttagaggagtatgcttctatggtatgacagttatggcaggcgttttaccgtttgggatactgatagtggctcatcccttggcgctcatctttgatccctacaagacaaaattttacaatcttattccaaaactatgggcaaccgcaagtattgctcccttcttcgatatcgagttggaaggattggagaatct

SEQ ID NO: 255117 - DNA, 389 bp, Gossypium hirsutum
atttcttgtcttcttgtaagttctttgctatctgatgtcccagtttcagtttcattttctcttttggtctttaacattttcaaatcctttatatattatctccatcttcacaatcacttattgcaaagtataaagcacctatttcattttttttggttgaaaaatgttttatggcggaaggaaagcatcaagatctcgctctcattactcattattgctccacattatgtttttttctttttcctttttatgcttaatggttcgaatgatcacagtctcacattgccgcatttacactgaataatgcgagcttttgactctccaacgatattgcatctcacatttctccattttacgtattctctgctcaatattttactatgaagttt

SEQ ID NO: 255118 - DNA, 344 bp, Gossypium hirsutum
cgtgaatctccaaatattctcgagaaaagaaaaaaaaaacccctcagatttctaaaacgattcgtttgttttttttggaattgtttgtttgtggttttcgaattctgggtcatcatcatcatcttcactgcaacttcgcttttttttttttggcctatagtctgcctcagggatggcaatctccggtcggccgcatacggtataagggcgagattgatggttggagtgaggatgttagtttctaagttctgagatttatgaggaaattgttgaagttggttgacatttgactgttggagaaccaaacattagggtgtttgagattagatatagtggaatttggg

SEQ ID NO: 255119 - DNA, 203 bp, Gossypium hirsutum
  unsure (1)..(203): unsure at all n locations
ctttctcgtccgcccacgcgtccgaaaaaaaagtgttgaatggtttggaccggatgggcagatgagagaagtttgtttaacataagctgtgctaactaggatatttcttccttcttgtttgaaccaggaatggcctttcaaatacaaacttgggacttgcgacttaacttgcagtgcagatagtcagtcttcccgtttccnaa

SEQ ID NO: 255120 - DNA, 434 bp, Gossypium hirsutum
tttacgcgtgggcggacgcgtgggttcgcaacgaccagtctagggtttactattgagaaattaaataagaaccaatcagaaatacccattctcaagtaagaagctatgctataaatatgtaatttagggttagggctatggccaatacatgagactaaaagtacgatttgggaatcgatcaacgaaaatgaggaagcgacaagtggtactgagaagggaggagccaccaagaagcagcagcaccaattcatcgttgacaagtagaagtgtgagatatgcagagtgccaaaagaaccatgccgctggggtcggaggttatgctgttgatgggtgccgggaattcatggccagcggtgaagaaggaacaactgcagcccttacttgtgctgcttgcggctgccataggaatttccatagaagggaagttgaaactg

SEQ ID NO: 255121 - DNA, 449 bp, Gossypium hirsutum
attaatagaaaaacaatcacacattgaaaaaaccctaatcttaaccctagattttctgcaattaattcccaatggctagcgacaccacagattctcatcgaaggaagcaccatcgttctccatccgacgaagaggaaaccgataagtcctccaaacgccacaagcatcgccaccacaaacatcgtcaccaccgccaccgcagcaaaaagcacgaggacgaagccagagatggtggtgaagatccgcttcctcctccttcgattcctcgacctgatgatgacgtcgaggaaggagagattcttgatgaggaaccgaccgccgaaatcaaggctgatcaatctcgcgatggccgggatgtttcggatccgggagctggcgaaaatagtaattctgtggatgagcaagtaagagggattggtgacaagagtgaagataggaagcataatcat

SEQ ID NO: 255122 - DNA, 370 bp, Gossypium hirsutum
tttttcctttttcattaccaagcttcgtaatttcttgcatattatcaaatatttctcataaaacccatctttaaaacccttttaaaattcatttttagcctttttctttaatttttacctttttttttgcttggtgttaactctagatgttaaagccatggatatagctcttgcaagcaccgcaccaaaatcgccagaggctgagcccgagcctgagccagtgagtgaaacaccaactcggatccaacccaccaagcctgtatctttcaccaacggtgttctcaagcgtcacaagccttaccaccaccaccaccactaccaagcgccacccatcgtcataacctacaaagaatgtctgaagaaccatgca

SEQ ID NO: 255123 - DNA, 384 bp, Gossypium hirsutum
attcatcagatcctaaagcccctttcctctctcattcggccgaactctaatgtcatcttgcaaacaccgatcctgggtttcatcggcgttaacgcctccacctccacctccgccatggtacttgacccgagttacggcaaaacgagaggacacttcctttggttcgatatccaagtcaaaaaacggtctccgaagatcgaaaccgccggtaagtatctctgaaaactctcatttgcttgttttcaacgagaaatattaaaagcaaaataaaaataggcagactatgaatcgaaatcaccttctagtattggttgcttttgtattcaatatgcgtttttttgtgcctgtaaaaaaaaagaaccccttacaattaaaaatcaaaaa

SEQ ID NO: 255124 - DNA, 261 bp, Gossypium hirsutum
tttagaaaccctaaaaacgctccgattcccagaaaaccgaaatgaaaagggaccaatcgcacttaatatttcaataatacgtggagtttttatgtaacaacagcttagcaaaatttaaaaaagaaaaatccccccttctgtctcgatccaggatcagaatttccagtttgtattgatagggttttgagagttaagaatggggattcaaactatgggatcccaaagcaatggacaacagtctcttttacagccatcttcatt

SEQ ID NO: 255125 - DNA, 186 bp, Gossypium hirsutum
cccacgcgtccgcccacgcgtccggcaaatggcaaaaggaagcaaaggacgacgtagaactgctttcaggcaattccggccaaccccatactcattgtcctcacggcgccaagggatctctggggacttgtaccacaaaaactgttccaaacctttggataagaaagactgggaagatgtcacatg

SEQ ID NO: 255126 - DNA, 381 bp, Gossypium hirsutum
cgtccgcccacgcgtccgggaggccatctgggaaaccctacaaccctctcgattcctctccttcgccatcccaaaccctaatcccaccctcaatccctcactcgcctccccactcattcgaatcgctgtcctcgactcaccgattcagccctcctctcctctcattcccagtgtcgccgccatgatcgtccccaagcaccgcgagtccgactggatcttctcgacggagtccggtcatctccaactcctcctctcctcccctaacatccaacgcctcatattaatcggacaagaacaacaaccaatcatcaacggctctagttcatcttccatttaccgccgttggatcgatcccgattccctaaacaacctggagatttc

SEQ ID NO: 255127 - DNA, 333 bp, Gossypium hirsutum
ataacaattaacaggttttctattagcttgagctgaccgccattgaagaactaaatcaaagcttgtaaaaaaaatatttgaagttgttaagagttgaaattggggtgaattaaaggtgtgggtgttttttattttaaaagaattgaattgggtttttttcagaatttggattttgggtttgttcttcgtttttctgctatggagtcaaacgcggggacattggagaccagatctaataaaacggcgttggaaagggaggaagtagcggcacttgaatcgctacaatttacagacgaaatccactgtttgatgtcggctccggcgaccgacaat

SEQ ID NO: 255128 - DNA, 450 bp, Gossypium hirsutum
tttctctgttgctctgtttacttgaggcgtggcttttggctttcattactctctctttcctctgtctcacagtggcagccatcaacaacccatcaatgaaaatgtctgctttgagccaaaaaaagaagagaaagggagatagcgagagccagtctttgtcttcaaaatgtcttctccttgtttttttcacatgattaatcatggacgttgttgccattaatactctctttctctttcactttgtatccagcttttgacatcctttgaagcagacaatatcattcatatcccactgatcgattctcttgtttcttccctctcttcttttctattcttttcttttttcctttattttattaagtttttcactctataaagccatatggatatgtgcgttaaattcccagaagattatcggtaccgaaccaggagagaaaacccatctttctc

SEQ ID NO: 255129 - DNA, 295 bp, Gossypium hirsutum
caagaaagaggaagtaaaagaaagttcgcttcagattattgttttgtttggattgtaatatctgaaaaaaaacaacttgctacgcccttgccccgttgggacttctcacaattagggtcaccaccaagctacaatcttacttttcgtgataagatagcgtctagcagtgatccatatgttgtcatcaccaccactcaacagaaagtgaaaacaaatgtggtgaaaaaaaactgaaatcccgagaggggtgatgaagtgagtctttcaatcaaagatcttaatgatccaatcgagt

SEQ ID NO: 255130 - DNA, 369 bp, Gossypium hirsutum
cttggaagggtgaagattaaaacatttatcaatgcttgcggcaacgtaaaccgattttccaaggcggaccataaaaaaagaaaagaaaagaaaaaagcagtaatggcggtggcaggcggtgtttgtcgcggcggaaacgtttgcctccggcgccgcgattctttcaatcttttcaacttccataatcagaatgctcgcccacgttgtttcatggtctcaggttcacaatcgtcatcgggatcaagaaaagaaaagatgctggcgtcgtctaaggtaagaagagtaagccttcttcaaccattgttgaaacaagaaaagacgagagggaaggaattgtcgtacgagaaaatagacgagtggatgagagat

SEQ ID NO: 255131 - DNA, 304 bp, Gossypium hirsutum
ttctgctgcgccgccgtccgttcgccgtggtttcgccgcaaccagtggccggaggctcgccggactgggttttttaaccgtcttcggagcacgactcgaaggcaaagtaagccctcaccttcctatttcctttttgtaaatttaaacaccaaatcggaaaaggaaaataactctaaaatatttaaaaaactaataaacaccttaaaaagaaaacgatgttgatttattctctattgagtttctttgcattttctttgtctctctatttctgtctctggttaagctcacaaatcccccccctttt

SEQ ID NO: 255132 - DNA, 442 bp, Gossypium hirsutum
cttaaaacaaaatatcttttttcactcagatatttgattactcacagcttaaaaatcttcaacatttgtagagaagctgcaaagccatatcccttccatctttgaaaacaagaaacgacaatggaaagcgaaacagcaagacgcagaatcagcaacattgcatcccatttttcaccctgtgatgatactttatctgtttctcaccttcttcccatgaactgtagtgggagatgtgataatagaatgtactttgcacgtcaaggttcagcatttcaagcttgcttcatgagacaagtttcaagaccagagagaactgctcctcagtgttttgcacctcccaaatccgtttccactccattggagagttctaatgctattgaagcaccattattttctagacctacaatgatggattcaaacttgtcaaatttatcaaaaatag

SEQ ID NO: 255133 - DNA, 352 bp, Gossypium hirsutum
ctttttcgtccggaggattcccagcagcaatcagctggatggagagactcctggaacaaggaatgttttcgagaaggtggtagtcggacactctcctaggcgaccaagacattcaaggaagttttcaatggatagtacaaattcattcatttctagggagatgggttcagagtttatcagtgactctcctaggtgtaactttggttctcccaggtttaataccagcttcaagaagatggaatgagcttccgaaatggatgagatttctagcacaagaagaatggataatgcttcacaagttggagatgatatgactgacagagtgtatactattgattctgtccataatgga

SEQ ID NO: 255134 - DNA, 236 bp, Gossypium hirsutum
atttgaactgatttgaaaccctagcatttggatccactttgaagttttagatgtgaagcaagcttctctctttggaaagatttttttttggatttggttgcatttgggggttgaagtggtgagaggaagtgtttgaatcggagatggcggatattgacggcgaagcggtggaagtaggaaacaatgcgaggagtgagtcgcctgtgagggtgacgtcaagctcgacgggagtacct

SEQ ID NO: 255135 - DNA, 321 bp, Gossypium hirsutum
gttctagaatcgcgagtggccgcccttttttttttttttttttttttttttttttttttttttttagaaaagcataattatataaattatttaataaaatgttatcctattggttacatatttattcatccataataaattcaagggtattggtatttattttattgggtctacattggtaccaaacatatcaagcagtatgctggatttcccggacatgggtctgcaacctccttgccttcctattatcaatataattttgataaatttaagaagcaaaaccacaaagagccaaaagcatggcaattaccttcacaccat

SEQ ID NO: 255136 - DNA, 325 bp, Gossypium hirsutum
  unsure (1)..(325): unsure at all n locations
gttaattactaaccctagagaatggacaaagataaacacgcaaccaaacgctcccgagaccgcgacggccggcatcaccgtgactccgatcaccaccacgacagccgcgattcccaccggcgatcggatcatagatcttccacatcgcgccgtgacgagcgcgagagatcttttgagagggaaggatcgagagataggaagcatcgcgagggttcctatgaagaagttgaagcgaagaggaagaggaaagagagggaagagagtgaggagaggggggagaagaaggantnaacttggagaagaaaatagaagagaaaagagagag

SEQ ID NO: 255137 - DNA, 395 bp, Gossypium hirsutum
tttaaacggagtaggtatccttggatctcctgatttggttggacatggtggcacccaaagcattaaaatttctccattgatgaaaaaaaaaaaaaaggcctgtgaagaagggtagaagagtggtatggcttattttctaaactcgctgttttccttttcatcttttataagattatggttttcttggtcatctggtacacttttcttgacgttttgaaactttttatggcattgtaaattgctttacttactctattcgtgtcactttgttcatactttccttttttctttttcatttttaggaaatttatattcttttgtttcactttcccttaaacagtgtgacctattttatagtatctatttttaattaataaattgttgagcttaagctc

SEQ ID NO: 255138 - DNA, 462 bp, Gossypium hirsutum
  unsure (1)..(462): unsure at all n locations
tttttcgagctaagaaagaggcagaggagaaaaatggagaatcaagtgctagtggcacttctaagtctggaaaacgacatgttaaacctgtagacccagatccttatggagaaagattattgaagactgaggatcctttgtcagaagcaactaagtatttgaagttgcttcagaagaattcacctgattctttagagacgcacttgctttcatttgaagtcaatatgagaaagcaaaagattttgcttgcctttcaggctgtaaagcaattgctaaggttggatgctgagtatccggattcacatcgctgcttgattaaatttttccataaagtgggctcaatgcctgctccagcgactgatgcagaaaaacttgtttggagtgtcttagaagctgagcgaccatccatctggttctctttgaaatggctntatgatatcaatttcaggagaaaactcttac

SEQ ID NO: 255139 - DNA, 291 bp, Gossypium hirsutum
ctctttcgtccgctgagggtgcactagtttgcggtgctgataaattcagtagtactgaagatggcttcaaggaggaagaagcattcgactcaaatgagccaatgaacgaaaacttccgagatgaggatgacgagaatggcagtgattttgccaaaagggcatgaactaaatctgtctttagtagtaaaattgttttggtttttagttatatcgtcatcacttttgaaacaaatttttatttgatcaaatgacgtgagctattgtctttgtaaaacttaatactttctgaag

SEQ ID NO: 255140 - DNA, 145 bp, Gossypium hirsutum
cgttacatttcgcattgtcgtattatcggaattcagcatattcattgcgaggatacaacggcaggtcggagataaactcttggatccggggcctcgaagaaggcgacaaaggggaggagcaaggccagacttcagtttccggggg

SEQ ID NO: 255141 - DNA, 456 bp, Gossypium hirsutum
tttcacttcctctccacccttcacaatcctttcgaagaaacaaatcgttctatccggtcacctacacatcttcctcgccggagtaagtgaaagagttccgattctctcgagccacgaacaactctagcgtgtcttggtcgagaccccagccagcttcccttctaaaatcctccgttgccagacaatgcgcagatctgttcgccgaacgtgaaacttagataatgaatcaccctccaccatcacctccctcaaccccagatcccccccccactttgagcggttggaggcatgcaagagcttcggccgcgaaaggtgaagatattgatgtggtagcctggaaagcggcatcaaatttgatttttataaaagggactttcggtggcctgcacctctcgcaccccaccttggtgacagaccaaagagaccaaactgcacaaacaatctttcgacagatgc

SEQ ID NO: 255142 - DNA, 425 bp, Gossypium hirsutum
ttttgattttggctatattcacaattcaaagagattgggaaaaggaggctgaaaaggctaagcagagagttaaaaggtgggcgaaatgatcaaaccacggcaacccacaatcaagggatctactaattggacaatgaattttgcacattttgggacaccttaaactttcactcccaataaaaacctgttaattgtttcaaaataatgttcaatgttttccatccctgtttaaatatcataagcaaaaatgtagtgttcacctgttttctaactccaaacactttgatttttcgccattgatgccagcaacttcaaccattgattcagccaactatggcgtatctgccattggacttgtttttgattgggtttgaaaattctcttggatttattggaccaaattattacaattgggctcttctact

SEQ ID NO: 255143 - DNA, 456 bp, Gossypium hirsutum
tttcaaaccccaaagaagacaagcccaagctgccatgtagccaccgccaacggtggccgacggagggtggtccattcggattctaaccccgttcagacttgcgatcaagaatctaacctctatgatagcaaggaatcaaaaagatagtatcaccctctttattagatttggtttcaacagagaagaaactccgatatataccaacggtctacgattcaggtgagttacccgcttttatccttttcttttctttttataaacagtccaaaaaaaatgaaaaaagaaagaagaaccacgcaaaaaaaaaacagtgaaatattgggtcgaatcgaaagagaaaaaaaaaggaacaatcacctctttgctttgaaaatttttgattaatattctgtaacctcttttttgtatttcaaatctcttttttggattcaaaataaagaacaaaacccccaaaat

SEQ ID NO: 255144 - DNA, 451 bp, Gossypium hirsutum
tttcacgcgtccggcgtttattcagagtatctcggaagtcctcgatccttggcttgacaagctcacaaattgaaattgcctagttctttttcagccacaaaaaaaatataaaaaataaaaataactaggtacaatttgtttgcattcacataatgaagagtccattttttttttggactacaaattgtgggaatgtagatatggcttatccaagggcctaaagctttcattattcggtttttttttttctttcttccttttactctgtcaattaatacttgatatatcctatcagtatatcgaacagagtcaaagataatcgagttgttactcttctaagacactccatagatcacaggattatagctcaaaaatgagcaataaaacttgtacatattggtcgcttctattctggaggtgtgtaaacctttattgttcagcattttgcagc

SEQ ID NO: 255145 - DNA, 258 bp, Gossypium hirsutum
atttatttatttttctctcaaataataacaaaattaatttttatttataattatcaaaaaataaataaaaatctctttctttgcttttctcaagatagctgctgctttattgctgaagttgaacgctatatataaaaattcaaaaaaaaacatttgtttgtttgtgttctttaaagttttcgtttgatttcgtgattgcggatttttagtcattgttgcgatggggaaagtagcggtgggtgcggcggccgtgtgtgc

SEQ ID NO: 255146 - DNA, 131 bp, Gossypium hirsutum
tctctttcttaattgtagaaaatggaatgttgcatatccttgtcttaagtgttgacagtaaacatgtcatttttagttttgcaattaaggaataaaatgagatcagcatatgtggctgaagttgacgtgtt

SEQ ID NO: 255147 - DNA, 114 bp, Gossypium hirsutum
gcttctttcattcctagcccccgctggcaaggtccttcaagttatgcacctctgattttaccccaagggatggtatcagttccagggtggaatgcttacagcgcatcagtctct

SEQ ID NO: 255148 - DNA, 230 bp, Gossypium hirsutum
tcgggattatcataccattttgttgctggatcggtatcatcagtctattgcatttagagatatggttatcgctgttaggacaaggactgctcaaactgtgagtgattacagttgtaatggtcgtcatgttttcactcgtacaagggagctgcagaggccgcttgttggttcaattttacagagtatgtggggagtgtcgcctactcatttgttatggagccctacacata

SEQ ID NO: 255149 - DNA, 288 bp, Gossypium hirsutum
tcggtatctcagaaacagcctagaagggctcctccaaaacatgattctcgtgcagggtaccctttatctcagaatcttccattcgattttcccaatgcccagatttactatccctatcctatatgtgttcctggaagttacttgcattaccctccaaatcatcagaatggagtgaggctcataaccagtcctatggcacaaatttcaaccgtgcgtggaccatatacttctcatctaagtggtaaaaagcagaggtataatacaaggttccaggcaaatttaagtcgc

SEQ ID NO: 255150 - DNA, 473 bp, Gossypium hirsutum
tccacgcgtccgcccacgcgtccgggtgttgtgcttttggtgtgcagctaagtacactcctagccataagtgtactaagtctcaattgtatcagttggttgtagagcctcaatctgatatggaaagtgaagtcaagagtctccaatctgaagagtattaagactgtccggatcaatttgaacctaatgactaagaggaggagacatgtacactattgactatatctttgcatgccttacaagggtcgcaaagaccaagaaccatgagggtggttgcacaaatagggaattccaatgtactatactagtggatttaggaagcacccataattttatggatgccaagttggctcgacagtcgaaccttcctgtggaactctctactaagctgcaagtcattattgctgatgggggtatcatgtctactcagaatgtgtttatatttgtacagtggtaggcacaaggtcagcaatt

SEQ ID NO: 255151 - DNA, 198 bp, Gossypium hirsutum
ttcttcacgcgtccgatttcagttctcaactttcattgctgcagattgataataagatcaataaaagatcatggagggagaaacttgggaaatgtgatttcacattagcctctttacttctactacataatcaaagttcctctgggtatgagagacatctttctttgggatgcctccttaatccacatgaaattatta

SEQ ID NO: 255152 - DNA, 360 bp, Gossypium hirsutum
tcgttcttttctcctactttccaccttggccgactaattcccttttgcctaaacatcaatcggctaccacagtagcatattcaagcctcgatgattgttttttagccttgaggtcccctcttagcttcgatttcaacgaagcaaaaggaaactcatggcatcctcgtaagtctgctgcaggaggagctagctggagaagtcgttcatgggagtgtacgaaggcacagaggaacacgtgcgatgtggcgaggctgctcgtgagggctgcggcgcaagaggaaaagaaaccctaaagtttctgttcctgcaagactttgggttattgggcttattactgggccactacaatttgagttaatg

SEQ ID NO: 255153 - DNA, 388 bp, Gossypium hirsutum
atctgatctaacccttgaaatgctgctaaaatcacatcggttccgtagggaaatcttggtttccctgaaaactggtctgcctgattatcttcgggtagatgacagaattccatcttctaatttagctgagatctttctgaacctacgatgcagaaatctcatgtgccagacttctctgcctgcggaagattgtgagtgcaaggcttgctcaaagaagaatggtttttgtagtgcttgtatgtgtcttgtatgttcaaaatttgacatggcgtccaatacttgtagttgggttggatgtgatgtctgtcttcattggtgccatgtttgattgtggattaagggaatcttatatcaggaatgaacatactgcagctgaggtgcaatttca

SEQ ID NO: 255154 - DNA, 348 bp, Gossypium hirsutum
ctccacgcgtccgcccacgcgtccgcccacgcgtccgcggacgcgtgggcgagggcatggaagaaggtgaattctcagaagcccgtgaggatctggctgctcttgagaaggattatgaagaagttggtgctgaaggtggagatgatgaagaggaaggtgaagaatattgatgtgcttatgcaaaatcatctattttgaagatcggttcccagggtatgcccaccctcttttcctatatccttcctatcgttctttatatgtgtgaggtttgtgaaattatgcatgtaataagcctaggatcttttcatgctattaatggaataaatttagagttgtgtttgcatgtca

SEQ ID NO: 255155 - DNA, 488 bp, Gossypium hirsutum
ttcacgcgtccgcagagaccgatatggaaaccctggttcgatcaaacttcccccgtactaattcccgtgctttagacaatcccttatccttatccgccacgcctccaaatcttgccaataagacccattatccacgtctccatgttcgtcacgagttgcccaaatggtggcctcaacagctgcctcagcgtaacactgcttccatctttgattccgagtattaccagacgaaggccaatagattaatcaaagcaatcatcgacaatagattgggtggaaaagacttttccgaggaggatataattcaaggcatccggtgtgcgtgtctccattgacacaacaaacacacgggattcattatatcgtgcagcggttgagttggttttaaacgtttgctgcagagattatgcagggcatcaatcaactctacaaatgttcagattgatggtgaagatgctcgagaattccttgctgggctagctgaaaat

SEQ ID NO: 255156 - DNA, 318 bp, Gossypium hirsutum
  unsure (1)..(318): unsure at all n locations
tcaaagctcacgttgcatggatgcatggattgctgtcattagtccaaaatgagagcataattggaatgatttgttgaaacattatatattagtaataaattactaaaaagtcaaaaaaccgataccaattccaaaatctaccctaaattaaagctacttttatttccattattaccttctttttttaattatttctcatccctatatattgtgaaaagaaaaaacctttttgttatcaattaggttaatatttgatatattgtaattgaaaattgaagattcaataccattaataaatattttctttatttcaattna

SEQ ID NO: 255157 - DNA, 278 bp, Gossypium hirsutum
tgtttttcagtattgaaggaggcggctttgcttcagagatgaaagatcacctatcaaacctgtaagttattcatttgtttgtgtggaagaatacattattcatagaaccttcaaagttcccaaaagataaagggaagtgaaaggaaagaaaagaaaagggctgatttgtacttgacatgaacttgaatttgtaccattatagcatatgttacgacggtaatcatcctcagtttttatacgagagatgttttccaaattcagatcgtactttgttttcc

SEQ ID NO: 255158 - DNA, 397 bp, Gossypium hirsutum
tgattaagccaatcaccttatttccagcattggaaaagttgagcctgtggaatatggaagaagtagaagaatggttagaagtggaaccaacagttactgtgtttccttcactaaaagagctacatattgaaggttgctgcaagctaagcagtgttccaagaatgagtagactttcttgtcttgaggcactcactattacaggtaacaatgcattaagttgtataggagatgaacaatttccctttccctctagcctcaaaaaattcaccatacagaggtgctataagttaacgacagttccaagtgtagagggcggtatctcttttcttcagcatcttgaggtgaagctttgtgaccggttatgtaaaataggacaaggattacttacttccacatg

SEQ ID NO: 255159 - DNA, 434 bp, Gossypium hirsutum
tctcacgcgtccgcccacgcgtccgtctttccccaacgcgaagaagttctgcatatacacatacatacatacatatatatatatataaaatgtcacgtaagaaagaagagaaaactcaggctgctgctgaaagaataaaggcagcagcattgagtgctgcaaaaggcctaagtcgagctcaggctgaaagggcagctgcggctgctgcccgaaatgtcaatgcttatgggcaaaaagaagaggggcctagcagatggcaagagaaaagggaagcgaagaggcaaatgtatttgatgagtactgaaaaggcagttagattaggcgaaaggaaagacaagatgaccatgacgtctacgatgggtgcttctcagtgccaaaagtgtttccaagtggggcattggacgtatgaatgtaagaatgaacgggtttatatg

SEQ ID NO: 255160 - DNA, 393 bp, Gossypium hirsutum
gaaaacagaaagctttctctccttccccttttctcccccagttctctctttgaccggcctttggctcgccggtggttcaccgtgcccacaccatgaccggtggtcggaaccgcgaggattcgggtaagtttcctcttctctttcttttttatttattaaaaagtagatttaaactatatatatattttttaaggaagaaaacataacacaaaaatgaaatagtggagaaaactctcgtcttcgtcgcttccccgaccctcgtcggaacccgagtgggttttgtgacgtttgggtcaccgcagattcacaaccacgaaggagcacgaaccacggtaagatttaattactatttatgctttatttcaaacaaaaatgaagaaaaataaaataaaa

SEQ ID NO: 255161 - DNA, 390 bp, Gossypium hirsutum
cccacgcgtccgatctctttcaaaaaatttgcgaaaaacgaattctgatgggccgcctgacatccaccgtcgaaattccggaacggagacgccaatctgatcgagaaagcggccggtacgcatctgaatccgatggttcccccgattaccgccgccgtcgccgtagccctagctacgaagcctatgaacgcgaccaccagagccgcaaagattaccaacagcgtaacccttctggttcatctgaatacaggaaccctagaagacgaagccctgtcgaaagtcctgaaagaagacggcgttttgaccgcgaaaatggtcgctacgcatccgaatcggatgactctgttgattaccgccgtcgtcgccgcagtcccagttacgacgtctacg

SEQ ID NO: 255162 - DNA, 425 bp, Gossypium hirsutum
ttcattcaaaaaaactctcttcattcttcttgctttattctctttagttttctgtttgtttcagcttcaagccacgacacttgctgctcaagcaattggctgaaacttcttgttagttgctctcagctccaacaaaatagaaccgaatttcttttccagtctacttcacccacacattacgatttctctaagcacagtatgcatgagtgtccaaatttttcgatttttcacatggatataatgagcttcatgaaatggctttcatagtccaagtgaacgagggtaccagagcaacctgcgacgacaatgaaaaacagttacggagaaacaacaccgatgaccagaactacgtatcctggcacataccctaatcagatgagagtggtggatgaagtcattagagaaatgcacatccctacatattt

SEQ ID NO: 255163 - DNA, 442 bp, Gossypium hirsutum
ttttaaaatttaaatataaatgttatatacattgttgaaattaattcgtacatggttatatattgtcgatattgaattgtttatgcatataggatgccgaattggatttgtatatgattatatattgccgaacatgattcatgaatggttataccttgctgaattgtttggtatatggatataagttgtcgaattgattcgtatatgttgtaccttgctgaaattaatttgtacatggttatatattgtcgatattgaattgtttatgaatataggatgtcgaattggatttgtatatgattatatattgccgaacttgattcgtgaattgttataccttgccgaattgtttggtatatggatataagttgtcgaattgattcgtatatgttgtaccttgctgaaattaatttgtacatggttatatattgtcgatattgaa

SEQ ID NO: 255164 - DNA, 496 bp, Gossypium hirsutum
tcgcccacgcgtccgcccacgcgtccgcccacgcgtccgcccacgcgtccgggggaatctagtgagtcccaggaacggcaactgaaggcaagccattgccagcctcaatcatcacagctgcaacataatgtagatattgaacattcacacacgtcacttacagattctgccttgagggctatcagatgtgcacttagatattctgccagccctaaaactaacaaatctaaccaagaaaatcaagggccgttgggctgcaccaaatcccagcctgagcagagcccacagagacccgaacagcgacagttcacaaagaagaggaaaggaagaggtcctactcgctgcctcttcttaaatgatctggcagatggtgagcggatatttgtccacatcaacaagtttggacagcctgttggtccaaattcatccaagctaagcagcttcctgggcactgtagcacggaatggacacagggcaccacttaattttatagact

SEQ ID NO: 255165 - DNA, 244 bp, Gossypium hirsutum
ttcacccagagacgaggaagggcgtagtaagcgacgaaatgctggaggagggcttggcgggggtgccggtttaggaggtggagctggtggtggtgctggaggagggcttggtggtggtttaggaggaggagccggtgggggtgctggaggagggcttggcgggggtgccggtttaggaggtggagctggtggtggtgctggagcaggtggcggtcttggaggagggcttggtggtgggggtggt

SEQ ID NO: 255166 - DNA, 366 bp, Gossypium hirsutum
acgcgtgggcggacgcgtgggcggacgcgtgggcggacgcgtgggcggacgcgtggggttttagagaaaaataaataaatgaatggtacttttttaattttttcactaaaagtttgattattgtataattaggttttattgacggtattggttcctcgcataaacaagtaaagatggataaaacttgaagggggtatttgctagttttgaagaaaaaaggggaaatttttcggggggttcaaaggcctaattttcatgtaattttggttcatataagagcttggttttgtgggtaaacaagtttaaggaggttaaaaaggcttgttttttgtttgtatggaaagaggggtagccggaaagagtgta

SEQ ID NO: 255167 - DNA, 419 bp, Gossypium hirsutum
cggtcgcgtggggaaaaataattctgattttgatctgtgcttgacttggttgattctcagatttggcagttctaagtcagtagcttggcagagagaaaaaagaatgttgaattctgggaataatttaagccgagggaatgcggggttgtcatcagatatgccaccattacctcagtgtttgcctttggaaccgatttcattaggcagtcagaaatatacacggtctggagagttaagccgggtgttgggcgttcctcttcgaaacagtacatcagaggatcattcttttggagtttcacaccctaagccttcccctccagtggcaacagaagagcttaagaactttaaggaaagtgttcaagatacctccagaaaggccagggatagagtaaaaaagttgcgagagtcaatttctaaac

SEQ ID NO: 255168 - DNA, 401 bp, Gossypium hirsutum
cctcactcgtccgggttggttgggaagaggaaggttggctaggatgagccttatgggaattcccatggatagaagtttactagtatgtctaatctctgtgtatgtgtgtttcataacacgcgaatgcatgaacaaagttgcatcttttctcatgtccatcatatatcaatgtacctgtactcttacgtacaatggaatccgatgtacttgtcctcatatcttttctgttctgtgtttatttaaattctatgaaatattgcagctcctaaatgatactgcaccttcaccaattgaaattgcaaaagcatacatggcaaaccggacatcagaatcaaacctaagttctaagagtattatatcaaaagatgaaagaccaacaatgcttgctaatgattttgcat

SEQ ID NO: 255169 - DNA, 450 bp, Gossypium hirsutum
ttttatccctaacgtctctcactctccatctttgctttggggtcccgtctatggagatttcttcaatttccactactacaatacactacttctgtccctcaacagagtctttgctgttcaagagagttaagcttccttcacgggatcaacatctggtgtctatttctttgaattcaagaactgaacagcgtttattagctcggccatgttctcttgctcacaaggggaactcggtgaaggttaaatgtagtcaaaagagagaaattccggttttagaggccagttctatggatgaggtttttgatattttggctgaacgtattcttcctacatcatcagtagcatcaaatcctaatacaaagcatattgtcggtttagctgggcctcctggttctgggaaaagcactctagcttctgaagttacacagcgcataaacaagttttggttgc

SEQ ID NO: 255170 - DNA, 364 bp, Gossypium hirsutum
ttatgtcttagaagttggagctgatttttatgttagcaatttacataaatggttcttttgcccgccttctgtggcatttttatactgtaataaatcgactacatcgtctgatttgcatcaccctgttgtttctcacgagtatggaaatgggttgcctattgaaagctcctggactgggactagggattacagttctcagttagttgttcctgcagttttggagtttgttaacaggtttgaaggagggattgaggggataatgaagaggaaccatgatcaagtggtgaagatggggaagatgttggttgaatcatgggggacaaatttagggtctcccccggagatgtctgctgcaatgattatg

SEQ ID NO: 255171 - DNA, 390 bp, Gossypium hirsutum
ctgtttattgcatcttccctcgaggcaccggctctctcttcattggcttgttgttctcgggattggcaagaaatatgcgtgtcggattgtttatggaagtcgcttcttaaagaaagatggcctcttttatgcggagctgataaagaccctaacttcaaggactggcgaggattttatgtaaagcagcacgaagagcagaagcgtcaagccgaatccgtcattaatttggtggaacaacgctcgctattcggttcactcaatgctgtagactatctgcatgcgatcagttgcctggaaaggattcagctcggtttcagagatgttcaaatgctgctgttgaaaccaaagctgaatgttctgcttaacttgatcggactacattactacctt

SEQ ID NO: 255172 - DNA, 368 bp, Gossypium hirsutum
tcttttaaaaaaaaaaaaaaaaaaaaaaaaaaataaaaatgatttaaaaaaagctaaaaaaaagctaattatagaagttccattcctgccatggattcatatgaagcaacgaggatagtgttttctaggatccaaaatttagaccctgaaaatgcttctaaaatcataggttaccttcttcttcaagaccatggtgacaaagaaatgatacgtttagcttttggacctgaagctttaatccattctttgatctttaaagctaaaacccatctaggtctccccatttctaacccgccttcgccgtctcctcctccgccgttctcttacgccggtgtcgttaatgggtgtgccaaatctttgcatggtgt

SEQ ID NO: 255173 - DNA, 297 bp, Gossypium hirsutum
tttttcacttggagcttcaaataatataaattcaaattaagcatttaaacccccccccccaaaaaaaaaaaaccccttccattcttcgacactgtgattacaaaagatcacattttttattttcggtggggtttaaggggtaaagataaagccattgcctttagtcctttacccccaccccatttatttattaaaaaaatagaaactttactgttaattcatagaaaaattggatgaccgtgggaaagtgaaagacacttggttggttggccccgttttaaaaacccttttttttta

SEQ ID NO: 255174 - DNA, 288 bp, Gossypium hirsutum
tttctcaaaaccatgcaaagctacctacttgaagtctcacagcccaattgctgagaagaatgctcgggatgctgttcatgaggacaaatcagctaggggagttcgatcccctcgggtccccatgaacaaatccgatggtacatttgaaccacctaggctctccaaggacaaatccgatactgcatttcagtcgcccaggctctccaaggacaaaccagatactgcatttcaatcacccaggctctcgaggggcaaaccgaatactgacgttcaatcccctaagctccc

SEQ ID NO: 255175 - DNA, 465 bp, Gossypium hirsutum
tttttgtattaccattttgaagtttttattgtatttgtaatgtagttaccactgtttcatgtcattttctggtcgggttactcttcatatgaatagattcatgtattactagcagctgactgtagatgcagaaaactattttatttattcctagtaagtgatttctcatgcacattgtgctccaaaattgacacacctacaatagaatatttgagctgaggcccttcctgcaaaaggaatgtaggtagcaatggcttcgtcttccctactcctaattttctatctgggagtgtgaaagctctctttctgcaggtttgctcataaatttctactaagctactagttttaaacagtgaagttaacctgaagtaaaggtcattcagaattccgtaagttttactgccttttgcatgcttgattaatagcaaatggctgaaagagagaagtgaagttactatgatgatt

SEQ ID NO: 255176 - DNA, 457 bp, Gossypium hirsutum
ctgaataaaagtttgtacttaattatttttcccttttaatctcaaaatttgcccccaaatttcccagttctttttccttttcatttcacggcaccgaattcactcaccatagctactccttttctctcaatctgttagggtttctttaattttagattttcaagggaacgtacagtttccttttaattttgctggtgatttctatggcgacggaaaccctagatgacaagaaatcggaggaagaggaggtgaaagataaagaaaacgaagagggaagtaaggaggaagtcactgccaaattattggaatttttggaatcccctcatgctactacagatgttcttcttgctgacaaggaacagaagggtaaaaagcgtaaggctacaccaagcaaaaatattggttctgcggaggcattggatacatcagccaagaatgttaagacatttaaagatgt

SEQ ID NO: 255177 - DNA, 376 bp, Gossypium hirsutum
ttttgtttcatgatgacacagatttggtcgtggagtgttggaaagatgaatagcagaggccggaattcttttcagtctaagaaagttccatggaagcatgaaaaagaggaggctgaaatgcaggggaacaagccaacaattgcaacaaagacaatgaagaatcgacgagcctcaagcaaagagagaaaaaaggctttacaacaagatgttgataaactgaagaagaagcttaggcaggaagagaacattcacagggctctggagagagcttttaaccgacctttgggagctttacctcgtcttcctccctatctccctcctcctacattggagcttttagcagaagtggcagtactggaagaggagattgttcggc

SEQ ID NO: 255178 - DNA, 323 bp, Gossypium hirsutum
gtgctggaccatctccttgtgtatcacctactgtaagggataaagaacaacctatgaggccaagggggtctaatttgactggtgaagaggcagatgaagctgaagaagggacatcagctactagagatgctcctgttacaggtggtacagattcagatgcaaaagtagaatttgacttgaatgaaggctttaatgcagatgaggggaaatttggagatcctaataacttgacagcatcaggatgttcagctcctgttcaattaattagctccttgcctttccctgtttcttctgtgtctagcggcgtcccttctacaattact

SEQ ID NO: 255179 - DNA, 338 bp, Gossypium hirsutum
tcgtcacgcgtccgcctttctcaaaaagaaaaaagagccagaacttggacatgaatttcttctgctaactggttactgccatttttttacgttaaatcctgcgatctttgatggcggtctcatcttcagcttcttcctctctcttaagagcagcgtctttatactctcgaactcggttctttcattcttcgtttcggaatctcagtccaagctctccttcgcttctcgatcaccaacgatctcttgcctccgccgccgttcgttccttccattgctctgttccgcgatggagccaccgactccattggagatctccttttagccttcgtgctcagatc

SEQ ID NO: 255180 - DNA, 418 bp, Gossypium hirsutum
ccaatagaaaacatgaaagaaacgaacgaaatctctgttctgtttcagattcaaccaaaatttatcagcttgattactcttttttgaagttgttcgatttgcgggtggataactgctcattagaggaagacccatattgcaatatgttgggaaatgaggtttagatttaagaaatggggtgtgttttcggaagagaggtatcttctgggattgtttcagagtctagagcgagtaggaatgctagctttgaatctaataggaaagtagagcatgttacggttgcgaagactgatgctagtgctgtaggggttgaaaatgagggtacccaaaaggaggaaacatctgatggggaaaggaaacaaacgggggaaagaagaaggtcaaagccaaaccccaggttgagtaacctacccaagca

SEQ ID NO: 255181 - DNA, 384 bp, Gossypium hirsutum
ttgttcacgcgtccgattttttttaccctctaaattactcaaaaaaataagtaaccaatctaacacgaaatgtgtgaggaaaccatacaaatttgagcataatgaaaaggattgaaaatataactgcatcggtttcaaccgttccgttccaaccaacacaaaccatcccagtaataaatcgatgcaactctcccttttgcactagctaaagtttcgatctatatcaatcgcactagtttattctgctcaattccaattgcaccgaccaaaacattgtacattcattgatgtatgaatattttatatttgaatatgcatatattaaatattttttaaaaataccgataaatttggaacaatacattgaaataaactgatacaaaa

SEQ ID NO: 255182 - DNA, 191 bp, Gossypium hirsutum
cgtcgtcatcgggagtctagctctagcatgtgatgcgttttagttagtataataataattatcatggtgataatgaggatgattaattagaggggtaggtggggatgcttatgaactcatggtttgcagcggccctttggtcattagtgttcgtctctttctgttcgataacgtttgtcgtgtaatgtgac

SEQ ID NO: 255183 - DNA, 367 bp, Gossypium hirsutum
  unsure (1)..(367): unsure at all n locations
ttttctcgtccgcccacgcgtccgctttaccttccaccatttcttttcccattaccccttgtctttctcttctcattttagtccctaaccagacacatccaaagccacgttggaagaaccaatgtcaacagtaccatattccctatggtcttccattntaagctggtttaccccaactgtgttctttgtcttccttaaccttacaataggtaccatctatttcacttccactttgagttccagcaagcctagtagtgacgcacataggcagtaccacccagatgatgaaacatacccaagtttgttagatctccatctatgttgcagaggctgaaatctatcaacttgtctgcttacagatctcaag

SEQ ID NO: 255184 - DNA, 273 bp, Gossypium hirsutum
tttcacgcgtccggtccaatttactgcaattttattagaatatgtggcaaattaactagagcttgaactttttttttgcatggactactttctcttacctttttttttttttggtggtggttgtatggtttagcaattctatgaaagtgtgtcgagcaaggcaagatcaaagccaagaagcccttctagatcctcatcaaatgaggaagaccctggtcagcgccttgaagcaaggctccaagctgccgagcagaaaaggttgaacattttggc

SEQ ID NO: 255185 - DNA, 447 bp, Gossypium hirsutum
cgtctataaaaaagaagagagagggaagagagaaggaagagagaagggaggggggaaggaaaatcaggccaggggggccggtcaccggacggccaccggaggctcgccggcgccggcgccggccaccgcacgcggtggccggaaaagaggcatggggtgcagacggtgatgggcatgcgtggaggctggcgcggagcagaggcgtgcgaggttgagtggttgcgcacatggggcaacggcgcaagtgggcaagtgggggggggtttgctggtgtgggcccgggcagattttgggctttacactgagcattgattagtagcaaaaagaaatagtgtctttacgactaagacaagatgaaggattaaaaagtggggttgtctctgtcacgagtaatcaaaaaccattaccaataccaataccaataccaataccaataccgtttccttt

SEQ ID NO: 255186 - DNA, 409 bp, Gossypium hirsutum
ctctaagtggattttattgattttaggcttccactgtttgttttgcttatgattagttatcttttggagttttgaggtttccttgtcttcttttaaacagaggatgccaaactatttagtcatcttgactatcaattgctgagaacttattttttggattaaattgcagagaaatatttatttggtttgggtttttctttttttatattgaaaattattgattcattgagtttgttattttgtgggatttgatttgaccctttcgctcaaggattgaagttcaaaatggtatagcgtataactaggggaaggatacactgcaaatggtatatcgtaaatgtcatttagatattgacacagttcgtgttgtctcgtgttttcgatgaatccaaaactaggattcttattg

SEQ ID NO: 255187 - DNA, 386 bp, Gossypium hirsutum
tcttttacgcgtgggtgatgctggtattttccttcaatctcttcatctccaccacccaccaccacttctttccctttccctaaattttcaatctttacactttgcttcttcagtcctcaagccaaagccagccaagaaaattatatagaatagaaaagaaaagtgatgatagttgcttcctaccatccaaaatctttccttcaatccaactctacgtagacatcaaatctttacatcccattgttccattaagtccttccaaagaaacccatttttccataaagaaaaattgtttcttggctctaaatcgttgaccccaataaaggaaaaacattatgactgaagtactccaatcatccccatctcatttcccttcattttcaagc

SEQ ID NO: 255188 - DNA, 427 bp, Gossypium hirsutum
tcgtctcacgcgtccgcccacgcgtccgcaaattcaagtcttcttcccttcacctccaagtttaaacaatggatgtagaagatgacacaagagagggcttggcttcctccattatccttcaatctttggaatccactcggcagggagataagctttctgatgaggatttggcttgggttaattcttgtctggttacagatactgaaattttggaaagaaattggtcttctttcaaagatgttttgctggagatcattggtgaccaacctgagccacttgactcttctgcaactggaagcaatggttttcttagtggaactgaaatcagtatagctccttccatcaaggaggcagaggctgccaattactcaaggagaactgatgaagatcttcttgtcattccagtggatggagaaaatggaatgaa

SEQ ID NO: 255189 - DNA, 280 bp, Gossypium hirsutum
tttttcatcttgatttacacatcacaccaacacaaatatccctacactctgaactgatccctattgtttcatttcttcaactattgttacctctgcttcaatgggtaacttgagcttcgtccttggcatcattggtaatgtaatttcaatactgctttttgcttctcccataaaaaccttttggggggtgataaagaagaaatcaacgggggattataaaggagagccctacataacaacccttttgagcaccagcttgtggactttatatggaatcatc

SEQ ID NO: 255190 - DNA, 309 bp, Gossypium hirsutum
tttacgcgtccgcccacgcgtccggagctcgatcaaatttgtggagcaaccgactaccccatcgaatgcgtaagattcatttctccgtacttgaacgacagtatcaaaatcgacccactcaacgtccttaaagtcgggattcacgtagcgactaacatgaccatagaagccctcaatctcgctataaagattagggacgaccccaaaacctcaccaaatgctcaatcatgccttcgcgtatgcaccgaaaactacgacttaatccccgacggcaacgaactcgcgctacgtgccatcggggaacgcaac

SEQ ID NO: 255191 - DNA, 267 bp, Gossypium hirsutum
  unsure (1)..(267): unsure at all n locations
tgtcttagatgtagtaggcaactcgttgacatgatccattgctacaaattgacatcaatacatcacatctgtgaacttggtaaaaaatatgaagatttatgcattcactttggcatatgcttccatgtagaaaatatgattcggtttcctacaaaaggaagagccatagccattcattctttttctaaataacatctctcatttgttagtgatggaattccaattttatatgaataaaatttaaaatgaaaaatgcttttcgcncat

SEQ ID NO: 255192 - DNA, 256 bp, Gossypium hirsutum
tgcatggacaagggtttgatgactttgatgatgaggattatatcaatagttacaaggtagactctcagcaaaataatccaaggcagaaagcttcctcgaatgtttatgttgacaaggaggtgttttctgaaccagaaagaagtaggggctctaacttcgttcgtaaaaatatagctttatccggctccgaggatgacttatattttgattcacatgaagaactttcagctcatcctaactggaaatcgagtcatgt

SEQ ID NO: 255193 - DNA, 370 bp, Gossypium hirsutum
  unsure (1)..(370): unsure at all n locations
tttgttacaatgcttggttctcgagagacttcattggcaaatccaccagatgatgatcaagatgccattagcatatgtaggcatgctaaaggagaagacaggaattgggaatctgatactggcacatcagttatttccggtgcaaatttggctatatggcttctttctgtccttgcttgtcatgatgaaaagagtaaaatcacaataatggaagctggagcagttgaagttgtcactcagagaatctcccaacgatcttcccaatatgctcagattgattttaaggaagataacagcatatggatttgtgcagtattgtagncgatcttattccaagatagagatatcattcgggcacatggaacaatga

SEQ ID NO: 255194 - DNA, 375 bp, Gossypium hirsutum
cttctctctctctcccaacccacatttgccaaaagctattcagtttcatcgctgtgtttttgtttttgtgtttttgtgtttttttttatcctttgctggcaacagtagattaggcgagaggaaaaaagagtgagttttttttagatggacacgtatacagttcatctagcgatggcggctctggtcggagcttcgttggtggcagtgtcggcgtattatatgcataggaaaaccttaaatcagttgctggagtttgccaagacggtggagagggaaagggaggacatttccgagggagaagagtcgccacagccgcagcactccaaaaaacggcgcggccaacacttccgctggaaggggaacggatactaccgc

SEQ ID NO: 255195 - DNA, 187 bp, Gossypium hirsutum
gtccggcagggagctttagctttgtaaattttactccctttcgattgttcctcatcaaattccccattatccctttcttactttcttcttcttcaaccctttcatctttttaattccttttttcagttttttttttactccaatgttacctccaaaccctagcctttttcacgccaagccatctccg

SEQ ID NO: 255196 - DNA, 409 bp, Gossypium hirsutum
tttaatccccccacccccttttactgcattttctttgcaaccaaccaaaggataagctaagaaacaagagttcaggagggaagaatagggcaccttaaagattgaatcttttcgagatttttgattttgggtctttttattttttaagcaaatggctagtggtggtggaaataataggaatgggactcataggaactctctcaaaggaacgacaacaacatcaacagcatcaacagataagccactctctgtgaattccaacccttcaaagcctgcattcaaaaacaagtcttcgcctttgaccggtgcttcttccgggttaaggaagagtagccccggatcacttggaggtggagctgccaaagatgatgctggagttcctggaagagttcgagtggctgtgagatta

SEQ ID NO: 255197 - DNA, 469 bp, Gossypium hirsutum
tccacgcgtccggcagggcgctctgagctttgcaaaaatctccctccctttgtcattgttcttcatcaaattccccattatccctttcttactttcttcttcttcaaccctttcatctttttaattccttttttcagatctttttttactcgaatgttacctccaaaccctagccttttccacgccaagccatctgcgctcctccctctcctttcccggacctcattccgctgtttcgccgccgccggagacgccccttgcggcccaacattccataagtggttccaattcccgaccacgacaacaacttccgacaacgtttacagaggtggtgcgcgaatcgggcaagaaatcagctacgaagctccggctgggagtagcatcaaagtcaagaaatggtcgagggacacagagagttatttgactaacgacgatgaacctcttgcccttcccatgacttaccctgata

SEQ ID NO: 255198 - DNA, 403 bp, Gossypium hirsutum
ttgtcgcgtgggcaaaatagttgtgaacacaagcactaaaagctcaaaggttaggagagtgcaactggaattttttatgaccacaatacatctgtgtttgaagttgaagttctattgaactactatcaatgatcaatcttgtttttccatatggtatgaaatgttaggctaacaagaagcaacatatacaagagacaagtatagcgaagttgcaaacgttaagatgggatgtgtggtaaggctaagaaagaagtggttagaaactagatattcacctccaagttgagatggctcttaaagaagataaggtgacaaagattagccacataagaagcagatcgattgcttaacatgttagaataatgaaaaatttggcattgcattggataaaatattgaaaacc

SEQ ID NO: 255199 - DNA, 463 bp, Gossypium hirsutum
ttcacgcgtccgaaagaaattcaagtttagaaattcaaaggattaaattaaaaataaaaagtcaaatgatactttgactttaaaaaaattatattctactttagcaggatttttatccgtctaacagggcaattaggagacgcagctttagggcattggataatgatatagaaatttctcaatttggggcaacagcaagcaaaaaaatccactcaattgaagaacaccagatcatataattgctaatcgatctctcagtactgattcagatttcctgaatcgaaagcaagtaattttcaaaggagcttgtgcaacacaggatatgctattgcatttgagctgagttatctactacggaatcagctttagaataaagtttcacttgcctgggttgttgttggcatggaatccgagttagtactgcacaatggcggttgccactgtagaaagtaagatggaaagt

SEQ ID NO: 255200 - DNA, 456 bp, Gossypium hirsutum
  unsure (1)..(456): unsure at all n locations
ttcaaggttaccgagtttgtctgatgcatcgaggcaaccagttaaggaggagaagttacaattgaaaccttgattggtggttgagacttgacaccttgagaggtcacataatcaactctcccccagttgcagaatctgttcattttgagtagttcttacaataagtacattggttttctgttaataaaacttaaactaattaactcctatattgagtttgtggttggaggaaacggtgacacatttaataacaaaattattaggaaaattgcaccgacataccatagatttcgacttaggttgtagacatatcatctgggggccccagaaccgacagtattgggaccacaaacgtgcaaaatctattatagcgtctagggtaaattaattatgtttaaatttgaatctaatttttgaacagacctaactggctcccnctacgtttcttaaagaaaa

SEQ ID NO: 255201 - DNA, 276 bp, Gossypium hirsutum
ccttcaccaaaaaagtttgaggaaatgcctttggttatccagaagccatcgcaccatccgcatcatcttcaccatccccaccacaattcagagccaccatctctaccaggtaatcatactctagatttagaccctctccccttcgccatccctcttgtgctaggaaatgaaccggtctattcgcttcatggggggcataaacaatctcacactttttcaatccttgtctgacaattctaatgtcttggatataagccccgatggtcgatctatcat

SEQ ID NO: 255202 - DNA, 396 bp, Gossypium hirsutum
tctacgcgtccgcccacgcgtccgcagccgtacaaggagaaaacaatgcctcgcacgaccaccgtcgactgccctggctgtcctccacttcgagccttgactttcgatgcgcttggactcatcaaagtaatcgaagctccagagaaaggaggaggagttgccaaagtggtggagagatggggagatcctgatgcttccaaatgtgtgcttgccgcttccatgaatgaccgcaaaatcgaccccttattagctgttgcaagaaaaaatggtgtgattgagatacttaatccccttaatggtgaactttcccgtacggtttccgatgttagtaatgctggtgttaggccagaagatgatgctattgctgggctgcatttgttcagaagacagagagtg

SEQ ID NO: 255203 - DNA, 367 bp, Gossypium hirsutum
ttcttattcacaatttacccccaaataatgttgaagccacatgtttaccatcctcacaccaccaccaaaaccctagcctcgccattgcataagccattttcccacggcactgccctcgcatttcttcctttcaacgcctgttcttcattgggcaagacagcgaaaccttttaaagccagggttgttccgaacaaaatcaaagctgcggtagacgttaacttgaccgatgatggtatcctaactgactacactgtgaaaggtgtgatcacagttaaacaaactgtaggtggtttcctctccaacttagggttaagtagagggatagatgatatccaagacttgctcggcaaatcaatcctcttggagc

SEQ ID NO: 255204 - DNA, 439 bp, Gossypium hirsutum
tttccactcgctcgtgtcttccttccatcccacctccaattaaccccgacgccgccgtcatcatcgtgatcaaccatcgaatttttattataatccagatttttatcgaccacatgggcgaacaagcctcgggacagcctcaaccacaggctcaatctcagccttcaaacgactcttacgacgcgacccaatgccaaacccaaaggcaagcccaaactcaaactaaaactgaaaactcgaatgatgccttcgccgccgctgttcccaccgttactaccgccctcgttgtctctgcttcaacggaactcaccggtggttctccccttacatcctctcctccttctaaaatcccttctcgccctagaaaaatccggaaactctcccctgactcgaattccgaaccgaatgcctcccaacaagcgacgacttccacaacatc

SEQ ID NO: 255205 - DNA, 367 bp, Gossypium hirsutum
ttatttagtttgagaaacatagtagctttttgaccattgtttcatgcaagtatggtggtggcaacattgccttcttgccaaacctgtggctcacctgaaccatctcctccagcacctgaacccgaagcttttccacctgaaccggaagtacccgaaccttatccccctgaactggctccttatacagaacctgatcagtctccggaaccaagtgaggcaccaattgatgatgatggtgtttttgacgtcactaactatggagcggaggctgatggtcggaccgaatgtagctcggcattctctgcagcatggcatgcaacatgtgattatacgaggaactctaccatttacataccagaaggaacat

SEQ ID NO: 255206 - DNA, 157 bp, Gossypium hirsutum
ctttgccattcatttgggaaatagtgtggccttatctccgtcactcaacgccgccccctatatatagtatctgaacatcccttcattgtttttccttccaaaatatctccagcccccttaaagcctatcttcttcttcttctactactactaaactt

SEQ ID NO: 255207 - DNA, 376 bp, Gossypium hirsutum
ctcacgcgtccgcggacgcgtgggaagaaggccaagagaaattctgctttccaatacagttattgctcctttctttttatccttctcggttggtttaaggtttaagaatcatatataaagtggtgctatgtatggttcttcaccatagccagccgaaggaacatgtctctttaataataataataagaagaagaagaagaagaagaggaaattaacaaagatgagcaataaagtggttgttgcaggggtttccatcattcttgtggtgggagtcgctattggcgtggttactacaattaatcattctcgtgatgctaagggtaaattgtctcctgaaatgaaaggttgcgactagcatttgttcacctactcatta

SEQ ID NO: 255208 - DNA, 272 bp, Gossypium hirsutum
gaaccgcgtcttctagcagcttatgacattccagcggtaatccagcagaagccaagttggagacaactggtagcttaattgattttgatgctgatcctgaacctgcagaagctcctatggttactcagacacaacaaactaccgcgactgaatccattgtgcatccaacttcttgtaccaacgagaactggacctctatcgatgtttacccccagacaaatgtctctcagacttcttctaatgtgaacactgtggactctgatctttctcaa

SEQ ID NO: 255209 - DNA, 296 bp, Gossypium hirsutum
tcttatacattctaacaaaacgcctcttacagcacaacgaagcttctagtggaggaacctttacttgtaatgaagcccaaacacgctattgagtatcacaagaccataccaaatgagctgtatcctccagatctgtcttacacagagggcaagcaacatccacactcaactttcgtcgtgccagattaccaaaatggggcagcagatcgttaatcagtctccaacaatggatttttatttttttttggaatgattagtgcccataaggctttatagaaatctttgtaatcattatt

SEQ ID NO: 255210 - DNA, 390 bp, Gossypium hirsutum
cacaaaccatttctcccctaaaacgattccttttattttttccccccaatttccccaaatcggcagccgtttgcagcccatacacactaattttgttctttcttcttcctgattttttattttcttggctgtggcggtggttttatttttgaacgatttcacgatctttcagttctaagaaaaaaatgagtgcggattcctctaatttgaaacgaagcttcaattcaaattcttcaaacaatcaaagtaatatcaacaagaagaggaaaagtaaacagaaaaccctaggcatggcttggggcagcaattctatatcttcctctcgctcctcgtttcgcgtgaaatgtcaatggggaaatgttaggtgatgctggaaaatgttatgaagac

SEQ ID NO: 255211 - DNA, 386 bp, Gossypium hirsutum
tcttttactcattcccgtgcaaagtaaaaaaaaaattccctttttcaatttttgcccttacctctccctatagaatgaagaagcactagaacgatcatcttctccctcggttcactgtcaaaaaaacttgcaaaatttgccatcggccaacaaaaggcaaagaaggcgctagctgtggcagcattacaaccactataaaggatataccattccttcaagaaaaacgaggcatctgaatcgggcgacaatgataaacatgtcgccaatgattttgctgagctggaaaagagcaatgtactgctaataggtcccactagttcaggcacagtcttatatgctgaataacttcttgctgcttctattgattattctctagcttttttttt

SEQ ID NO: 255212 - DNA, 361 bp, Gossypium hirsutum
tctttgattttgtatttgtccattggagactccagcaaggttgttgtggacaactagcttctttcgccacaagcttatgatcttttaatttttatgtaaaagtaaaacacagaaattatctgtgtacaatctttgcttttcttcttttacagcaactttttgtgtctttttactcgccggaaagttttagacacaaaaatattacacacatacacgaagtttaagatatagaaagacaagtttgtataaagaaaatggagtctggccgtctttttttcaatccctccactacccaccgcaacatgttgcttctcgggaacactgaacccatctttcgaggggcaagaacaatggttagcat

SEQ ID NO: 255213 - DNA, 163 bp, Gossypium hirsutum
gtctttcacgcgtccgccacgcgtccgaaaaataggttaactgtgccctattctgacggccagatgtgacatgaaaggcgagcacctgaaagtgctaatgagcattcggccaactatggggaatggcctctttacaatggatgatcactggcatttcagggct

SEQ ID NO: 255214 - DNA, 380 bp, Gossypium hirsutum
ttttcgcgtccggtgagtttaagaaggtcccttttactgggaagaagcccttggggatttccgagacgggcttgaaggttaataaaggcagtgagagtaagaaaaatgaaaatgcgaggaatatgttaagcgaaagagaaagtagtagcagtgaagatttgagttcaaatacaaatagaaatgagagtagaattaggaagaatgaggtcaagaatgaagatttggaggctcataagactaacactgagttttcaggccatatatatgcggatggaaagagatggggttactatcctggattggactcaaggttgtcttttatagattttgtggatgcattttttaagaaagggaagtgtgatatgagagtttttatgata

SEQ ID NO: 255215 - DNA, 296 bp, Gossypium hirsutum
ttctctttcgtccggctttgtttgcgagctagccgacgcaccgtcccttcctcctccgcagtttgcttctaaagaacctgaggttgattaagatcgcagatcgcagctcttaaacaaataaattacaccatttcttgccattcttcattagctgtaggtattagtaaaataaagctcttttacaactgtggagctcctcattatttttcgaaatactagtctttaattgggaggaaaaataaacaaatgaaagagactttttgcatttcagttcatcaattccaatctggactttt

SEQ ID NO: 255216 - DNA, 385 bp, Gossypium hirsutum
tttttgtcttggaccgcaacagcctcctcataagatgtgctggcctgtttttcatgctgttgagcctctttctaaccttttgaactcatcacacttgggatttggagtagttgaagtttaagtatttagatttcagggttagttgtgtccaaagattaaagaatagaatgtggaagcatttacttgtaagatttcaacccccaatggtatccataaacatgacccctttagacagtggtgtcaactccacatatgcgccaaccggctggtgtgaaaaactccaattcctaacacacgcacacacatatatattgttcatttataatatggtaatgggtctccatctttcttatgtcaagttgcaaaggtttaaatcatgcatgtg

SEQ ID NO: 255217 - DNA, 233 bp, Gossypium hirsutum
gattaattctcattctgttgccagaaaggataagaaaaaagtgagactgactgagagaaacaaaaagaacaaaattatggaaacaataaagaaaaatggggagtcctggattgggaactggaaacagtgggcaaaggttaggcatcacggaacctatttcgttgggaggaccgactgaatatgatgtgatcaaagcccgacagcttgagaagtatttgcaaaatgtgggattg

SEQ ID NO: 255218 - DNA, 413 bp, Gossypium hirsutum
ttggagtgcatcgaattgtctcactagcagcaaaaataatgcattcttaacatactggctcaatgcactacagaatattgggacaacacgtgagccattttttgtgactgtcaatccagaccataccccgaagaataccttgcttaagtggtcgactggccatgcaattccctctgttgctgcatcaaaagcttcacttgagcttggtcagattcaggggaagagaggaatctggttctgtggctatgacttcaatcaggatgaactaaaggctggtatggatgctgcacatggtatctcgggaaagcattcttctgttctgcatagtccaaagagtatgtcaccctctttcatggaaacaacggcacgcctctctgttactaaattctttcaacaatatatatctatgggct

SEQ ID NO: 255219 - DNA, 411 bp, Gossypium hirsutum
ttttcccaacattctagtgtgattcctatctcttttgttgaccactcaaaacatttgtaaatttggcatattccaaattaattccaagaattggattaatattagcccatgattctctcccttgattttgctttgaattttggctaggttgctacctaaattgtgtctttccaaaaaaaaatattctctctctccccccttagccagatactgtttactgtagtagcctttcgcggctgagccctaaacgtcaaatcccaacctatttccatttcctgcatcccatgttgtaatctcaccggacaaaaattgttaccatggcctaagcagccacataagaaacaaaacaaagttattttttcatatttgaactttgcataagtaaaatttgaatcggagatcataattttc

SEQ ID NO: 255220 - DNA, 171 bp, Gossypium hirsutum
ccaacaccagcaagctcatcagcggaaacacccgaagtcaaggttagagctgaacctgtagccacaagcttggtttaagatgggatatcaaagcctgggtctcatcctataatatagagaacgatgggaaaagcactatgcctatgactatgagtactatgtattttttat

SEQ ID NO: 255221 - DNA, 221 bp, Gossypium hirsutum
cacgcgtccgggaaagagggacaaagaatgaaaagcgagctgaatcctgaagggactgaaagcgctctaaactcagtttacaactgacctttcttacccactgtaggtaactctgatctttttttgtgagtgagtgctgggatggcgccaaaaaggaaaacacccagaaagaaagctcgggggggatctttgggtcttgagcacatgatcaacggccattg

SEQ ID NO: 255222 - DNA, 385 bp, Gossypium hirsutum
gattgttccacgcccaccctcatacaataagtccatctcaaatactttgggctttaattgtaagaaccagaaactgtaaggcggatattgtaacagtgtttacaaacaacaaggtttcatttcatatcttaatattacccaaaacaagacaattccatccttaacctaaaaaccctcgtaaactcgtgaacaaaacagcccatttttgcagacagaaacaaagccgagaaagtaaagcaaaataaatggaggatttgaagaagagaaagatggaagagatgggaaacaacgaccagttatcaactcaagaagagctacgttctttgcttgaccctcttgctaaatcccagctcgtcgatcttctttctagactagggtcccaata

SEQ ID NO: 255223 - DNA, 375 bp, Gossypium hirsutum
tttctctttccgtcctctcctgggttgatggatgctttctgtatccatcactccgatctctcctagaaagctaacatctcattttaaaatgaaaccatcagtacgtgcacctcatgttacatattgatgggctttcttttttagttttttgcacaccaattttgttcaacaacagccattcacttgctcccatctacccgaggggaaaaaaaaatcagaaactgtgtttctcagttgagttcttcttttctgttttgactgattggcgctcatgtattgcagtaactaaatagttctgaaatcatgaagcataaagatggaaaataccattcacaacctgaaaaacctttcaagattgtccctgcaacattgctt

SEQ ID NO: 255224 - DNA, 283 bp, Gossypium hirsutum
gtccttcttgactcaaagcatcaaggatgggtaaaagtcctggtgtcttcgtgttcgggggtttttggaaatgaaaatgctgacgcttggagtgattttcttggtcttttgaaattcagaggtgtgactgtggatagaactctaaccagggactccgctaatcaaagttggtgcccttcaaattcttcatctatggctaagatttcatccgagcttgtagcggtcaaccctgcaatggttgctgcattagcatgaatactcagatctttgggtgaagatccat

SEQ ID NO: 255225 - DNA, 309 bp, Gossypium hirsutum
gcttataataattcacatgcttacagaaagctgcctgtttttgcggagcttctttttcttcttctatttttgttttatttctaccgtttgtttgaaccgtatcagcttttcttcttcttcttcactgctttgtatctctcagctcagtttaactgagtccgctgacatatgaagatgccagtaagtggcattgctgttgctgctggcattgtgcaatgcaatcaaaattcatggagaagaaagcaatgggctgtgtgatgttaatctaacattgcgctcaagaccacatagtgtatccatattggaatt

SEQ ID NO: 255226 - DNA, 185 bp, Gossypium hirsutum
aatttataataaggtttggccctggcttcctgatgtgcagaggatagattggttccattgcggtggagtgcatttctgggatttcgggatgacataaatttgtatatactcttaaaattttctcatgagtttcaattatttgttcttctttacattttttattagaaaggttctgctcatggtct

SEQ ID NO: 255227 - DNA, 418 bp, Gossypium hirsutum
gccgcctcctaagaatccgatccgaatcatttgggtttacccaatatttggcccgtcgtccgaccatttctacttagcggcgacgttctgtcgccaaaaccgacccttaatcccaaccccaatcttccattctcttaaaagacttaaaccccaatgactgataaattcactttttgtcaaaaagttgctaactcatctcaaaacaatggtcaaaccatccacaataagtctgcagaagaccaaagacgggaaacccattctttaaacatgggtttcgatcaaaagagaggtgtaaagcgagggaaaaatgggaaaaatgagcggaagaaaggtcctggagagacgggaaatgtaaagggctcattttggactgcatgttcctactgctattacaagttcgagtatgagaagaagtatg

SEQ ID NO: 255228 - DNA, 405 bp, Gossypium hirsutum
cccacgcgtccgcccacgcgtccgatatatctctgtctctctattttcgcatctggacagttcccggtttaacataaagccggtttgacgtgcgccgcctgagatgtcgccggcggtttctagtgtgataagaatctcacggtatagggaagctcagtggtgatagaagataatcaaatcggacggctccggtatttatctggtggggcccaaggagaaaaaaatctaaaaaagggtaggggaaaaatggagagccaaaagagtcaggggaagctaacgcgaacacagtcgtcgttgctccgttcatcgcctaccgtccggtcgtcaatccacagtatgtcatccatcaccgaaagtgactttagcaaagaccaagaagaaaaccagcagcgcgagtcgttactg

SEQ ID NO: 255229 - DNA, 380 bp, Gossypium hirsutum
cggattcgtgggcggacgcgtgggcggacgcgtgggcggacgcgtgggcggacgcgtggggagagatattttgtgagtaaaaaaaaaaaaaaaggactaaagttggatggttgtagggttttgcacgtaaaagttcgtgtttaatcatcataatgactagcattatgggcacggaggatgataagtatagcacgattaacttcgaagagacggagttgcgtttagggttgcccggcgccaatggaaacgaaggtgaaactaccaaaaacaacggaaaacgagggttctcggagaccgttaatttgaagcttaacctttcatcaaaggagactgtagccgaggattccgataagatgaaggagaagagctcaactgacact

SEQ ID NO: 255230 - DNA, 427 bp, Gossypium hirsutum
cccacgcgtccgataaaataaaaaaatgtgcctttttgcgtcgtatatgaagaaagaccgagtctgaaactccaatgaaagatcaaaaactcaactttacagtttgatttcaatttccaaaggatatagattttttgttttgaaggtttggtgaaaatggacaagaatttgactttttcgttttcttttatcgcttctgagttatgttatcaaatacattgtcaagtctctttattctttcacagttaaaagcctttctttaatctggctaaacaggtgcggcaggtgcggcctgatgtgcttcttgggttgtctggtgttggaggattgttctccaagaggtgttggaggctcttaaaggttcgacttcagctaaaccagctatctttgcaatgtcaaaccctacaaaaaatgctgagtgcacccc

SEQ ID NO: 255231 - DNA, 467 bp, Gossypium hirsutum
gccaattcaaactccattattgaatcccaaatgccgctcctctccgataattccacttcctcggcacggttatcggccgagaacgccgaggctgagcggcgccttcgtgaggcggaggagcgtttaagggaagccatggaagagcttcatagacgtcaaaggaaggccgcttgtggcgattccccgccgtgtgaccatgctgatgactcttgtgtggccaatgccattggcaatctttgtcaaagctttctcctttcttatggtgttagagtaggtatcgggattcttcttcgtggtttcaaactcgctagaggaaagtcttattcttcgctgcttgatctcaagcaacttgtctcagagaaagatttgattgtgagagaggaagcatgccgcattggtttactttttggtggctttactggttcataccatgcgctccgatgtttactgagaaaacggagaaagaa

SEQ ID NO: 255232 - DNA, 387 bp, Gossypium hirsutum
cgcaaacagaacttaaagacggtggagatgaatttcccactttccgataaaaacatttgtcactcacgttgtcgttcactgtaactatcataacctgggaaatcgacagttctttcatacttttcaatcttgtcctacgcctagaaatttccccagcccacctttgatctctcatgtctttattaccttcgggattcctttttctttgcttaatactcaagcttctgtaaaatcacagggtggtgttgtttgagcttttgaaattgtaatggtttcttgtacaattccttcatggaccttaattggtcttgtaagatcttttcttgaacttacactagcttatttccttttatgtggatcaaccttgggtttttttgcttggaaatt

SEQ ID NO: 255233 - DNA, 369 bp, Gossypium hirsutum
gatgaatgcagccttggccctgccaaaggtttggatgagtctgaggtgatgaaactagtatcagctggtgaattatcattaagtagtttacaatcaccttccttgaacgattccatcttcatgagaaccatggaactgtctggtatattgagcaaagcagataataatcggacaatgctccaaaaagagggtgctctgctataggttttgatatgaaactaatctaagagttttgttatggaagtggataaaaatggatccaccctccaattttgatattggaagatctcaatttccccatttttatacatcattatcattattagctgggttattcataagcaggcttctgggtgttttttttaattg

SEQ ID NO: 255234 - DNA, 272 bp, Gossypium hirsutum
cttaattttggtgttttgttgaatgaaactgtgatggctggctggactattgttggatgcaaaaggaaattggaaggtaaagttgctggaatgacataggagaagagctatggagctcggttaccagccggagcttggtttttcttatcatatgtaaaaccggattctaattccagtatgttgatttttaattcttgtaggtaacgaaatatcatttcgtatcgtaactgttttcagcttctgttgtggttggggtagtacccttccaagtc

SEQ ID NO: 255235 - DNA, 453 bp, Gossypium hirsutum
cggacgcgtgggctaataaatccccaaatcacagcaaaaataagatagaaaaattcatttgtagttctattccacttccaattcatttaattttcatctaaagaaaatgcctttttgttcgcttttctccttcatttacttcgtcgatcattgtttcagaattcgttttctctttgaaaagcgaaagttttaattatttaaaattcgtatcacgtttatttcactttgtatgatttgtatacagaaaaaaaatggaatcaagcttgcttcaatgggaatccgaccccttattctcagccgccgaagtcgttcaagattcagctgacaggatggaatcgttttttcgacttcttttgcacgaaaaaactcttcttcaaagtgatcttcctgacccaaagctgcttacttcaattggatatcatacgcgtgatctcgcaaccgtactcgagacag

SEQ ID NO: 255236 - DNA, 335 bp, Gossypium hirsutum
cccactcgtccgcccacgcgtccgtgagagacaagttagggaactcacttcaatctgctttgtcactacttcctaagaatgaaagcaatggataaagaaaagcctgctttgagcggcttttaagggaaaaatcatggagatttgcggagtcattgtggaaactagcaaaagaccatgaaaagtaatggatatttgtaattttggataatgtacacaaaattttaggggggtcgtcgacccaaagtacctgagaggacaagttttcgtatacttgtaatcgtcatggattggacgaaggatctaatttatgtgatttattgaatccttttttttat

SEQ ID NO: 255237 - DNA, 324 bp, Gossypium hirsutum
cggtttcgtgggtaaaattaccattgtacaaattatgactcaactgtgactaacgcgagtgaatatctacttctcgatcttattttggggatcgcttgcgaggtggcttggaggcacacattcaagtgtagcataatgaaacgaatgcctgattagcatagctttggaggcatatattcaagttttccggacgcataaggatgcctatttctttgtgtggatttccagactagaatgctcttcattatctgaactttggaaactaattgctactaatggaggaagaagcagtttttatgggaaccttaacagaggagattatgg

SEQ ID NO: 255238 - DNA, 348 bp, Gossypium hirsutum
cttgttttttattgtatcgaattgttttctttttgatggtggttttctttcttttgggtgggattagattctagagtctttaatcctttcacaaaatagaaacataacatgttgaaaataaaagttgcctaagcatagattgaagtttgtacattatattgagtaggttgaaggttttgctgcaggagtgcagtgcccgtggcaaagaccagtttttcttagttgtctcccctccaaacagcagtgttaattccttttaccttataattttgtaggtatgttcattcttctcattgtcttcctttttctaaaagaacaattcttgagagctacatatctttaatggat

SEQ ID NO: 255239 - DNA, 384 bp, Gossypium hirsutum
atatttacactgtctcagtttgtagctgttgaagggaatctttcttttttttctttggttcctttctgtttcagagaagattcatggcggcaaccccagatcgtaaccctgaagagcaacaagctgatccagaaaacgtgaaggagcagcctcttccaacaaaaagtatgacgttggtttctcctaattcctctcaagatgctgccccagtagctcatcgcagggatggcgctggtcaatctggatcatttgcttcagctggagaccgtaacgtctactcgcctacaatctatgcacctcagcctcaggctttctattacagaggttatgacaactctgctggtgaatgggatgaatatccaccgtatgtcaatgctgatggac

SEQ ID NO: 255240 - DNA, 341 bp, Gossypium hirsutum
tttacgcgtccgatcggaacatttccaattaggtgagctctctcttccattctttaagcaatccgcggctaaactatgtgctaggatattagcagatctggatggtttcccaaaagcaaggcctgaaagtaagcatatccttccgctataaatggcgaagcgatctccttgtgcagtgtctgttttgaagccaaaatctcacttggagagttacgaacaaccactccagatctagatctcaccaaattttgattacaagcggcatcaaaattaactttaacatcagaacctaatgggggacaccattcctcattaacaatagatctggacaagatttctat

SEQ ID NO: 255241 - DNA, 494 bp, Gossypium hirsutum
gtgtttttgttaattactctctcaaggtgaagcctgctttagcacaacaactacagctgcggtaaaattgatgtcaaactggaacatattctgctcctggtatacgtgagcatcgatttgtggatgccatgaaggacagttatatggtatggatgatattttcaatggttactcttggtctatataagaatagctttttattgattcataccaacaaccagtttgaacttgttgacccttggcttcattgcagctaaatatgcagagatgtgtttcctccccatgacaaaaatctttgctatagtggatatttgtacagcctttaatgaagttgaatattatcctgctaacaggacttgtaataattagctgatgagcttgcaagatgtgagcatgatattgtcaattttagagtttagctagagttctttcctagtgctatatataatctgaatatttattagtaatgaaagtgctttttatatataatgagt

SEQ ID NO: 255242 - DNA, 163 bp, Gossypium hirsutum
ggtggttactatggtcgtggccgagcaggacatggcaggggtggagaaccttttccagtggggtttttagttcctatgcgatgatgagctttgaagctctttataactgtgatagaattaggaactctttaggaaatataaggaagcataattactcgtaatg

SEQ ID NO: 255243 - DNA, 436 bp, Gossypium hirsutum
gtatgaatagcattctttgcctcaccctctgaattgccattcagagcacggtaggaatgctgagagattaccttttttttttttcatttttaccctcatttttcatcgtcatcctttctgcagtttcaactacagcctctacgttcattaccttctccatttataaagccctaaacaccattgccccttgccaattttttcaatcttttcttcgtaggaatcagatcgtagaaatttctcaattaagggcaaagtcttcagcaaggaaaaaaatccagattcaattgaaaaacacattagcttctggttttgatttcaaagcgattcaagacaaggtttctcttcatttaagaccttggcatcgttcatttcaattctgggttcgagctgttgatatttatacgcgctataagttcccttctttatcttcttcttc

SEQ ID NO: 255244 - DNA, 308 bp, Gossypium hirsutum
aaatcgacttctccatcccgcctaccctaattatatggtgctttatttatttactccaaaaacaactgatctgcaaaaattatatttactttttcccctttattatgtttagtctgcgtgcttgaagggaaggctgaagctaaggttatccgtttcccttcgtgccagtccacttctcttcctttttcttaatccaagattatcgccggatgtatatatatttaattattctctgttaaaagggaaatttgattggtaaattcggagcaaaaagtcatttgaggttttaggtgaatgacgagtgcttc

SEQ ID NO: 255245 - DNA, 142 bp, Gossypium hirsutum
  unsure (1)..(142): unsure at all n locations
cccatgcgtccgctttgacgctatatcaagtgattcttcaacagctactaaattcagagaaagaatttatgacatgggcaaagttatggagtcgagtatacacaataacatacgttgcaacaaatatagaagatcattggnt

SEQ ID NO: 255246 - DNA, 463 bp, Gossypium hirsutum
ttgttgcgtgggcggacgcgtgggttttaagagccggccttagaattttcgagctggaatcttgatttttccttttctttttacgaacacagatttttggccacacaaattaaagtccactttattttaccttttaaatttctacttgtagcagtcagagagaaaattagtgaacgcagagagaaaacgagagctttgaaactttttttttttgttatcatcgaatcaagatggaccttattggatttgcaattatgttctagttatcggagattcagtttctgccactagaaaatcatgtggagttttgcgtccaattgtgtagccggaactgttgggcggaaaaatgtttttctaaatcaaactcatgctgcgttagaatgttcagatgatgaaggcccttccgtaattagcagggatgagtgtttagaatgcccgatatgctgtgaatctttcaacatcg

SEQ ID NO: 255247 - DNA, 305 bp, Gossypium hirsutum
ctgacgcgtgggttttatttattcacttcttcaatcgtcattttgatcttccattaatatattaggatatgtataagatggatgatgtctaatgtaaattccaacttgtattttaatatgtagttaaattatttggttccactttcatataaatttgattataccatcttaaaattaggatgcaaagggaaactagcaatggtgtagcagcagcagcggcagccgcatcgcgagtccatccggcatgcgctgcatgcaagcatcaacgtaaaaaatgcgacgagaattgcattttggcgccttat

SEQ ID NO: 255248 - DNA, 276 bp, Gossypium hirsutum
atgcagggataaatagtactgaacctgggggatccttatgatggggctatcggccatcttgggttctcgaaggcggaacaaaggcttgccgagtgcaagaacagtgaaacctatgaaggtagccacagtcgatatgaagaaaccccaataccatttgtgcttttcagtggtcagatacacgatccccgtcactccgacacaggctccgagtgtagtactgagcaatagccagttgaaataccttgctagagctttggcttccttggggtctttatg

SEQ ID NO: 255249 - DNA, 389 bp, Gossypium hirsutum
ataatctataataagcaaccttctggtctggtcttcagcagcaatcaatccttgtttttgacttctctttttctgttcttctccaaccaaacaaatttttttttctcttacagggtaaagggggggggtgttagagatcaccaatcaccacacccatcaatggagaattcatcaaggttagtacaagacaacaagaacttgaacttcccatcatcctcatcttcatcatctcctttaaactccccacatagcaatggaaccaaccacaacaacagcaatgggggtgtccaaattcccaccccacctttaactccaatccccatctccagatctgagaccaacccttacccaacaacctttgtccaagctgacacaactacttttaaaca

SEQ ID NO: 255250 - DNA, 438 bp, Gossypium hirsutum
ggctttttcagccaacccagattagttttggactcgggtaagataacccatcaagggtttttcacttcttttcttcttcttcttcttcttcttcttcttcttcttttatttggttttggtgtgacccattattggatcttttagctgattttgcaatcttaaagactataatttggggattttctcttccttttcttttatatatagttcatattcatggatctttgcttattcgatgtttctactttttggatttacccaatttgggttacttggaaactatcattcaaatctatgtactccttgaacttttaactttttatgctctttttttccttaaatagatcgcctgcatatgtaattcaatttttcttttcttttttcttctttttccttttttaatttcagttctgcagaaatttccggttgagagttctt

SEQ ID NO: 255251 - DNA, 417 bp, Gossypium hirsutum
atttactagatccggcacacaaagaagcccttgaaagaatattgaaagaacggtcaggtgggacttttgaggctttaagtaaggtgatgggagcgcacctcgggattgcgtcgtcagtgactagcttttttggtgaaggtgggctgctaggcaagaaagaaattacggaatcaccaactgaaccagttgaagctctgcaatctgcagcatcaccagcagcggtagaggataccagattcatgcgaatcatgagggtcactgacatgcttagaggcaaaggaaagaacccagaagaaactcaccagaaccagtgaaatcaagtgagactgttgtttcctaataccctatatggaatgaatatatctaatttttcatgttcatatgcgaatacgagaatgctatgttagtaaatgctga

SEQ ID NO: 255252 - DNA, 379 bp, Gossypium hirsutum
ctttgtttcaacatcaaatccctaaactttttctttgtctctccatgaatttatatatatatgcatataacaaatgattcattgatttgggatcggttactgctctaaagaacaccagaaaatttatcaagagtggttcaacttcgttgattcagataatgatggacgcattactggaaatgatgcaatcaagtttattggtatgtcaaatttattgccaccagatctcaagcaggtgtggacaactgctgattctaagagacagggatttcttggtttcaaagaatttgtttttgctatgcagctggtttcgctggtgcaagaaggtcatcaaatatcacatgatctcctgaatggtgatggttttatgatttagcat

SEQ ID NO: 255253 - DNA, 444 bp, Gossypium hirsutum
ctctctcgtccgcccacgcgtccgagagattcagagagggattggaaagatgggtgattaccagtttcttatgctaaaggacgccattacttgcattaaccagaaagttaacctatttgccgtcattcttgacttcactctgccccagcgaaccaaaggcaccgattatttttgtaagctaaaagtaattgacgagtcacattccgagttctgggttcctgtgcatgtatttgctcaagaaatcgacggtcttcctcttgttgcatctgttggagatattattcaactttcacgtgtcacgatgacagttcatgaaggagatgtatatgctatattcaacaacaagttttcttcatttgctttatatgatgggaaagatggtgataatttccatccttataaagtttctttaagatttcatgagagagaacatgatgaaaagat

SEQ ID NO: 255254 - DNA, 457 bp, Gossypium hirsutum
ctcctacagacaaggggagaaagaaacaggcaatcaatcatgctgagatattcgacgatgaaagtctaaacagaagattaacttgtaagaaagaagaggattatcgagttaaatactagggtgaatagtttttttttcttaaaaagaaaaagaaaggaaagatgatgacgggtgtagtgccagagcagaatcttgagaagcaaatagggaaacaaatgggatgcatggctggtttccttcagatctttgatcgtcaccagcttctttctggcaaacgcctttactcccctaagcgcctccctcccgtggaaacgccggcgagtgaaaagaaaacggagcaagtgaagaccgttgagacaccagcaatgtcgagagaattagggaagcagccacaaggtcgagcagcagcgtcaccggaccgttcgaagcaatctccagttacatcggagctccgatc

SEQ ID NO: 255255 - DNA, 324 bp, Gossypium hirsutum
ttttcttccaatcatatacaaaaagactctccaatggcttctactatgcctctccccttcttcggcggcacttgcactaaggctgcattctctttctcactcagatcatcttctcctgcggttccgtttgagcgtctccagctttttcgatctacttgcagaacaacaacaaggattcgatcttccttgtttcactcaatgaaagctaaagcaacggccgatctagatcaagataaggaatcaggtgtagttgccaccgggaagccggtggtggagcattcccgtacctacattgaagctcgctccgagcaagaactcctatct

SEQ ID NO: 255256 - DNA, 466 bp, Gossypium hirsutum
ttcttatataacaacaatcaccggggaaaccccattcacctgtaattaaacgcaggtctctttcatttcctttacgtttaataatcccttcataacaccatggacatgaagaagatctccaccgccatcattgttgccgctgcctcaatgagcgccgtcatggccgccagtgcaccagctacttcaccttccgccggtggtgctgagcatatctcctctcctgattctggtccagcacctggaccagactccagcgtcgctgctgctgccttgcctgttcttggatcattggtcggggcttcccttgtttctttgttttcttacattctccagtaagctgataaatggatgaagaagtgcataatcggaggttgaagatgaagaacatggagctttatatttatactgtaaactggttactatatatatataagttatatttatatatgtaatcattttggggctc

SEQ ID NO: 255257 - DNA, 486 bp, Gossypium hirsutum
aggcaacggaaggagaggatgttgacgagatcaaggccaagatagatgccgcgaataaagccgtctcaaagattggggagcacatgtctggtggttctggtggtgcccaaggaggttcttctggaggtgctcaaggtggtgaccaggctcaagaagccgaatacgaggaggtgaaaaagtgagtgatgaggcagtaattctgttcacagcttgtatttttttttcaagtggaaacaaacgccactggagagatgatcgttttgtttgttgatgatgcatagggtgtttactgtttagcagttttatatctaaatgaaggttgaatgtaataatagcctgttaggaattggagtccacagacctttcaacatgagataaatttttcctgaagaaatggagaaataaggagattcctttattagtagaaatttaggctggatggtatataaaaacgtgatgctgtcaatgctttatgtgattaatggt

SEQ ID NO: 255258 - DNA, 520 bp, Gossypium hirsutum
ggtgttttgatgaagttgattgatttttgaaaaatcggtttctgggtttgcttagatctattatgaattctggtctaaacttatcattccgagttttgattttattttctttaataatatcctcttctgggttttgattttcattgattttgctaatgaatggatctatctagctgataaacgaataaagaaaataaatacaggtttttagtctcatatatttttttctttttgtttgaaacccttcccctcatctcaaaaaatgaaaattaaaaagaaaaccctgtttaagtttagtagttgcttcaagactattttcatggaaaattttattattttattatttattttggtctttcttagctttacttctctaacaagtagagcttggttttgcccttgaatcaaatggatgttttgtttagcctaaagttcctctttttagaggtcatcaccaaatattaatgatttttgttccatttctaagatttgtatggtaattggaacttatttatttctc

SEQ ID NO: 255259 - DNA, 401 bp, Gossypium hirsutum
tgtctctctctttctctctccataaagggcaaaccctaaagagtcgtttacaccccctctaacttcatggatgacgatgcgttgaacatgcgtaattggggttactatgagccatcctttaaaggacatcttggtctgcagcttatgtcaagcatggctgagcgggacacaaagtcttttattccaatgcgcaatccgaatctcatggttactcccaatgctgcctttcacccacgcgactgcattgtttcggaggctcctaaccccatgaattatgttagggatagttggattagccagagagaaaagttttttaacatgttaccgggcatttttcctaactacggtattctgcctgaaacttcagctgctcattcactgccaattttgcagtcatcacc

SEQ ID NO: 255260 - DNA, 514 bp, Gossypium hirsutum
ttaaaaatgcagttttgattaatcgttgatttaggcgaaaattgactcaagtacagttcctttctttgctttgctttggtgtgcttgagataatgtaattgaagtaattttggtcctggtctacctagcttatttctttttcttttggaagcaagttttcatggtaataccatacaaaggatatgagcggagaaggataatggaattgtagttcgtttgcagaagggaaacatatattgggtgaccaaagaacaaggagtggtgaatatatttttcgagttttagattcttcagcaagttaaaattgtgacaagcacactcctgttggaccattgaataagatttgcctgctacgattccatgggatggagaggtgtcttctattcttcactttttcttctcactctagtcgaatcttcaagtagatcagagaaaatattgttctcaagcttgggtgcccaaaaagctgtagaattcagctggccagtcttcagtgctagcatatttgtctttg

SEQ ID NO: 255261 - DNA, 463 bp, Gossypium hirsutum
cccacgcgtccggtgtgttttgtttcatttcattccaattgaatgctaacgtttcgcccatcccatcttctccgctatacttgttgtattactcgtcctctcacccctctccttcctcccttttcctcccatatccttccttccaactcgcctttctttcgccccaaacccctctctctttcttccttaaaccctcactccaacatgtccactcgcccctccgccttcgatgccttaatgtctaatgctcgccgtttagccggtaagaagagctcttcctcttcttcgcccaccaagaaacgcaaatcccccgattcgtcgcccacccaaaaccctaatccccccaaaaccgtcggctccactgaagtcaagcacgacgcagaggtttctagtgatggaatcggaaagcccattaacgattccccaaaacccgatttagatgaggcgaagaaacccccggatt

SEQ ID NO: 255262 - DNA, 421 bp, Gossypium hirsutum
atctaatcaatttggtaccaattttggggcgcaatgagggtgctcacccttcctcatgcgtaaccgactcccgaacccatttgtttttgattttgcgtgaatcgaaattgatttaaatagaacaaaatgttttagtaggtgacccaatcacacctaaacaaaagattggtggcgactccacactcagttttaaaagtcgatccctgcttttttcctaactcgaaaaaatggtttcgacaattttgatatgttttgagtttagaattttgttggttttggtcatgggatggttatgttttatgtgtaccttattgggtaagcttcggcttgattttaacttgtttaatgagtctttttggaagcacacagcttgagacacgggttgttacatggtcctgtgctacacacggtcacctcacac

SEQ ID NO: 255263 - DNA, 453 bp, Gossypium hirsutum
tttgtcttcttgaccagcgtccttcagaaagtagatcaagcgaactttggttttcttgcatccggtaagagattattccactttctaagacttcttttgctaactgatgggcatgcatgtttttattttctgggaatatacttgaactttattgtttgataatgggcacacttatcttgaatatctcgaatgattgctccaatgactgacttatcaacttctgttgtttggcatttcctgattactgtctttgaatcccctttgatttgtgaatctctaaagcccattaagattcctaacttaattgcttccaatcctgcatatgcttctgccgcgaacggagatggaacataattgtggaggactgtcttcgttgccagtttttcattcctacaaccccaaaccaccaccccagaggcagatctgaaatttctcttgtcgtacgcttcgtcg

SEQ ID NO: 255264 - DNA, 495 bp, Gossypium hirsutum
ttaacattgagaaagaaagaaatgtgttgttcggcggtgctcgcccacgagaactggttctgaaggagagagggattgatgacagcatccatgagccggaccaacatcctgatagggtcgtcaagcataatgttccgaggagtgaaaaagtagcagagcaagcagctcctcgtcccagtgaaagagttgggaatcctcctgttgatcagagagctggaagaaaatctgagagaaaccatggtgtttacaatgaaagagttgatacgcagaggaggaaccggcctaatgaaaactggcggaatgacaaggaaattgagaggcagcagcggcaggagaggcagccatcacctgagacctggcgtaagcctgcggagcagcctaaaccagtctctcctgaagctgctggtgttcgctatggaaaagcagcatcagctttggagcttgctcaagccttttccaaatcattctcagatcagaaaacagatgatcgatatg

SEQ ID NO: 255265 - DNA, 461 bp, Gossypium hirsutum
ttgacgcgtgggtaactgacgtgggtcttgggaggacagatttaggcaatctcttatggaatctcttgctattatcttatgctgccaatttcaagatgaaaaccatgcagagacaatttctgaaaatgctgaattctggtttccttcctgatttgactactttcaatataagagcattagccttctcaagaatgtctatgttctgggatctccatctcagccttgaacacatgaaacacgaaagcattgttcccgatttggcaacttatggatgtgtagtagatgcatacttggacagaaggcttggaagaaatttagatttcattttgagcaatatgaatgctgatgaatctccaataatactaacagatccacttgtgtttgaggctttgggtaaaggggatttccagtcaagttcagaagcctttatggagttaaagagtcaaaagaaatggacttat

SEQ ID NO: 255266 - DNA, 539 bp, Gossypium hirsutum
tattaaaatgtcgaatcccggagaacccttacgtatgtcgtcggactatcccggcaccggaggagcctctgaacggcaacaagagccggacggcgatgccgatctacgtgttccactccaaaatctctcgacggtgaaaagaaggatggactctctacaagatttcctctctcaatcggtcaacaccaacactttgatctccaaagatcaaatggaccacgtttcctccgaaatcgtcaacgccgtccaccaaactatcatcaacggtgccgctcttctctcttgtgcccaaatccattaccgtaatctggctccggttctaaacctgacaccagaaacaaaacccgagttcgaagattacgatggaggagagtccgaggtaatcgaattagacgccgtcgaattgctttcggaacatttacatttctgcgaaatttgcgggaaaggtttcaaacgtgatgcgaatctacggatgcatatgagggctcacggagatcagtacaaaactccagaagcgttggcgaagaaaccggaagtaa

SEQ ID NO: 255267 - DNA, 213 bp, Gossypium hirsutum
aatggaatcatccggaaacaacggtcaggaatgcatctgttgaagattttttagcattattaaaggaatgggtacggctgggtgcttcattttcatagtctagagaggagaatttggagaggcagtcattcaattcaagtgtaaatgaagattttgtaaatgatggacaggaagtggaagatgaaaatgaagatggtgatggtgaagtgtttg

SEQ ID NO: 255268 - DNA, 342 bp, Gossypium hirsutum
tttcccatttctcccctaaatcgaacgttgtttttactttcctaaaagaagatggggatcaaacgttctatcctcctcatctccatcttctccctcgcagctatctcagcttgtgctagacctccttcagacattactgatacgcccgagtcacccgattccacacccgaatcacctgattccacacccgaatcacctgattccacacccgaatcacctgatgatgactattcacctaatgcaccagatgaagcagcagacggttatgcacctccacctgaagcaccaaccccatctgcaacctttacaatattgccaggcggtagttaccctgagctcgat

SEQ ID NO: 255269 - DNA, 329 bp, Gossypium hirsutum
ttctcgcgtccgcgatttttctttcaaaacttcttctgaatcgtttcactttctttagttttgaagctttcttccttcctttcctcatctcttggcatttcttagtctggttcgtgcaaccgatcatatcttctttgatctttggcatactcagggacctccatttctaggttaacctcctcttttctaaaatttgggagtttaaacctaaaaatcttgcattaaaaatgcttaaattaaattatcaatttttaaaagggttaaaattatatatatatttcatttaaccaaaggtgaaaaattactaaattgattttttttttttaaat

SEQ ID NO: 255270 - DNA, 340 bp, Gossypium hirsutum
ttttagtcctcaaaatcatcccctttcttctcctctcttcttcctactccccacccccaccgagatttcgccctcgctgattctctacaccgcaaatccgaatcatttcaacttttaccgtacgccccgaagcttttgaatgttgcttctgtgacaaaatattctaatataaggactgatactgtgaatgggattgacaatggagttgaataacctgaaggatgcatttgatcgtgtagcaaagaagcaaaagctgtcctgctctaaagtgcaggaagttatggatcagattgtacaagaaatcgagaaggcaatagaaatgatgcagtcaaccaccctt

SEQ ID NO: 255271 - DNA, 286 bp, Gossypium hirsutum
tcgtcttcttcaaaacctaacataaaaccctaattcttaatctttaacattctctttcaatagcgttatctttcctttggctactgacccctctttcgtatttacgctcctatcctgtctaagctctgccatacgcaacgaaattggaaattccacttccaaacggtgtcatgttggacagttccgtgggctttgcactgcaagctatggttgtcgtgaccgacattgttgaaacaaattcagtcccttggttgctgatgatgatgggaactatgcctaatggaat

SEQ ID NO: 255272 - DNA, 338 bp, Gossypium hirsutum
gttcgacatcttcctgctggtagcccagcaacattttattgcattcacagtcttgttgataaagctaataacctcctcagtgatgcgaatgctttaaaggccgatgactggaaaaactggcaaggggggccagagccttgtaaaaaaatcctcgagctgctttcacgtcttatttctctagttgatatacaggtattaccgactctaatgaagttgctagcacagttaattatccaactgccaaaaacaggccagaccatggttcttaatgagttatatgcccaggtcgctgaatcagatgatgtcactcggaaaccaactttagtttcatggttgca

SEQ ID NO: 255273 - DNA, 338 bp, Gossypium hirsutum
tctcttttccttcttcatcccgggacaaatcggcttcaggtcattccttgactgtccgagaaacaattacagttactcgggccgaaatcgaaggtgccaccgtatacgaagtcacagctgcaggaaatcatagatcaaaaatgggaatttgtttagcacttcattggcagatatggccaaccagtacattgctgttgacaaaatgttaaaggaatagacgaaacaagcaacatctatggcttaaactttggtgattttgttatagaggagaatgcttgattcttattaggaagatcagatctttatgtatcagattggcccatctactggttttagat

SEQ ID NO: 255274 - DNA, 334 bp, Gossypium hirsutum
cggacgcgtgggcaaaagccaagtgttctttattgcttctacaatggataatacacccttaagtgcaatcaaactcacgtccttctagctattgcaatagcaatggtgccaactaagctaaggctcaatccattgatttagtttgtttttgaaaatgttgagattatattcccactgaatctggacagtactttctttattgaaagaaagagaaactggaactgtagtttcttgattgttcaagggaggaggggagggtgagcatctctgactttctttcagttagtgatcttttctactttgcacatctgtttgactttgtcctttctcagta

SEQ ID NO: 255275 - DNA, 240 bp, Gossypium hirsutum
caattatgctttagcctgagtacttatcttttctttttgggcactaagaaatcccttaggctgcaggtttcagatgactctcctgaataccattctgctgttagcctgcagcagccgacacttaatttactttgttcgcttctgaatggtgtcataaattccctagaaagagcagctgatgaaaaatcattacttctgaataagattcgagacataaatgaactatcatgacaggaggtg

SEQ ID NO: 255276 - DNA, 334 bp, Gossypium hirsutum
cccacgcgtccgcacactttccagcgtcttacctccgatcaggttagcttccttcccatcattcgaaacttaaatcctcaaatatatctatccaatccattgtttctcaattcttcggcgattctctctcaccctaggtctcttttcaatgttttcctgtgattctattttagccttgggtatccacaggccaaaaaaacacacgctatagtaggaagagagttttcgtgagagagaaaccctatgttttctctggcgtttctggtttttgtgatttttgaaattcgctgcttaaacggagactcatttcaggatgtttgggagtatgattcgg

SEQ ID NO: 255277 - DNA, 335 bp, Gossypium hirsutum
ttttatacggggccagtgggttacccttaattttggtcaacaaatgttgcaacagcaggagaggacaatgctggctggctgctctatacccccccaatgaagtgatctgaaactgaagcaagcggttgttcaagttcaactcagacacaccttccacttgctgcaataacttacgtccacgtttattctactctgcgtgcactcaaaccttttgagataattgctcaccatattagttgtgcacaaccccatttttctttttcttattccttttatccaaatcttattctcagcttattaatcattcattcgatttgcacatgagaaatcggatt

SEQ ID NO: 255278 - DNA, 235 bp, Gossypium hirsutum
tctttaaagttttgtgaaacgcaaaaaggaaagttgatttcttttttattttgttttttaaaacttgctaaaagaaagggtttaaaaaaaagagtaatttttggcttggtttttctcttttctttttctttgtatttatgtttatgttggctgccttttttgggcatgcttttgaatggaggggagtgggatcaaagggaaggatttgattgaggagatttttgggcggtaatgg

SEQ ID NO: 255279 - DNA, 342 bp, Gossypium hirsutum
gtatgcgccaaacatcccattggaaaagggaggtcagtgaaaggccatcaactaccaaaaaacaaagttcatataaatataaatattttgcgattcaaatctaaaagctcaggcaccaaattggcaatggcatctactgaacaagaagtcccatctggaattgcagctcctacggctgatgttgtgggtaatgcctttgttcatcaatactaccttatattacaccaatcccctgcactggttcaccgattttaccatgataacagcaaactcggtcgccctgaagaagatggcggcatgagtatcacaacaaccatgcaagccatcaatgagaagatactc

SEQ ID NO: 255280 - DNA, 333 bp, Gossypium hirsutum
tcgctttacgccacactctcattgtttctctgtggtaatggaaggctcagtcgaagatatggcgaaagcagtttccgatttagcattggattcgtctgctgccggtgaagctcagagcaaaaatgctcgtaagaaggaacttaaaaataagcagagggaagaggagcgtcaccgcaaggcggaggagaaagcagccaaacaggctgcagtcatggctggcacacacagtcagaaacatgcatccgctgaagacgaagatatggatcccacgcaattccacgagaacaggctgaaatttctcgcatcccaaaaggcagaggggaaaaatccata

SEQ ID NO: 255281 - DNA, 249 bp, Gossypium hirsutum
tccgaaactaaaactcttccaaagtctccttttgtcttacaatgtctgtatcaggcttaacggtgcttgacggaacccatctccgatcattcaatccctctttacctgaacttaacggctccgtcagtggagctcaactccttgaaatcgccgactccaaagcctccacctttctctttggtctcttattgcctcaaaaccttaaggcttccgctctttctcgtgtcatcgcgggacccggtgatcatg

SEQ ID NO: 255282 - DNA, 314 bp, Gossypium hirsutum
accaaaaaaacagagctctcaaaatctcaccaaactagtatttccaaaaactcgccattcttggtttaactagctatagctaagctatatcctatatcccttatttgatatatatatattagttttgccttctttttatttggcatcctctttttaaataattttttatggttcattcttaagcttaggcattttcctaccctactccctgcctcctaattttgtaagttatgtaacatccatgtacattttgctacttcatagatgaaaaagccattgtgcataaaaaaaaaaaaaaaataaaaagggcggcc

SEQ ID NO: 255283 - DNA, 177 bp, Gossypium hirsutum
tttctccccacccttttttttcctttcaacacctaacatacatgtttcattacgcaaaagccatctttatctgtttctcatgtgactctgaagcctgacaactttgttctttctttccttcaacatacccatgcttttaaaggggaatcatttagttttggtcaaatcctatggagt

SEQ ID NO: 255284 - DNA, 157 bp, Gossypium hirsutum
tcgtccccgtccaaaatagacgaacaggaacaagctgaataaaggcgcgagagagagagttgatactcagctcacctcccctcttccacaattaggtgaggaccagggaggccggaaaccccaacggtaaaccttttaccgcgccacacgattcttt

SEQ ID NO: 255285 - DNA, 149 bp, Gossypium hirsutum
ggggatcacaagattactaatggacacattgctttattcttgatcaaccgatttaaggctgctatacgggaaactatggtgcttccaaactgtgaaagtgcatacattccatggatgatggcagaaaaagatgattggatccctagaaa

SEQ ID NO: 255286 - DNA, 107 bp, Gossypium hirsutum
ttcacgcgtccggagcgtgcactttcacttttagcagtcaagtcaaacaagcccggacaacatgatgagcgcgtgcatgctgctgccagtcgcatacaaaataagtt

SEQ ID NO: 255287 - DNA, 222 bp, Gossypium hirsutum
cccacgcgtccgggtatttaaagttataggttcaaaaatgaagttcctacagttttcaatgttactgctccctattcttttggatgctcttttgtcgttttcaatgggggcatcgactcatcaagattttcttcaatgcctttcccttcgatcaaatgattctacttccatttccaaagtgatttacacacgaaataattcttcttattcatttgttctgga

SEQ ID NO: 255288 - DNA, 300 bp, Gossypium hirsutum
tgtaaatatcgaaccaaacccttcctcgaatgcaagccaatggcctaaatttaaaaaaattctcgccatttcatttattgcacatcgttatcatcgtctcgctttcacttgtctttgcgttctgcaatggccgctctctcgggcctctgctcttcttccccttctttgaagcctaagcatgaccgagtcgtcattccattggttcgcaagtactcgcttgcattccctactcggtccaattcttgctccaagctctccgtttctggtgaagtgtccgcccatttgtccaaaacgaacagc

SEQ ID NO: 255289 - DNA, 392 bp, Gossypium hirsutum
attatcagctgaattctactctcgcttaccctgcaagtttggggcagacgatttctcctaaaatattagctcattcctcccacctcagttcgacttgaatttcataagacaaagtttacaaccatgagctggaatttaaagtaatctgctttctgtaacgatctttggcgtaaaagagagtgtttggagcttttaatttgttgaaagagaatgaggaccaagcgaaaacgagcatgcaagaaatccccagccagaaaatcagctgcagtggccagaaatggaaaagcaacgaaccaaagtgaaaaggcagtgaaccaaaataaggaagcatttttaacttctattaacaaaattaacaaagaagactctgtgtcttgagactctaacgattt

SEQ ID NO: 255290 - DNA, 193 bp, Gossypium hirsutum
ctttaacaaagctctagcagagactaaagctataggagaggaaaaattcaaatagcgggtgagaacagattgtggatctgttataattgacgatggtagtggaactagggaacggcgatgatggcgtcacctcattggcgtcaccgacctccgccatggccagtgttcttcctgtcgcttgcgtctctcaaca

SEQ ID NO: 255291 - DNA, 321 bp, Gossypium hirsutum
tttattgttgtgtgttctctaatagaatcgaggtaagagacactgggctcaggggacatcaattttaactagaagaacatggtcatatttagagtgaaaagtcttgcattttatctagtgctaaggtggtgcatattagtccgtccatggatcaatgcatatttgattttcttttcacactgctaggtgctttcactcatctgtaaggattggggtagattatctttaaaatagttgagcggagctcatcgatgaacttacttggaattgcttgtgtgctggcgcttacatgatttggaaatggattttgattgaaatatt

SEQ ID NO: 255292 - DNA, 342 bp, Gossypium hirsutum
tcgctttctgtctgttgtccgttccttttctaggcccgcttccaggcaaaaactgcgttaatctggttccctctgccgtttcctctccaacgctcgtcggacgaactcaggcaacccttcctcaagtcaccactgaatcgacccccagttgcaaccccaacattactgcctgcaggcacgggcctccactgcaaacaaggtaggaaccccttaatgtaaaaccatcttcaaggccagaatctcgcccgaaacgtttctggtcacgacaccttttccagatctgatttgaatcagattgaaagctgcatcgaagttaaccttcacctctgcgtcgaatggggg

SEQ ID NO: 255293 - DNA, 385 bp, Gossypium hirsutum
ctttgataaggtgcttgcaaaagaagtgctgacgggcagtttctatgttgtacagtgagcattattttggctgtcttctgccatctcaacagatctcgggcttttcttgtaaattacagacaacaaggaggaaatctaagaaaattttgcaggaaaactgttttgcagcttgttgaaaggtatctctgtaagtgaggataatttggtctctgcaaaaccatcatgcaaggaaaacgggcatttgtagatgaaaaggattgcttatgattaaagaggtaaaagtttctcggtttggataataaaaattctgtaccaacacttgttcagttgtagtaggcacgtttactacttggtgctttttaaagcatttcttggacttgcactc

SEQ ID NO: 255294 - DNA, 413 bp, Gossypium hirsutum
tttgagggaaagaaaaaatcattcttttctcattgttgagactttggctcaaagctaccatctttactgtcactcccgaaggactcaaatggtagaggcgcaaacatggactacaaggaggatgagcaacccaagattggaatcaaccgccactgccgaccaccaacttttggacatcccggctaccccaacagctgaggtgagaaacggcatctacagcgttggatcacatctatctcctaatctcttaacggcactgatcattgcttcatggttcatgtccaacattggggtccttttactcaacaagtatctactcagcttttatggctaccggtatccaatctttctcaccatgctccacatgaactcatgtgcttgttacagctacgtagccataaactttcttgaaa

SEQ ID NO: 255295 - DNA, 443 bp, Gossypium hirsutum
tcgcttatccaacatagcgttactattaaaaaaaaaacccccctctttccaaatataaagaaaagtaaatatggaagaggagagactggaaatgatgttgggaagttacggagggaaggtgagtgtgttggaatgggagacagaatctggtgctgcggaggagacgatgctgctttggggaatccaacagcccactctctccaaacaaaacgccttcgtttcccactcttctctccaactccttcttgatgcctgcggccattctctctccattctccagtctccttcttccttgggaaaacctggagtaactggagcagtcatgtgggatagtggagttgtgtagggaagtttttggagcatgctgtggacttgggaattcttgttctgcaaggcaaaaaggtcgttgaattgggctctggctgtggattagttgggtgtat

SEQ ID NO: 255296 - DNA, 400 bp, Gossypium hirsutum
cctttttggacttttcatccatatgattgcaagggtgtaaccgttaggaatgtaaccatcttagcacctgtatttggagctccaaatactgatggaattgatcctggtaagtaatccctgattataaattttgaacttttgtctataaaaatttttggtagctaaggctctagactcgattctcattcatgctactagtagttgtatagaaatgctcactgtacatatataactcgcttattgagcaagcttggttgacaaatctgtagaatgaattcaagactataattgaagaaggtttgcagaggctattatatacattagttaaagtacgactgtgcatttgttggaacgtatagaagcaggaaggtgagaacttagatgtaagatgtatggatat

SEQ ID NO: 255297 - DNA, 175 bp, Gossypium hirsutum
atctgatattattcaggccaaaaatcgggttctgaatatcatagacgggggttcctaccattgatcgatcttgtccttttgagatgcatctttcgataattgcgagggactcgccttcaaaaatgagtgactgccatcccttgtcaatacctattttgactgcggtccaacatgc

SEQ ID NO: 255298 - DNA, 398 bp, Gossypium hirsutum
ggtaggtgttgaatttgcaagagaatatactaaactggaagttaaatttgttcctgaaatctctgaattttcagaaactaaatcagatgaagaccttgccaaagaagttgctcagtttgcatctctggtgcaagattctgtaggggtcttaacagagactagcaatctatttgaatcaatgtccagatatccattttctgcttgctctggtttggtatttgtaccaaagatcactgcaaagaatactgctaaattgtttgacctgatggtagaagatattagatctttcataaatggaagagggagaatgagccctgagataaatttccacttgcttgggataggggatccatgtgagacaagatttgtgcttggcaaaattattttagaaacaatga

SEQ ID NO: 255299 - DNA, 272 bp, Gossypium hirsutum
cctacttcttccgaattctacgacttttaccaagagaaaagtgtgaaatagctttcagttttcagcttagcttcttcaaagctatgggaacccgaggagttatcggagataaatggtctatgaggattctctgggggtgtgcaattggaagtgcagtcgccctgtatatggttgctgtagaaagacaaaaacagaacagagatcaaatgatggcagaaagtttaaaggccatggaatcggaaggtagtggtgagcgagtttgaacattgaca

SEQ ID NO: 255300 - DNA, 267 bp, Gossypium hirsutum
  unsure (1)..(267): unsure at all n locations
cctttgtttccgcccacgcgtccggttttctcctggctggccccttatcttctctggggctcttcatattcttcctttctcttcttcttagctgccgtttcttgcacccctcttgggttggcgattcttttttttccccgaataatcattaatcgttcggttcgtttgcaccaatagttttgtgcacatgcctctntattctattttacacgggtatgatcctaacggtagattggtaagtgtaaaccttccaatccatgggtaaga

SEQ ID NO: 255301 - DNA, 158 bp, Gossypium hirsutum
cttttctttaggttaactgcagcgcgccatttgctgcggggatggatgttctcacttgtcaaaaggtaacaaagaaattcaggtgtgtaatacgattcgttgctgtaattccatggcgagtagaggatttccgctctcctgatggagtttatagggtt

SEQ ID NO: 255302 - DNA, 328 bp, Gossypium hirsutum
  unsure (1)..(328): unsure at all n locations
tactttttcgcccatccagtcccctcccatgtgggaggatttaacgacnaaacggggacgctctccaacgactctcgcaacggtgcatggaagacagacgtgcgcggcgtggaaggagaacgtgcgacgtgttgtgatatctgcgcggaggctatttgctgctgcggtactgaggcgaaggggctagggttctttgattctgttatgggtttattgggctaatgtaattgggttacaatttgagctcgttatttgtttttttatccacgccaaaattgggctattacattaataactcggataattcaactaattcaaataaaagatt

SEQ ID NO: 255303 - DNA, 157 bp, Gossypium hirsutum
ttctcaacagaaagtgctaaagcagatgatggaattcttggctgatagctgcctgactcctttttaggaacttatatgaaaaagatgaaaaatggtgatgatttcttgaatttcctcccttgcgacttgtcaataaagatacttactgctttagagg

SEQ ID NO: 255304 - DNA, 115 bp, Gossypium hirsutum
gaagtcatctggccatcttctctgatcttaaagtggtggatgaagagggcaaaacattcttgaatatttcttgtctcatgaatgcagcttatatcttaattaccaatcaacattg

SEQ ID NO: 255305 - DNA, 212 bp, Gossypium hirsutum
tattgatcatcccggagctgtacccatatctacagcccatggggaggagctgcaaaagctgatcggatcaccagcttattattgagtgcagtgcaaaaacgcatgagaatgtgaaggcagtgtttgatgcaaccattaaagtcgttcttcaaccacccaagcagaagaaaaagaagagcagagcacaaaatgcctgcaccatattgtgactg

SEQ ID NO: 255306 - DNA, 258 bp, Gossypium hirsutum
tgtgaggatccaagatgccaagtagggcaacactttggttgtgttataattccagagaagcctatggagggaaatccagcagttcctgatttcttttattgtgagctttgtcgactgaagcgagctgatcctttttggcttactattgcaaaccctttttatccagtgaagttggcgattgcaaatatccctactgatggtacaaatccaatgcatagcgtggagaaaacgttccaaatcactagagcagacaaggag

SEQ ID NO: 255307 - DNA, 308 bp, Gossypium hirsutum
gcaaaattaattatttttgcaagttgcctctaccattttgacatttggagttgaagctaagaaccgctcggtgccaataattggagcataattagagatgacaatgggacagatttggagcaaaatcattttggagtttttcgagtttggtgtgtgcgctaggatttggggcaagctcggtattttcttcgtaattttcaaactttataaaagatgtaagcattctaacatgttcttgttagagttcaattgagctcagatttaaatcactattttttttttatcaaatttcacttcatgggttgaga

SEQ ID NO: 255308 - DNA, 271 bp, Gossypium hirsutum
atcaccttcttcttcactctttttaatttcttttcatctccaaggtctatcactaattttcaagcatccagtcaagctagctttgtaagacagtcaacttcactgcttcattttcagttctattctctcaacacttttcagccactaagtcagggacatagcaatggagtacgtagagcctgttgttggcattgcaatttgtcctcggcactcctgtttgtaaatatttgcaatattcacagaaagctgaacgactatgtgagaaacttca

SEQ ID NO: 255309 - DNA, 124 bp, Gossypium hirsutum
aaaccactccttctgcacccaagaaacccgacggcggggcacggatccacttcacgaacccggatgatgccatcgaggctttcgtcgatggctgcccggagaaaatgcccaagggcatgaccgt

SEQ ID NO: 255310 - DNA, 386 bp, Gossypium hirsutum
aaattcaaagccttctccaagaaaagccactgcctcttgctcaactgcttccgattccactgaaaaacaattgccaaactatctcaagcctacgaagagttcacgcactgatgctgcactcaagaatttaaagaaaccgggggccgaagacccttgccaaagttcaagtgttatgagaagaagatcttttgataggcctccctcagctgctcgagctcacaaggcactgatctctcctgttcgacaaaaatcagcatcagcatcagcatcaacatcaacatccccatctttttcttctaaatctgctactgcacccaaggcacctttggaaagggttgccaaaaaggcaattgctgcagccaaaccacacacgcagacgttatctt

SEQ ID NO: 255311 - DNA, 354 bp, Gossypium hirsutum
cccaaatatttgcatgcctgttcttcttttctggtacgttttttgaacttggaatcatgggaactctttaaattgattggttcttgggattgcttaggcttatgttatctattgccttgaaagtggtggacgtgggtgatttaagaggagactttttgatgaatctagattgagggtatggaggcaggtttataactataagggtagcttttggatttggcaatttgtgcggtctatctttctttgtttctttgaatgtatcttattgttattgaagaaaaggatcggcttgtgaacctgcccggcttttatctggatgttctcaagcctttgaatttactaccctttgaacag

SEQ ID NO: 255312 - DNA, 384 bp, Gossypium hirsutum
tttgttgcagcagccttgattctccttgccggtcaagtcacggccagacgtgaaatcatagaagtcaaaggtcgcggagtaacggaccctatcctcgaagccaaactaatagacatgcttgaagaaacagagcgtacaaaggataaggtaccggtacttggtaatagcgagatggttaagtattgtgataatgcctatggaatgtccataggaaacttgaaaaaggcattgggtatgcttcaacgtggtattaaatcaccccaaggtttcaaggaactcgaagccatcgtgttggtagtgatgaaggcttatgaggaatgtgatcatgtttttgcagagaatgcttagcctttaccttttggtattagtaatactaaattgaaa

SEQ ID NO: 255313 - DNA, 117 bp, Gossypium hirsutum
gcatgataaacacagtgattatgatgagttcacccttttgcctcaacctcagcctttttctttgccttctacaatcccagattggcctccaggtcaaggatttgccactggaaaaat

SEQ ID NO: 255314 - DNA, 331 bp, Gossypium hirsutum
ttggtgttggtgttgttcggttgatgggttcagctgtgccatatcaccacagctgcttcttcccgccaccagctccgccttcaagaaactctgtcatctatgtaatgtgtctagattgaagcatgtatggtctgaaacaactttcaaactcatgacaactggcaattttcgatgtgcaaatgatgctgactgcccttcgtgctcatcttacttattcttcaatgcgaagaaccaagaaaagggtttggaattgcgggtaatagtggatcattcaagatatatacttacaggagaaattcatttaacacaaggaaattgcccaacaccctta

SEQ ID NO: 255315 - DNA, 348 bp, Gossypium hirsutum
tctatgtttagaagattcagatcgtgacccgccggatccagtatcctctaattgacagtagccgtccgttctagctccttctttctctgaagtttcaacttccacgaagccaatttgaaagggaaaggaaaaccttctcgatccgcttgcgtttcggatttttatttggatgctgcacctgcttcctcagggtattggacatggatgaaatgatagtggagtagcataattctaagcagagaatcaagtaaatggaggatctttccaagtatgcccatagtccagctcatttagctgttgctcgccgtgagtatgctgggcttaggcgcattatctcaacactccctc

SEQ ID NO: 255316 - DNA, 288 bp, Gossypium hirsutum
gatattttatttattaccagagtcacagtcgtttctattttcccggatttccctttcctttcgctctttgctctttccgggtccttcctgtttcacgattcctttcgtgttcttcttatctatttatttattccttcactgtttctttcaaaattccctgttttccaatggcgtctattcaactaactcgtgtactatggtcttgcaaattatctgccaatattgcattatcgtctcgtaaatgttgcagttttaggcgtactaggcaactggatttcggtcctttgt

SEQ ID NO: 255317 - DNA, 260 bp, Gossypium hirsutum
atttgatatatgttgtaggatttgctgcttcgtaccagtttgagatgtaccaaatcaatgctaagaatggagagttgttgaagcatgaaagtgcatccttttctagtgggttttcgggagaagtttcactagtttccactgagacagttgtggctcttgattccacagggtcaattttgctaacaataagttttcaagatggaaaaattagttctcaacagacacccattttcaaatcttgtcgaggattctttaggacc

SEQ ID NO: 255318 - DNA, 127 bp, Gossypium hirsutum
agggtttggttcagcatgcagccgccagaccaccatcagtccgatggccgacggcgcgaaccacagactctgtcgacggaggtcgtaaccatggagatctgggaagtcacttctttccctttctttt

SEQ ID NO: 255319 - DNA, 155 bp, Gossypium hirsutum
cgagagtgatagaaaaaacggagactaggtttttccttctaatttggttgttggttaaattcggctgcaatggagccgcgagttgggaacaagtataagctcggtcgaaagatcggcagcggatcgattggagagatctatcttggtaccaatat

SEQ ID NO: 255320 - DNA, 193 bp, Gossypium hirsutum
ggacactgtcgttacgaccgacacgacgacgttttaaaaaaggattgttacgctcactccgtcgtgttcgatttacaaacaaatgaaatccgaccgttgatgatcctcaccgacacgtggtgctcgtcgggacagttcttacccgacgggacgcttttacaaaccggaggagatttagacgggtttaaaaaga

SEQ ID NO: 255321 - DNA, 115 bp, Gossypium hirsutum
aacacaacctttgtcttcttatcctccaaatattcgcagttctgatcggcaagacacagctgagtcttctgcggagtcagagtttccaaccctgaggactagttctagatcgcga

SEQ ID NO: 255322 - DNA, 417 bp, Gossypium hirsutum
ccatgagataggtatttcctgttaaatctacctgatgcgttgaagatttgaagtgaatatttacctttccaagggtccatttcaaagtttactggaatgagatatgtaatgtcttactcgacgcggttcatcaaattgtgtcaaaaaactttttatatggtggatggataccctgtttatagcatggctactccaacaattattggtgctaaagagatgctggcatatcttggtgccaaggtcaatgcaggattttctggtcagaaagtggtggtaactgatctgagagaagaggcagttgtgtacattaatggcacaccatttgtactgagagaattaaataaacctgttgagaccctaaagcatgttggaattactggccctgtggtggaacatatggaagcacggctaaaggaa

SEQ ID NO: 255323 - DNA, 187 bp, Gossypium hirsutum
gtttagttttgccctccccatcggccaatgctggggaggggtaatttatatgagggggcggggaataaaatcaagagcttgttacaaggcaatcgaatctaaatgtgcatgcaaatctatttctcgtttatttactggtctttttgggttactcctagaaactgttgcaatctgtttttaggctgtt

SEQ ID NO: 255324 - DNA, 404 bp, Gossypium hirsutum
cctacgctttcggaagcagagacctctctaccaggcactggttcacgttaacaggggtcattcagcttcttcttttcgtttctacgcaaaatacatacagtttattccctttgtttcttcgtttttggtttccaaaggataggaaaaggtagatactgagtgaagtgacaatgggcaattgcttgcaatacttctggcctactgcgcaaaataaccctgacacttcaggacttacaaccggtctcctgagtgaaataacatctgaaagtgattttccaaccgtcaatctgaaagttttcacatatgctgagctagacaaggctactagaaacttcgctttggcgaatcgccttggggacggcgggtccagtcatgttttcatggggtacattgatgagcggacc

SEQ ID NO: 255325 - DNA, 221 bp, Gossypium hirsutum
aaatcatttccatcttcctctcttcaagatgaatgccttggtctacatctataggtcttgacgaacagattcagagattcctcccaccaggtaataactctctcttctcttaaggcttccttcgcaataacatgagcgatcatattttctgctttagggacaaaatgaaactcaatctcctagaatctgtgttttatgctttgaatgtctctaatgattgc

SEQ ID NO: 255326 - DNA, 215 bp, Gossypium hirsutum
cttttgagccctaatgaaatcaatggatagcagaggagttttggtggggaggaacatcatgttcttcttcctcatctgcgtgcttggttggagttcgaagctgtcggaagctcaaatggtgccggcgttatttgttttcggggactcccaagttgatgttggaaacaacaaccaccttttcttttccattgccaaggctaattttcctcacaacg

SEQ ID NO: 255327 - DNA, 399 bp, Gossypium hirsutum
tcgaatatcccaaccttttttccaaagaagaagaaaaggttcgtttttgagcttaacccaacaatgctaccttgtttctgagtccagctgtagcctccatttcctcaaatgggttgttgtctaagctctaaaaaaggttcttctcgtggaaaggaagcacatttacatgcgggtcttgaatcttttaaccaaaagccaagccttgaaagcagagctccgccgccttcagcggaagaagaaacggtgaaagaagttctgtctgaaactccaaagccgaaagctcgcatctttatcccacaagaagaagagaagaagaaaccccagatagaaaaaccggcgtttgtcaagatccaaggggaggaaagcctgaattttaacatcaagcctgagccgaaattg

SEQ ID NO: 255328 - DNA, 376 bp, Gossypium hirsutum
tcgtttacgcgtacgcccacgcttcctgaacggactggggaaagttaaattgtggcgattacagatgcccttaccgcaggttcaataatgggtgtggtggtggtatcgcttatatggatgaactcaaacgaacgattaaggaccttaccatgaaacttgatgccaatggtcttttagggaaaaagaaggccatgaatatacaagctatggcgccagaatcttcatagatttatatatagattatagaaactacggattctatacaaagagaaagaaaataaagaataaccaagcagcttgatatatgattgaattacaatgtgctagctgtttttttttatctttaattattatatgaataaaagagatttaaagt

SEQ ID NO: 255329 - DNA, 326 bp, Gossypium hirsutum
tctgatatatatatatacatggaaagaaaggggagcaaaagtctgatggtaaactataggtaacaaatacatacacataatggaaaagttataactttatagcaaagctttaagcttgaactataagataaaatgaagagcatcagcatttccccccgtcccatctttccccttatactcccacagcttgaacatcgctacaaaatatcccgcctcaaccatcgcttgcctcttcttcaccttgacggtgccggtcgatcactcttgttgatggcctctctcagcaaccacaaccacaaccacaaccacaaccacaaccaccattt

SEQ ID NO: 255330 - DNA, 483 bp, Gossypium hirsutum
cccacgcgtccgtctagatcgcgagcggtcgccctttttttttttttttgttggtcagagctctgacacatcatatccttgaaatcaagaaattccttaattgtagcagaaaaactctgaaaagcctcatccacaagggatgatagcttttgagctacttcttttgactcttgagcttcagaaatcagatcttctacttcctttgacagctcaattacaaaatcgcaatccccattctttcttcccccagattcattgtaggcaagttcttcacgagccactctagtctcctctcgtgcattaagaagctctttgcaaagctcatcaaacttctccctcgcacttatattctgctctgtagcaagttcgacaagacaattcagattttcttggcttgaagacttttctgtttccaatatctcaatcttctcttgaagttgcttgatcacaagaatagcttcagattccctcaacccaatattc

SEQ ID NO: 255331 - DNA, 386 bp, Gossypium hirsutum
aaatatgtcttacaatttttttttcagtaggaaaacgccttcttccattccccttccccttccccttgcaaatcagtgccattgccaggtaccctacccctgccctgaattcctcaagagctgtgcgatttcgaagaacaatgatgagaaattttggtcaaggaccaatgctagggtcggtgttaaagatgctgacaatatggtttcgggtttgagccaaaacttgagtttgtacgtgcagttttaggaccttgagagagaagttctcggacatcttctacagagaactcattttttatatttacaggttgggattcgattttcccgcatttgatttctttgaaatggagtaaataattgagaattactggaacgcatttgatttt

SEQ ID NO: 255332 - DNA, 472 bp, Gossypium hirsutum
aaattttcatccccaagttcccaacccatttgccaccgaagacgccgactagaccacctggtgcatcaccctcgactaacctctctgctgcgccgccgtcgctgtcgtcgtcgctctccactcctaaaaaataacttttgcttacccgctcgttactccctcttcttctcatctgtttttaaagccctatgtatactgattggttgggctactttggtctctcaatgagaacttcacatgctgaggcttagctgtcagcagtagcccaatcttgagaacaatgattaatttgtttatcagtagttaacctagtaaaaagtctcttgaagagccatccatatgtattctttttctttcaataacctctttttccccagattctgtggtcaggtggtacattctttacaaaagcagggaatattcacggaaaatttgagaatactcagcctaaccagacaccttcgcagaactt

SEQ ID NO: 255333 - DNA, 374 bp, Gossypium hirsutum
tcgcccacgcgtccgagctgaccttaagaaggcagttcgccaaagccttgacacttaccaagcacaaagagtacctttgcaagtaaacaaccatattgtctcaccaaatgatgtctccaatgaaggtttgaatgaaactgatgtgtttggtactggcctccagaatgaagttggtgaatataattgttttctgaatgttataatacagtctttatggcacttgagacggtttcgtgatgaattcttgcggagatcgacatcagatcatgttcatgtgggagagccatgtgttgtctgttcactatatgaaattttcattgccctgaacattgcatctactgatgcacggaaagaacctgttgcccctacatcac

SEQ ID NO: 255334 - DNA, 405 bp, Gossypium hirsutum
gttcttgatgcacaagaaattaaaagggaacctggtatttttcctaaggaggatgaaattgtgcctaacgagaatgaaattgtagacatacaagatggcacaaacgatgcagaaccagaggttcatgctaatgaacctgctggtgaatctccactgaagatagcactagacgcaaagagaaaagcttttggtgaaattgaggaagaagaaagtgaagagagtacctgcttggaggagagcattaaggctgcaaatcaaccttcaaccaatagttttgctgattcaagtggcgtaaatgctaaacaaagggtttctattcgtccagaggtgaaagaagctctgggaacattggagaaggccatttcaattgtacggcaatatagatttaatgcccaaagcagatct

SEQ ID NO: 255335 - DNA, 391 bp, Gossypium hirsutum
tcgcccacgcgtccgttttcttattaagttcctttattcagttttagcaaaaactctcagttaacagtggtatttgagccaagttatcaaaaaaaaaggttgtagctttttgtattcaatggcgtctgaaaattttgtgcaactagcaataccttgttttgatagtcattatgatcactagagtatgctaatagagaattttctaagatcaaaatagtattggcaagttgtctcgaatggagtgccaaagtctacattaacaatgtcaaacacaaaaatagaggggatgaagttgaaggatcttaaggccaaaaactacttgtttcaagctattgaatgtttaatcttggagacaattctttgtaaaaataccttcaagcacatttgggac

SEQ ID NO: 255336 - DNA, 465 bp, Gossypium hirsutum
tgcaatcttcctcaagctgtattcttttccctttacgtttctagttaagagttttggctttgcctatttctattctactgtcacttgccctagaaaaaattatcttgctagcaaaagagaaaaaacaagaactttaccaggaaaaacagaaccaaaagaggagcattgtgatgcaacgagtggtgtcatttaattttttgatttgatttgatttgaaattttgttgttgttgggaggatttgtttggtgaccatggtcattggtatgtgccgttcctttcgcgatcgagctctcgaccgatgctatcactgcttcccttgcctctccgatcctgcacggagatcatcgttggttttgaaagtgacattagtgatgctgcatctggtatacgttggcattctcttccttttcgatagtgatttgatagataaaacgaaaaaagaaccctggtacactgctttatat

SEQ ID NO: 255337 - DNA, 456 bp, Gossypium hirsutum
tcgccttgtgttggttaatttatcttcgaatcttttaaccggcgagttgccggcgtgtctgcgagaaaacgtcgaggaaggggttgtttcttatgacgggaactgtttgtccggtgaagaaggaaatcaaaagcctttgagtttctgccataacgaagcgttggccgtcgaagtttcgcctcaaaagttgcggcataaagaacgtaaagccatggctgtgcttgtatcgagtttagtgggagggattgttggattagcggtgatagttggtttgagtttatggggtttttcagagaagaaatagaagggcggccatgaaaggaccttcaacaaggttgataactgagaagctttcgacagtaaatacagtaaagttattatctgatgcaaggtatatattagaaacaatgaagatgggagcaaacctccctacgtatcgtgcctttgctttggaag

SEQ ID NO: 255338 - DNA, 450 bp, Gossypium hirsutum
  unsure (1)..(450): unsure at all n locations
tcggtttctctatttacattagagaatatattactggatttcccttgaatcacattaataaactatatttcctttatttttaaattttaacccagcaaataaagatggctcgccaagttatgctcgtcgtcgcccttgttctcattgccgttgttggggcttatgcggcggatgtgcccaagacctcttcttcttcatcaccttcaacatctcccgcctcatctccctcctcctccattagcactagcagttcccctcctacaccagacggcggtgctctcgctccatcaccatctagtgccgtttctctcaaagcctccagcttcgttggtgctgttaccgctgttgccggactgggactcttttacttctaaggtttaacacgccacatgcatggcccgtggatcaacgctntttatttatttatttatacatatatatgattaaaat

SEQ ID NO: 255339 - DNA, 359 bp, Gossypium hirsutum
atttcttttttatcctttgcttttttttttttaaggattttcgtccgaggcgtcggcgtcaacggcccccaacgcactgtttaacacctcattgagggatttcgcgacggaggaatcggtttttgaggttgcgatcggaggttttttgaggttgaagatgacggcggcgcgtgattttcagtgaaacagaggatgctgtatgtggaaagagtgaagtgaagccatcgtttttgagttgattttgaagaaagctttgtctcgtaaaagatggagaatagttcatattttgttgcatctaagcacaggctcagtacctttttctccctcatattccggtctcctacttcctatcatccatt

SEQ ID NO: 255340 - DNA, 301 bp, Gossypium hirsutum
tgatttatggttagtagcagtggccaaatggccagccagttttacggttactcatgcgcatcaccttccgcctccactctccaccgttatctggactccgacgccgcgtctcagtctcagtctcatttgcttcaacaactccacccctccgctgctgccgctgccgctgctgccgcctcactcatcaaacgcccctctcaagttctctaccatcagaatgttttggatgcccaaaacacacttgggcagattgaagcttggtattctgctagctctttagtcaagcgacctagattggaga

SEQ ID NO: 255341 - DNA, 284 bp, Gossypium hirsutum
gattaatttataattcaacccataatattagagggagagaaatgagggagggagagagggggtaattcacaagggaagaaaagcctgcttccaccgttacaccctctctcacattttcgttaagtttctctttttgtttttgtctttctctctctctttctttatttacatcttagctaccctttttttttaattcaatgctctataaacgaaaattttgaaggtgggtttttggttcttggttttgaatttggtgatctgtgtttttttttgtgcgtgggaat

SEQ ID NO: 255342 - DNA, 487 bp, Gossypium hirsutum
cctacgcgtccgcggacgcgtgggtttgactcgtaggattaaataaaagaaacttctgcaatgcaaacgtctcagaaacataaaattacaggcaagtgcattgactggcccgtgcaagagctggagtcctattgttggcctcccaaccagagcttagagccataccagtcaggttctgatgatggcagcaatagtgtgcaacattcagttcctaacctgttactcgcgtaaatgctgttgctccaggttttgttcctaccaactttgcagcatacatcacaaaagatgagggtgtgaaggcggctaacgaggaaaagaccttacttggaaggcttggtaccccaaaagacatggctgctgcagctgctttcttggcatccgatgatgcttgttatattacaggggaaactctaatagtggcagggggattgccctctagactctaaggatactttttttactagctaataagtccttcacttgcggg

SEQ ID NO: 255343 - DNA, 331 bp, Gossypium hirsutum
tcgcctacgcgtccgcccacgcgtccgctttgatttctccttcgtagtcaccactcatcaccactatttccattactggaaacaaaaagagtccccccttccctctccaattcctttaaaaaccagtaaaaaaaaaaattttcctacatcctcaaccgtagcccatagatatataaaacaaacatatattcttctgaaccaaaaatatctataaatacccaatgcttcttttttaaatacagttgggactgtacaaagggggagagagagccagctttgtgaggaagaaaaacaaaaacccaaatgcataataataatataccctttgctt

SEQ ID NO: 255344 - DNA, 383 bp, Gossypium hirsutum
tcgccctcgcgtccggttctgcaagattttgcgagcagtggcctctcttttacagtcagctactttattattcatattctccattacattgattcttgtcccaaacagacacgctattcccttcatcgtattgcacggtaatgttcttatctcaatatcttttctttttaattttaattgcctattgggtttgaattaatcaaagtttctcactttcacttgttatgttgggtcaattgttgatttccatggaaatgggaaccatgtttttggagaaaccaatgaaccgcaatgattgtttgcttggtgggggtattgaaacctttcatatgctatgaagctccattagtaattgtagaacatggtgataaacaaaatgatta

SEQ ID NO: 255345 - DNA, 381 bp, Gossypium hirsutum
agattttattatggtatgccatctttcacttatatgcatgatgtagagggagagaaatatgtttttggttgagacagtaagacttcttttcctgtctgtgtattgatgaagagaatctaagttgctacatctttctatcgtcatgtctcggtctgtcaacaactgaagctgctgaagaaaaggattaaggacatgttatcttttgaattgttgaaatttatatcaaatgatataaatttcaagcattaaaggtttctacaaccatcagtattatgatttgataccgagcatgtgaggtactgtgcttttctttgagcctatcaagccaaaccatttgtgaagcttaatttaagcataatgggcggaaaattttgaactttt

SEQ ID NO: 255346 - DNA, 242 bp, Gossypium hirsutum
tttgatttgttcgaaatctatgaatccgttatggatgggtttgaataacctgacgtggggttggagttggttagaacgatggatggcagcttgaccatgggaaggacatggagtgacaggaaaggaaccgaacaacgaccagtcattggtatagagtgcacatttcgaaggagaaatcagcaaagcttacgctcgttaccaactcaatttggataataaacaatccccgaaatcgagccaaa

SEQ ID NO: 255347 - DNA, 352 bp, Gossypium hirsutum
ccttcgcgttcgcccacgcgtccggtggatttagggggagggtaatagtgccaagggccaattacaatgagaaggataagacttttgtctatcaagaggaagggatggcagtgtttaagttgtatgcagtgcattcccgtcaaatctccgctcagcccctcggctaccacaacattagccctgagcctcacattttctctcagttctacactttcaacgccgactcccattccctcatgatccgctgcatccgcgagcatcgcttggccactcccgctgagatccgagccgctacgccgcgttccgtcctcaaatcgtggcgggccgtgtggaaggacccgaacgaggacac

SEQ ID NO: 255348 - DNA, 402 bp, Gossypium hirsutum
tcgcttttgtcacttattgtatcactttcgtccaagagctgagattaggagagactatgggaatcaaccatttcatccttgcacttatctccctcacctgtctcttctccttctcaacctctaccgatgcacctccacccctttttgatgcttctggctccgcttctttgaaactttatgatatgattgagatcatgtcagaatcaccatctccatttgcattcgatggtacaatattggaaagtattgaggatgtgttaagcatactacctggaggtgttgaccctgcccttcaggaaatttgtgggaacactgaccaccccgtcgaatgtataaaagcaactatgccattcctagatgagaaagctcctattaagcctttttctgtccttaaagctgggg

SEQ ID NO: 255349 - DNA, 362 bp, Gossypium hirsutum
tttcttttcctactacaattcttttcttcgatccttcttagcttgaagttggggtcttagctgcttctttttaggtttctgggtaatttgttaataaagttgcaacctatataatattattattattctaatggggtcttaatgatttttactgtgttgggaatattcaattcaatacatttttttggttgtcctttctgggttttggataatgttcattggtattcttggagaacgtctttgatccttgtctcagtttcgctaccatctttaatttaattctacagaaatatttggtttttttttttttgaagttttcattgaaagaaaaatgaagggttctactctgtttcaagtattag

SEQ ID NO: 255350 - DNA, 341 bp, Gossypium hirsutum
ctcttcctgcgcttgctggagcaactcggtccacagctcttatactcgattttcgccagcgtttgcatgatggctgtgatctttgttaaaaagaacgtaatggagaccaaaggaaaatcacttcaagaaatagagattgctcttctcccaccagaatagagttggtacattatctcccaaatttattttttgcaattcaattttttatcttacttttatagagctaagaataataaccaataaccaccacacgtgtcagtacatgtgagtgtgacgatgtcagtacatgtgagtgtagataattccttctgacttgatcaaatgaatttatatatgcagat

SEQ ID NO: 255351 - DNA, 422 bp, Gossypium hirsutum
gatgaactctacaaatggcagaaacaggaggaaaatgccttcaattccaaaaatgcactttctccgtccaaatggcccagacccttggcatgcttcgataagagatgcttctgttaaaatatttccttaagctaacatttccttctatttatttctaacccattcaatttatggtatacgaaagatgtaaaagtgtgttccaacacactaactagacttgtagttgtatgttcgatctgtcgagaagtgtgtgtgagagggaaaagatggggattctattagtagcatctagtcagcttacctggtcatttggatggtagtatctttagactgtcttgtttatgatttgtctgtttatataatatgattgagccattttttgcatttgaaatgtagtcaacatgactgatcgtataagatat

SEQ ID NO: 255352 - DNA, 441 bp, Gossypium hirsutum
gctcaatgctttttgtgaaaagcacagtgtggaacagagagcaaaggctgaaactcagaagcatggagttgaagagttgaaaaacatgaagcaaattcgggttaaactggagaggttacgccttctttgtgatagaatcatcaaacgtgaaaaattgaagcgggagttggttgtttgctcgcatgaaatacttgcacgcaaaagagatcatgttactcgttcactgctttttcatagtccttttcatccagatgttagcttagaatcggcaacaacttccctcaaaggtcacacggatggttacagatcatgcagtgaatcgatgagatcagatgatataactgtagatagtactctttcagttaaacaccaaataaagattcctgtgtccgtggaaaatgatcaaaggactgatgatagttccacatcacagagcccttt

SEQ ID NO: 255353 - DNA, 434 bp, Gossypium hirsutum
  unsure (1)..(434): unsure at all n locations
tcgctttgaacccagatcattgatgaaatcttgcaatcttttaaatctattcggcctcggtcccgcccccggattgtgtatgatcttcttctttcctacacccttcagagttccgacccaatccctctttcacttgccgtgctgcaatgcactcttcgttctggctgtctccctgctccccaaataaaactcctcctatctgaagcgtggcttaacttccgtggccattcacagccggtgtcagacagccttctggagatgcaagacattgggtttttccctgactctatgacatgtaattaccttatatcttctctttgtgctngtgatcagttggaggaggcagctaaaatcttgaagggtatgagcggagctggctgccctcctgatctggagagttttgctggtttaattactgcaatgtgcacatttag

SEQ ID NO: 255354 - DNA, 459 bp, Gossypium hirsutum
cccacgcgtccggcaggtactctagcttccggtctcccggttgactcttttgtcacacttcaactgctagctccacttccaatatttctcggtggtctacctctattagcagcactagtttgtctggcactctaaaatttttcttcttcaacactttttgggaaatccttaatataatgttctcgggaaccacatttgaaacaagcctggctaatcgtccaacactccctgaaatgttgtttaccacagtactgacactcgagtctattagatctcacattacctacattcgccattgaagtagcttgagctttaaaaccctaatatgatctcccacaatcccgatacgagtgtccagttgaaacagtcaaccgaggattcatttctttagacttctttgactgagattggaatgacttactcattggcctctttcttgcgtcactggctacattcaca

SEQ ID NO: 255355 - DNA, 462 bp, Gossypium hirsutum
cagagcacgtccagttccacattccactacttcccaaagctgattgtgaatttctcattccatcaaaacactcgaaaaattggtccacgctataaagaggcaagaaactcaacaggttagaagaatcgcatttgaaaagattacaatgcataatcttaggaggtaagtttcagcattaaattctccctcattcatattttatactcagtaatagtcgatgcagaaccattgaagcaatttttagaaaatgttctttaatattcgaattagaaatgcttaagatttcttttttatgaacagagataacatgcgaaacaatgacagtaaatactacacgcaagctagacggggcttttttctttggtattctctaaattttggtactcgtagatatgatatataaggtttctgaataaaatcttagaagcttatgatattagttcctttcagaaaaactctaca

SEQ ID NO: 255356 - DNA, 388 bp, Gossypium hirsutum
ccttcgcttccgtctcatctccttccttcaatctccagctttttttttttcactttttatttttggctgaaaaaaaacaatgaattgaaaggtgtttcagcttttcctctttgaactttagctgaaaggaaaaacatatttttacttcattcattcaaattcccacacaaaaaggggaaaaacccagaaattttaagccatgaaacagttacacaagcaatcaagcattaaccataggcgagatgaagagatcttaatacctcaaacacctccttactcacccaaatccttaaaacaccccagatctctccctagatccattaactatctcttcaaagaacaacgccttttgttcatcttcatcggcattttaatcggttctactttc

SEQ ID NO: 255357 - DNA, 431 bp, Gossypium hirsutum
tctctttcacatttgtcaaggacagtggaagacatattgaagagaacaagcttaaggttgcccttgtcagcccttctgattcgccagtgctatcaccaattaatgggacaatgaatcagggaatggattatgatagagttgagacttttgcaacacttccaacggttgtgacgattgaggaatcaaagatgagaaatactgaggatttgaagccaacaaaggatgcagagtggaattcaaggaaagatatgttatatgaggagaaattaaaaccaaagaaggatgcagagctgaagcccatgaatgatatatttggtgacaatttaaatataataaaagacactgaactgaagccaaagacggatgcagagctgaagccaatgaatgatatttttggtgacaatttaaatataataaaagacactgaactg

SEQ ID NO: 255358 - DNA, 476 bp, Gossypium hirsutum
tcgtctctttcttcctcttgcaataatcaaacaatttttgccttgatttcagtttgaaccatcaatggcggaagcagttgtgttggacttggcctattcgatcataggcaaattcagctcccttactctccctgaaactgaaccgtggttgaatgtcaaagatgacctcgacgacatcagaaacgccgtctctgcaatcaaagctaagcttctggacgccttagtgcgatctgcgaccagcaatttcacagcttggcttaaaaagctggaagatgcactttgcgatgccaggaacttgctcgaggagttatctttcgaagtttggagggaaaaccttttctgttccggttggccaatcagttttgctattgccgatatgtgcgctcgaattcaggccattaagaagaggttaacttctcttgaaagtgagttcaaaatccctttcatggctggaacgaggcaacaagggaactttt

SEQ ID NO: 255359 - DNA, 389 bp, Gossypium hirsutum
tcgcctacgcgtccgcccacgcgtccgcccacgcgtccgcccacgcgtccgcccacgcgtccgcccacgcgtccgcccacgcgtccgtgaattaataattaaattaaagagtgaaattcattagtttatggaagaagaagaagaatcggaatcggaatcggaatcggaatcggaatcggaaagggaagggagaagccaaaagatcgaaacagaaacttcaagctttgaactaacttccatgttcacttgatccaaagaaaagaaaaaagattttgtaagtgatcaaagttttcaatgggaaaaggccccttctcgttccggcgcccttctattaggcgccgccgtccgaaatctacggcggtacctcaatcgccaaagccgataccgac

SEQ ID NO: 255360 - DNA, 410 bp, Gossypium hirsutum
tcgaattgtcacaaagacaaccttgtaagaaattttaacctttgtaggaaacaaatgaactctcccctgcaacgcatgccacaaattagatttagagggctaatcatttatttcatcataaccatgactttactttacatttcatactcaaatctcctgttcagcaagaaagaccggaaatcctcggatataactattgtctccaacaaaattgaagcgccaccctttaaccattcctccaacaccacctcttcccatgtccaaaacccagcagaccaaaagcgaccaaaccttgttgaaccacctcctaggagatacctacgatacgatactcatctcaaacacattgccttcgggatagcatcgtcttcgaatttgtgggagatcagaaaagagtacattaaaacatg

SEQ ID NO: 255361 - DNA, 387 bp, Gossypium hirsutum
aaataattttatgtatttagctgctattgcggatgcgcaaccgcaatcgatgccaacaatgcctcctcagatggcaccacatcctgcaattccaaccggaggatattttatgcaacatcctcaggctgctgcaatggcacaacaacctggcatgtaccctcaaaaggtgccattgcaattcaataacccacatcaaatgcaagaccctcagcatctcctgcaccaacagcatcagcaagccatgcaaggtcaaatgggaatcaggcctggaggacccaataatggcatgcatcccatgcattccgaggccagtcttggaggtggctgcagtgctggcccccctcaatcttcaggcccaagtgatggacgtgctggaaacaagcaaaa

SEQ ID NO: 255362 - DNA, 169 bp, Gossypium hirsutum
tttatttaagaatcaaatatgctggaagacaatcttggaggcttgaaatgtgcattggattctattgcatctcaagttggttcttctatgttatttcattttgaaataaatttggaagtcaaacttcaacagttagctttttcacttttttgttgtaggagagagaaga

SEQ ID NO: 255363 - DNA, 407 bp, Gossypium hirsutum
catttcttaaaaacagtagaatcatttttctctcgggttgcttcatttgctctgtgactttccccagattttataaaatcttacgatttcttttcatctaccaaaaaagtagtacagaaaaaaaggatagaattcttttctttttcttttttttttcccgggaaactgaaatcagtttcaggtcttttttccttcacgttttctatttttttttctgttagtaaggcaatcaagaagttcgttctttcaattctcgagagagaagcataaacttatttcttgcatattttcagttgaagaggagaaggtgatttttctcgtgatttagagccattttaaatacagtttcagtttccatcagatccttttcagttcttctcaattatctttccattcaggtccttttg

SEQ ID NO: 255364 - DNA, 378 bp, Gossypium hirsutum
tcgaaataataaaaaaaaatctcttaggtgctctgctagggtttaatccctagcgtcctcgcaccatccttagcagcgcgccgcaacccgatcgtcgtctcagcctccgaccgtgacggagggagactcggtgaagcaggtaagtggtctcttccttttttatttttttcgcaatataaaaacccaaatcaaaaaaaaagatctaaaataactccaataatcaccttaaaaaaataaataagcaactcgctcttcaattgatttttctctgtattttccgtatttctccgtccttattttgcagattaaatggccttttataggccgaaaagagaaaataaaatatataatatatatattttgcttgtttttttcttt

SEQ ID NO: 255365 - DNA, 160 bp, Gossypium hirsutum
ttcacgctttcgcattaccatcccccttttggagacctcagccactccgatctccgcccatggctgcagccctcgagtgctggtccagccgagccaccaccgccgatgacgacatggtcgagcaggttttgatgcgctccaacgaccgatccgaggacac

SEQ ID NO: 255366 - DNA, 213 bp, Gossypium hirsutum
ctcacgcgtccgatcaagcctgcccatgagtctcacacaccaccaatagtattttgcgctatttttcacacgtcggaacatgacgcccacctcgtcaaaattctgacttctgcttgctgttaccggtcttgtagccatattttctacaaccctatacttcactgagtccaaatagtgtagattcaaaagtcacctttttttaactaatatatt

SEQ ID NO: 255367 - DNA, 395 bp, Gossypium hirsutum
ttatttttaattttccttgttcacttaaccgtgtttagagcttttttttcattttttgagggtttttttttgtttttctttacattatttgcttcttcaccttttttatttcaacttctgttctccaccatcattttaagggtaagtaacttttcctttcttatcttcttctttttgctatgtctttttctttttcaatggcctttgatgatgcttaaacatcttttgagatttctaagtcaccgatgatcgagaatcatgggggagagccaagcaccacaagcggtggtggtcaaaaacaaggtaacccttcaaggaaaaaatggatttatactacccacaaagtctttgaatgcaccaccacgtctaatgagtcaacaagcttactttagagt

SEQ ID NO: 255368 - DNA, 303 bp, Gossypium hirsutum
ttcttatcttcgaccattgatcttctatattctggctgctcttgcaatattcatgcttatttctccctcccattcctctttagataatgttaatgacagggttactttgtcactgtactatgaaacaagtttatgccagcattgtgcctcctttatctccaatgaccttgtcaaggtcttccacactgacctccataccattatcaatctaagattggtcccttggggcaatgttgaaatccattgccagcatggagaagaagaatgctacttaaacactatacatagctgtgtcatccattt

SEQ ID NO: 255369 - DNA, 423 bp, Gossypium hirsutum
ttagagctcgagcatggaacgtgtttatgcattactggtcaaactgctcagaaatggggttgactaaattctttgaaatgttccaatatttagcaggtcagtctgcaaagctcaatcaagctgtcaagcaagtcaatcatgtcgatcaagtccataagaaatctgatgatcgaagtctaaacgttccaccgccaccgtctccaaatggtttacggagtccgatggcgaggaacaaggcttggagttcagcagcgataaaccgagtcaactcacccaggttcagtcaatcccaagaggacaccagcccagcggagtacgagttcgacaacgatgatgactcgattccctattccccatgtaactctaggctccaacaggctcgtctcaagctccgccgcaccaaaacacataattaatttaatt

SEQ ID NO: 255370 - DNA, 413 bp, Gossypium hirsutum
catgagctgtgaagcagcagccaacctttgttgctgagcggatttagatctaagtaactcatgggttctgcttcttttccttactccccaaagggcatgaattcgttccttcaacagcaacaaaatgatactcagagggctgcagccgctgctgctttaatgatgggtgatgatatgaacaagtttaaccgttccaggcttgaaagaaacgggttttcaatgaacggtgaagcaggcatggttaacccagcttcaagacagatctacttgactttcccagctgatagcactttcagagaggaggatgtgtcaaattacttcagtatatatggtccggttcaagatgtgaggataccataccagcagaagagaatgtttggatttgtcacttttgtttatcctgagaccgtgaa

SEQ ID NO: 255371 - DNA, 273 bp, Gossypium hirsutum
ttcacgctgtcgaagaaactgattatcaaaaagatcttatatattgccttgtttctttctttgtgcaagggggtcagcaaaaatggcaacaagtgggacctaatctggatcaaaaccaccatctatctacccaactatggaatatgatgatggcaatctcataatcaacccttaatttgatcatcatcatcatgatcatctgctggagtacgattaggaggatgtatggaacaattcaaaagatcaatcaacaaccaacttagaagccaaaaa

SEQ ID NO: 255372 - DNA, 296 bp, Gossypium hirsutum
tttccgtttttgttctttctttctccactaactcaatacttacaaacagcatggaaccacctttaactgaagagatgcaaggttgagggatgacttttgaggcattgaagtttgaatgatctcttaagttcttccactttcttgataactatatgaaattggatgctggattggatggcttgggtgagttggtaagaaacctcattgcaagtaaattatgtttgcagaaacttgctgcaatgctttttatcatcgattgtgagaggatgaaacttctatttattggtggaagggaa

SEQ ID NO: 255373 - DNA, 262 bp, Gossypium hirsutum
ttgacgcgtgggaaaattttctttcactttcccaagaaaacaaccaaaaatcccagaaacctctaaaaactcccccaacccatgccctctcctctgggatcaccgacaagctcccggtctgtaacccagaccgtcaatggctcccaccgtttcacgatcaaagggtattccttagccaaacgttccctgaagcttttagagattgctctacatgatttcaaggctcaactagaggaagacccaattgttcacaggcaccttt

SEQ ID NO: 255374 - DNA, 326 bp, Gossypium hirsutum
gttcgttatataaaggttttaaagtatttcaaggatttggcatgtatggagactcgtttaattgttattaagttgctaggaattagcttaaaatactgacctatgttatttgaaggtctctattgtataaagtcatttaatgtagatagtcttgattatgttattaattaaatgatgcaatttttgaatgtgcatgcttgcctatgtgtgtggttgaattaaagcatgatatgggcttgtaagctctttttaagggacatcttgaatgtgtttgaaaaagttttaaattaaagtgaaattatgaatacgattttatacgatgatta

SEQ ID NO: 255375 - DNA, 303 bp, Gossypium hirsutum
tcgttcacgcgtccgcccatatcgaaacacccacctcgtatttcccgtccgccgccctttcttcttcttcttcttcttcttcttcttcttcttctttgcaagtgattttgagtgaactgattttaatttttgggtgttttaattgttttgaagagattccctcaaagatgagactgttgaaagtcgccacctgtaatttgaaccaatgggcgatggattttgattgcaatttgaagcacattaaggattccataacaagggcaaaagaagttggtgctgtcatcaggctcggacccgagcttg

SEQ ID NO: 255376 - DNA, 378 bp, Gossypium hirsutum
atttcccatacgaaaaataaaattatattatcaatcattaatttttatctttcagttttagcctataaaaaaaaaacaaaaccatgaatgaatctgattatacatacagttcaatcccaaacgatgtagctctcaaaattgcttcttcccttgaggtgactgatctttcctgcttgagttgttgttctcgggtctggagggatttatggggctccgattgtttatgggaacccttatttaaacaaagatggcctcttttatatgaagatgtcttgaaagaccccgacttcaagggttggaggggattttacataaagcagcacaaggagatgaaggatcaagctgattcggttgttaaatttgtagaaaaatgtttgc

SEQ ID NO: 255377 - DNA, 353 bp, Gossypium hirsutum
cggttgttttactcaaggttacaaacctccaactcttaacgagcttcaaaatctgaatcggttaaaagccagaaaattctacggcaacaagaagaaattcaataacagcaacaaccggtttgctccttacgctccgcggaatacgacttcgtttataatccgagcgaaaaagtcaggtggaatagcatctttagtgtcgccatgtcctgtgactcccgccgttcttactacgccaatattttcaccatcgagggaggttttgggtgatatggccaaggaagaatggggtgtggatggttatgggtcgatgaaagggctgattcggcttcgatcaccataagctggtcatgatg

SEQ ID NO: 255378 - DNA, 137 bp, Gossypium hirsutum
tattcgaacagcactatgatcgattgttggaatcatattactccttggaaaaaaaatacataaaggccatacctgatagctggagttgcattagccaaatggaggaacttaaatagactgcatgacaggaatgaaac

SEQ ID NO: 255379 - DNA, 222 bp, Gossypium hirsutum
gagaaattttggacgtataagagtcctcagagaaggagagagagaatattgtggtatttgcataaccaatatacgttttattgcaggagatgtgaaatttgcaagcaaaaatgacatcttccagtgggtaaagcattggtttaaggttggtactttggttgtcttctactggctcttgttgcagagctttactatttgctttggtggaagaagagaattacc

SEQ ID NO: 255380 - DNA, 325 bp, Gossypium hirsutum
cgtttctcttgggtcttactccagctattagtctgctagttgattttgctgctgtgtctgaaagctcgccctgtcttttgctcaccatatcccctcagttttagatgtttctaccacctgataaaatccttcactttatccaccagcacctgtagatcctcgaccgtgatgtgcatcattgagcatgtggccctttttaaggtcacaggtgacacagaacaggaaaaggtcaacgcgatgcttaatcacctcaatggtatggtctctctggatcctgtcctgcacctcactgctggtaccgaccattgtatcaaatctcctatct

SEQ ID NO: 255381 - DNA, 195 bp, Gossypium hirsutum
caaatagaaaatccttcttcacttcattgtaatcaaaaggcagcaatttcgcattcttctgaggatacccatttctccaacattcgaaacaacatcttttttttttttgtgggggggggggtgtttgttcttgtatgtgtgtttcctctgatacagaaatgggggttccggtgatcaaattatcaatctttatgg

SEQ ID NO: 255382 - DNA, 409 bp, Gossypium hirsutum
atttgggtataaagcaaaagaagaagaaattgagttctccaatgctgccagtggtggtgatccagttcaaaatggtgctgctctggcatcattaccaaggactggtcactcgccgtctaccaagatggctctgctgctgttgggagaagtggtggcaatctctctcttgatgccttagccaaagctaaaaaggctttacaaatgcagaaagatttagcagagaaactgaagaagatacctttgttgaataaaggcacaggctccagttcagtggcgactagtgtaacagttcagggaccagtctcatcagtgactacagcaattgcaagtggtccatcaagctcgtcagtgctttcttgtacctctgcatcagcagcttctatgaagccaccagctggtggggtggctg

SEQ ID NO: 255383 - DNA, 394 bp, Gossypium hirsutum
ccctcgcgtccgtttccttgttcaagcccttatttttgtctgtgtgtgtgttttttttctttctctgatcctcctatattgtacattcccgtagcaccaaccagcaaataattactattggatgtgaactttctgatatatccatgaagtagcgggactcaatgtttcaaaacacatgatctttctgcaaaatgtttggtggtgcttacaagtctcagattattggaggttggacgatttagactctccagtgtcaatggcgtcaggtaccggaggaatgaacaaaggtggatttaatgtacagggctacaaatacagtggtccaggaaagaagaatgcatcaaagaaatcatttaatatagggatgatgaaaggaccagaaggactactaaca

SEQ ID NO: 255384 - DNA, 474 bp, Gossypium hirsutum
tttgacgcgtgggcggacgcgtgggcggacgcgtgggtagctattaagatttggaactaaagagggaataagaaaaggaggggaaacgcgtcataagtcagcaactacttaaaacaccccaaaacaacaattgaaattctcaaactagttgaagaaatcccaacactcgaagaatcaaatacccttccaaacacacgcattcatataatatgcccaaccataacagcagaaaaccaagttgcaaatcaatctttaaggaataatttcaagttttcaggtctccagttatagtaaaaggggggggggtgggattcaatcaaagcaaatcaagttcgaagataaaaaaaaaaagtaaaaagggggctttacgaagagagaattctaccggaaaaataaaagaatcaagccttggtagacctggaaagtcgctccaaagaaaattcgtgcaatttatagagacagaaatgggttttc

SEQ ID NO: 255385 - DNA, 484 bp, Gossypium hirsutum
accttttctgttactttccctcaaaatggtggaaattttgagaagagaacaagtaagtttaaagttttatgctttgcttggcaatccttaagcaagctaaagtgcaaatcatctggaaaaaagaacgaagaaaaagttggaacattgctaagaggcatgaagagagagaaagaaagagagatttatagtgatatttcctaaaaccccaaaccaaaacacatagctgtcgtttatgcctcatggtgaatgccatgtgggcgtcatgtcgttgtccctgccctttcctctacatgctttcttttatttatctcttgttttctctctcttgcatctttggtctgatcggaaattctgtatcagattagatcagatcaccttacctcttttttttggataagagttctgcataaagacccaacttttatttctagggaacacaaatgaaaggaatttttttctttctttcttttagaggtggaatgat

SEQ ID NO: 255386 - DNA, 495 bp, Gossypium hirsutum
tcctcgcgtccggtttttttggtcaaggaatcaacatccaagaaacgcgttaaagaaagtggaagaacactgtctatgaactggaaggattttgagtgaaagatccaaaagaaaaaaaaaaacaacaaaagatctaatgatcatttccacccaagagagcagaaaatctgaagatcttcaagaatttccctctgctttcacaattcctctcaccttcatttccattccttcaagaacagaatcaacagaaaggctgaaactttcaagaaataaggagtctcagaacacccaaagtttggatcttaatggcatggccctctcattcccacctttcctcaaatccacccttctttgcttgacactcctttcatctattctcttcttcttcttcctccaagccccacgaaaacccccacgaatccctcaaagatccctcctttcaacttcctgttattctcgacattcttctgatagtaccctcattaactacctttc

SEQ ID NO: 255387 - DNA, 182 bp, Gossypium hirsutum
agagtatgtaggatttcatacgcaagtaagacattatctgaaactcaaaagggtggggaaaaaaggattcatgcctatcaaactcgttatgagtaaagcatactatctagttgaatggtgctttgaggaatgggtaatgaatccttttttccccaccctattgagttatacagtatgttgga

SEQ ID NO: 255388 - DNA, 413 bp, Gossypium hirsutum
ctccctctctctctttctcttctctttctgaatttccaaaatcggatcaaatcctaattgtccaaattctcatcgttttaatccaaatcagatcacatttcaattcacatataggcgctgataatcgttattcgatctttgttcattttctcactgtatctacagataaattgataggcattttgggggataaggaaccgtaaaacttacatttaatcctaatggcgtgtataaaaggggtgaacagatcgtcgtcagtggcactggcgccggacgcgccctacatggctgctgggacgatggccggagcggtggatctatgcttcagttcatcggcgaatctcgagatcttcaagtttgatttccagagtgacgatctcgagctccccgttataggcgagtgcccaagctca

SEQ ID NO: 255389 - DNA, 484 bp, Gossypium hirsutum
tccttccatagctctttccagcgaaaaccctgaacgcgttttagagagggaaagagaagggactgttactgtttgttactgtattccaatatgttgtccagcttccttaatggcgtcctgattgttggtattcagagagaagacgaactctctgaatttcttagtctcttttttttttctaaaattttaaaattctgtttatattgtttggacctgttagaaagagaaagagacggcgaggaaagacaggcgagagagaaaaagaaaattagaagtcgttttctgagtttgagttgactggctgtatcggtgtatgatttgtcgcgtttctttcattcgggttcatggctctactcgtatttagaagcggtaaacggtttcatggaaatcttaaatggcttagaggagttgcgagtttcgacaaggaaaagccatctttcagataaatttcttgataggcaactttccacagacggttgtcttg

SEQ ID NO: 255390 - DNA, 417 bp, Gossypium hirsutum
gtgtctttgcgcttatcatcggatctgggttcttcttctttcttcacaagttggttctttcagcattgggagaagctgatcaaataaactttgatggctcatggggataaagatttaaaacttgacattgaaaatgaaccgatcactggtgaagaagaagaataccaaaaccgaaaccctattttaggccttaaaaacatggcagaactgctgcttgctaaggctagaggcagtttcacccaagggtcgtcggacgatggagtgtctctgtctagtgatgcttcgaattcaggtagtgtttatgcaaagaacatgcaggcaatgacgagcatgaatgttgtgggacatgatcataatatcaaagatgatggtaaagagaataaattagtgaaggagaaatgtaaaagtttgagcaat

SEQ ID NO: 255391 - DNA, 394 bp, Gossypium hirsutum
cccacgcgtccgccgagttgctccagattattatagatagaagctagcaattcgacatcatccccaggaactaacgtgttgattgcgtcataggatctcatccctggtggcaagaccacatcattctcagtgaacagcggagttatcactttttcactcagctgttccttaattgtgtttgcgactgatctatttactcgatcctggtagttctctgttgctaaatttcgcagcctggcgactctccaactggctattattaaaataaacgacggtaaggcaaggccggaaataaaatcaattagatagttaagaacttgatctgacatgttgcattctactcgaatgtaagagaaattcaaatgttataactagcatgaaagtcgatctatta

SEQ ID NO: 255392 - DNA, 465 bp, Gossypium hirsutum
tatttcttgaacatttctcaatgtcaattcaaacaattaatcaatcttcataagcacatataagattaagtgaggtaacaatatatttctatattgaaacaatttaatcacaataatcttgcaagttatgtaaggctaatgtaccatttaataccgccgctaatttatccttcagctaccttaaaagattaaacattcaccaattaaatatcatgtcaattaattacaatttcaatatgtttaataattaattaattcattaccttacactttataatgcatgtagaacataagcatgattttatttaattgaacaacttaccaatgcctataacaacataaatatgattttaataatttaagtggacagaatgaaatcaatataacatgaattaaatttaagtcattttaattagaagaacaacaacgcataaattattcatattcagaatcacaacatgaaca

SEQ ID NO: 255393 - DNA, 447 bp, Gossypium hirsutum
gattcagtctgttgcttctgaagttacagctgacgactgtgatggtaaaagtattgactggtggcgtggagggaagttgtcaacccatgtgttccagaaagcaattttgcctgcctcaatggttagaaaagctgcacaacaaggtggtgtgagaaagatttctggtattaattatgttgatgattttgagattcctaaaagaagcagacaattaatttggagagctgcagtaaaaaggagtaagaatgcagcgcagcttgcacttcaggttagatacctagatcttcatgtgagatggaatgatcttgttcgtcctgagcataacatctcagatggaaaaggttcggagacagaagcatatgtttttagaaatgcaattatatgtgataagaaaactgtagaaagcaagatccaatatggagttgcttttggaaatcaaaagcacct

SEQ ID NO: 255394 - DNA, 460 bp, Gossypium hirsutum
ttcttatcttttgttgctcaatcgacccccaagtgctcctctcagcactaatttgccaccacgagcaacgatctgcgcatccgagccctaaaggaggggttttcgcctttgaaacccccattcagacttcgatttcgacgaagtaaagggggaatgacggctagcctctcaaggtaagctcctctttcattttatattattatacacgagaatatgtgcgcaaaaactaggaagaaaagaacagattcaaaaagagaagatgaatgaagctctcgaaaatcacctttcttttctttttcttttgtattcaatctgccaatattgtatatgtatttgcgtattgcctgttgtgcgtttgtgttgcgtaaaaaactcacctaggctattacatggcctttatagccgaaaagaaagaaaaatcaaaaaatgaaaattctatttttcttcttccctattcgct

SEQ ID NO: 255395 - DNA, 167 bp, Gossypium hirsutum
tgtctttcaccatggaatcccgctctttaatacagatggtcatgatggcaagctcacgtactggtatagatacaccgtctccgtcaccacaaccaccgccacccttcttttcatcatcatcaccaccaccactttctctgtctgataacaccactagcattactatt

SEQ ID NO: 255396 - DNA, 362 bp, Gossypium hirsutum
tgtgttcatggaggaagaaatctgtgaagagcctaaaacctctgaaattatgattgttgagtgtgttgaaactgctacaaacatgccatacatttttagtgctcatgaaagcgtcaaacaggatccatgccttctaactgttgatacatccgatgggtattgtcttgccatacttaagtcttcaacaccatgtgtctcacctatagtgaatcagactacgaagagtctgaggacatcatcaatgtactctgcttcacagaaagatcttagggatgataaaccagaaactatgcgggtcacaccaaccgaacatttagcagctagcctgcaccgtggtcttgagattattgatagtcaccgac

SEQ ID NO: 255397 - DNA, 465 bp, Gossypium hirsutum
cttactcgtccgcccacgcgtccgctcatattaagttttcagagaaaattattattaagtattattgcctttctcgtggcttgctaaacacttgaattttgaaacataaggcaatcacttgccaaaatgagggcagctaggaggatgacttgaagacatctagatgattttatcataaagatgaggaagagagccactatgtgaagctgcaaggagcagccgcagataaccccttgcagtttgtgaacatagaccgaattatcaatttattgccaattgacccagaaagtgaacgtacttttaggcaaagaagaagggaatggttagcccaaagacaagttgaagaaatgaatcaaaacccaagaaaagacacaacttgtaataatcaggatccgatccttgttgctgatggcagagatcgattgattaggtagtatactgtgcctttatttagtgaactcaatc

SEQ ID NO: 255398 - DNA, 441 bp, Gossypium hirsutum
cagatttatgtacggatctagcaccaaataggaacccaatcgattctattagaaaaagtaaatataattgaaatttacaaaaaaaaagaaagtatttttagaaaaagcataccaggtgaacaggagctttgatgtgtttaacgagcgaagagctgcactgattttctttaacctcgagttcgtggtacctcttgatgaactcttctgccctcttgctaaacccgttcccgttcatggtgatataatcattggtcaccatcgaagtaaccttagcaaaaaccgtggcccgaggaagagaagaggaaaaagccggtccaaaagctgacgccgggtgctagcgggtccggttatcggagagtcctagaaaggtccgaaacaaaacgccatcgccaggctgttttttttataggtccaaggattttttggactgatgcagtgaaa

SEQ ID NO: 255399 - DNA, 136 bp, Gossypium hirsutum
tttcttacgcgtgcgaggacgcatgggattgtgcaggtgatggaggacagaagtcagcaggccaatcaaaggctgaagagtctctcactgcatatctttctgcagagatccctgctgagaacccaccaacgtcttt

SEQ ID NO: 255400 - DNA, 388 bp, Gossypium hirsutum
tcgcaatattttgatagtgtgaaccaagctctaatgttccttgatccccaagctagcttggcaacactataaggaatggaaagaaaatgggactaagctttaaagcttagtaagtttgcatgcatataataagcaacatatatcattcattaatcatgtaactactcaacataagttaacataaatattatcatgtatcttaggcataacttcctcattagcattcttactaagagttcatctcatacaaaagttcacactcatgagttatagacacatacatgtaccaacacgtaacatagtcacatacttcgtcatctttgacatactcttcggattaaccgttaaacacttggaatactatcggatacatagggctcagaccact

SEQ ID NO: 255401 - DNA, 290 bp, Gossypium hirsutum
tcgcaataatctttttttctttttgcttagcggttgagacttggaaaataagcaatttttaccagtcttctcaccgctgtggctataattccctcgctgatgccgggcggcgaattgtccaccgacgggaccgagccgttcatggcctctaaagttaaagccttttctactccgtcgccgatcgttgaaatcagccgaaaagatgaacctataatggaaaagaaagagaaggatccacgaaaaattgctagaaagtatcaactggagttatgcaagaaagccatggaaga

SEQ ID NO: 255402 - DNA, 474 bp, Gossypium hirsutum
ggtttctagaaaagacgagaaaaaatggagaaaacaaaactaggaaggcaagaagttgttttttttgttccctgtaaacatggtagcaacccttacccaaatttagcagagaaaaaacaaaaagaagaccaaacaatgatgatatatgttgtttctttcattcttgttcatgcattacattgttaatcataacgcagtctttcctccggctcgctgtgacaatggaagaaacctctggatatacagccattgccgtcgacaaggacaggaacagccaacttgctgcaaaatgggcagtggatcacctgctgaaacccggctccaaatgcttcttcgttcatgttttaaagagtttgcatccgcaggagtttgaagccatacctatggaaggtcggtcgtcgtctgaagctgagatgcaactctacttcctttcttgccgaggatactgctctcgaaaagggattgaatcacatg

SEQ ID NO: 255403 - DNA, 233 bp, Gossypium hirsutum
attcccgtaaattagtttctgcttaatgaatcaataactataaacaaagataatcatagtagggatatattcttgttcaatttcattcttttttgtttccttttctctttttttcttccaaatgaatatcagatctcttgggttttgctgttcttacactctctaaagctcccgcccccttcttttcttttctcttttttttttctttctgctatacttctttaaactctttc

SEQ ID NO: 255404 - DNA, 173 bp, Gossypium hirsutum
agcctatttcaaagaacgttgcattggctcaatcttgggggatttgactgtctttcttccccattataaatactgatggtaccaataccttactcaccgaaacctgttaaaaggttacgaacaaggatctttgcacctcaagccttggggccgaacatgccacccaagacgca

SEQ ID NO: 255405 - DNA, 119 bp, Gossypium hirsutum
gaatttatttgtgtagtagcagtacctgtgaaaaggtgttctcattatgatttgaggaactaagcgaatatggcagtagaggaaggccaagtctatggctgccacactattgaatcatg

SEQ ID NO: 255406 - DNA, 339 bp, Gossypium hirsutum
cggacgcgtgggttttccaccaagaatgcattgatcattggcttgaatcacataaaagatgcccagtttgtcgttaagagttagatgtgactagtaaatcaatagtaaatccctgaaatctctaaaatctcaagttttacaggtgatcggggattttgatctaaaagagttcatcatgtttaatcgactgttcaggaaacctaagcaggacacaaatgctctaaccacgttagaaaaattaatcgaggtgtaggatttgattatcttttattttttcactttaattggcaaaccagttattcatttgggtatgtctcttgctttgcttgagttcaaaaa

SEQ ID NO: 255407 - DNA, 490 bp, Gossypium hirsutum
ttcactgcccaacaacaacaaaaaggaaactcttcgcttcacttaaatccacgtaaaaggaaaaacccacagctctttccctttcatttcctattttgatttgttatgttcttttagttaatacgatcccttaaccttagttagatctaaagttaatttgtaggggaactagtgttaattgtcccaggagaaccatacgggagctgtggaggttttgaaagatgaggcggagaggactagattttaggagaccagtgaggaagaggtttcccaatgtggtgtggtggacagtgtgcggaattttggttttggttctcatcgtggttttgagcagagagggtcagattgaatcaaaacccactatttctaggaaaccttatcggcgtgacagaattatggaaggtgtaaccgtcactgatgaaatgttgagctccaactctgtcaccagacaacttactgatcaaatttctcttgcaaaggcttttgttgt

SEQ ID NO: 255408 - DNA, 143 bp, Gossypium hirsutum
ccatctcatcattgttcaggatggtgatcctaccatgaccatcaaggtccctgaaggcttcgattatgagcttctacaataggaacgacttgaattctatgacaaaggtgttgcacctcgtaaaaacatcgatgtaatgaaat

SEQ ID NO: 255409 - DNA, 448 bp, Gossypium hirsutum
tttcttgccgatgataggtatgggactgttgtttcagagatcataaaatccaaagctaaactttatgatgccttgaataaagccaaggattccagttttgacgctacacttgctggggcaaacagactgaatcataacaatacagaggttgaaaataatgcagtcactaaccatgttccaaatactacccacccaagctctggagctaaacatctacgccatgagttcaagatttcaaaatcaggagaaggtactgattgcattgatcttccaattgcttttgtgccagcagtcattggacagggttcagatgctggtgaaagttctttaaaaaagcaacgcaagaagaagaaaagggctaaactgaatactacttctcagtcggtagttgctggtagcccattcaatcaaacaacaccttgttcacttgctctatgaaacttgccca

SEQ ID NO: 255410 - DNA, 251 bp, Gossypium hirsutum
aatttgtttcttgcactggggcccttcagacatcaatggctcagcatatgtccaaggaagaggaacaggtgtttcccttgcttattgagaagtttacatttgaagagcaggcgtcattggtatggcaatttctttgcagcatacctgttaatatgatggcggagtttcttccatggctttactcctctatatcacctgatgaacatcgagacatgcgcaagtgcttgagcaagataaattcaagagagaaa

SEQ ID NO: 255411 - DNA, 462 bp, Gossypium hirsutum
ctttgtttattttcatagtttacaatctctttctctgtgatcacactacttgcatattggttaaagtgatctccttttaaaaagggtctgctcaaatgaaaatgtttagcttttctcgtagacctatgaagcttaacagagtgaaaaaggtataactttcagaatctgttcatggaactagaagccctataagaccatccaaaagaaacaacaatacaattgtggaatcagctttgcctgctggtactagtcattgtaatgattttgatccttcgactgcccccgagattaattcgtcggggaattccgagaactggatggtgttatcggttgctggctaaaaacccgtgccacggtttaatcacgcagccgctgtagtcgggaataggatgatagtggtcgggggtgaatccgggaatggattgttagatgatgtgcaggttcttaatttcgataattttt

SEQ ID NO: 255412 - DNA, 242 bp, Gossypium hirsutum
cccactcgtccgcccacgcgtccgcaaaacaccccgggggctctttcatggtgatcttcgctctcttctctcatatcgaacaaaaaaaaacccggtcccaatggcttgttcaactggattttcactcaatttctccactctttcaacttttttgaagcacacccaggtgcctcatgatgggatctctaatgtcaacttactgagtctcccatgtcttagaatgcgaccgggacctatgcgcc

SEQ ID NO: 255413 - DNA, 247 bp, Gossypium hirsutum
gtttttatgtagaaaatacttggttaaaagtgtcggtagactctggcattttgagattccttccgctgctaacatgagcagccacggcggcgctcagttttgctaaaatgcgctccgttcagtcatgctagtgtgtgtcagaactcactcataaatgatatattttggaatagtgataatttttcgttttactgaattaagggttttcttttatattataaataaaaatcaaggatgggttttattg

SEQ ID NO: 255414 - DNA, 191 bp, Gossypium hirsutum
aaaagaaaactattagaagaaggggctggacacgatgcgggcgctatggcgctgttgaaattgagcatttattgctatgaactcggagtgaaatacattaccgcttatgctttttccatcgataattttcgaagaaagccaagtgaagtgcaaaaaataatggatttgttgaaggaatgtatgactgtgtt

SEQ ID NO: 255415 - DNA, 482 bp, Gossypium hirsutum
cccacgcgtccgcggacgcgtggggtaacagtgaaaccttctcccctatcaaatggcaaaggaggcgcacggtagcctcgcctccgacgccgacgccatagaagcgacggcggaagatatcgagtcacgtattaccaccgccatgcactctcgcgttggccacttcaaggaacaagccgattcgttgaccttcgagggagttcggagattgttagagaaagacttggggttagagacctttgctttggatgttcagaagagattcgtcaagcaatgcctgctaaagtgtttagatggtgcaaatgaggatggctccaagagttcttgtgaaacagtggagaaaaatgtaagtacaaccactgaaggaacagaatcacccaaagaacgagaatctaagaaagaagtaaaggaaccttgctctgaagatgaggagaaattagatggctctccagttttgggccttctggctggatataaaacta

SEQ ID NO: 255416 - DNA, 437 bp, Gossypium hirsutum
ggatttcacagcctatccaaggcttttcagaagggatgtgtggttaacatcaagatcatcggaacatgtaccgggaaatcaatacactggaacaggatggttgcttccacatgcatgtcaaaacaactcagagaatcctccacctaacctttacaggcaggaattaccagggggaactggtgttcctagtggccggattcctccgggagaatgcttcacgggagttgttgactcaaactgtgctctctctcttctatcaaatcaaccatggggcttcagaaatcagggattgactcttgggttaaatgacatgatcaactccgagctttgttcaatgtctcaaccagcaatgcctcatggtgcagttacgaatccttactcaaatgcctcttggggtttcaagggcaaccactcctgtagtcgctcccaggatatgc

SEQ ID NO: 255417 - DNA, 224 bp, Gossypium hirsutum
agctggttgcatcccacctggaactgacccttctggggcagttgtcaatgggttattctatagtcagcacgatgatgaagtactgtaaattgattcaccattatgtgatagagtgaaacagactcattgatcttgactatagctgattttttgacaaaacattaatgcgaatggataggatgaatcataatataattactttttcgttcaaaaaaaaacaaaat

SEQ ID NO: 255418 - DNA, 479 bp, Gossypium hirsutum
attttctttttccccattttattctacacaatactgctcaaaacagcttagggtttcttttgtttttccttgacataaaatccccagatttcttcataatccagttcagattgggctctttctcaagccaggaaaagccgagttttaaggaatcctagttcaagaggcttattggagttgaaagttgcttaagtgcattcttgtttaccattattattcctcaaaagatgggaatgtgatatgccttatgctttggttcaagtctagggtggataactgtgggcttcaataatttctttggtttaattttgttgagatttgaccatgcctggttcctgataagcgtgtggagtttcatactttgatgaaaatcttaaactagattactgaacaaccttagtgtgccaacagaaaatagctaatacgggtgcgctttgttgtgtggccgctgggccacatggaacaaaatcacccactaa

SEQ ID NO: 255419 - DNA, 453 bp, Gossypium hirsutum
gaatttagccatccatttctttcagttgctgctggggttctttctctcctttttgttttttatttttgggttctaagaattgtaaataattcaagaaaaatccaaatttgacaatcattttcgaaccccccccttgcatttcgccttaatctttccttcttaatacccacattttctctgattctctcactctattttgggttttcttttttctttttgtttctttcgtttcctattacgaggggtttttgttttttccttttgaatttgagaagctataataataataataaacagaaaaaagaagcagaggaaaatggcgtctaatataggaatgatgcatagtgcttacttcgttggaaggaatgagattttaacatggatcaataacaggcttcagcttaatctctctcgtattgaagaagctgcatctggtgctgtacaatgtcagat

SEQ ID NO: 255420 - DNA, 445 bp, Gossypium hirsutum
ctctgccacagccagtccggtctttgcaaagcataccgctctctacatctttggtagatggattgttaaaaagcacaagcccagttagcatttatttttctattttgccttttaattttctactttcctactcttattaaacattcccaccgattccttgcttttttcaaccattcattcaatcccctctctctttctctccgtgtgtgtctcagttctattgctgataaaccctgtggaaattaatagagaattgcattttctgaatatcaggcggttttatattttcatttactaaatccggaagatcccaaaaattttgttatactgttttagtttctcagtttaaacccacagggagcattagggtttcttagcggaattctgatgatcagcttttggctctttggttttggaggattaaagatagagttgtgatgggagt

SEQ ID NO: 255421 - DNA, 131 bp, Gossypium hirsutum
ccctgacagaaacagaagttgtttatgtttcaaaaggaaccaccgacaacagagacaaaaaaccgaattcagaggaacaagtatcatcccctggtgccaactttgggtttcagcattcaagtaatttcaaa

SEQ ID NO: 255422 - DNA, 138 bp, Gossypium hirsutum
cttttatcctcgctcccaatctaatagtaaaagtgtgagctcctcggaagagtcgccgctgcctcaaccctttcgtttcgactgctagtctcatgggttcagtttctgcgttgaaagagcctttagagcatccaattt

SEQ ID NO: 255423 - DNA, 130 bp, Gossypium hirsutum
ccctctcgtccgttacgtcccgcctgggaggtggggagtgctgtaatgatgtttttggtggacagtgcaagaacaatggtattgtttttcgtatcgatggcatgcttgttgctccatcggattataaggt

SEQ ID NO: 255424 - DNA, 126 bp, Gossypium hirsutum
gactggagcatagtgtgccacttccaatgtcagcacgggcactttgcagaacaggcatgcattgcaccatcgcccttacctgtgactgttattcagaagttgcaagcaatccttggtaggctgatt

SEQ ID NO: 255425 - DNA, 121 bp, Gossypium hirsutum
ccttttcgtccggtcccatctttttttcagctttaggcatcttttaagctttctggcgggttctatatactccaagcttcatggatttagcacataagctcctattcacagctttgcctca

SEQ ID NO: 255426 - DNA, 112 bp, Gossypium hirsutum
tttgtttaactaaacgacacataagcttacctagtgggcattctataacttgaagagggatttgctctaacgaagcaacattttaacacttaggaggatatgcaccttcaca

SEQ ID NO: 255427 - DNA, 119 bp, Gossypium hirsutum
cgtaattgggcgcagtcctcgcctggctttgccctctccttattaggttttaagaagccgaactaatagccttgcttagcagcaagcactccataccaacgccagctgaagatggagac

SEQ ID NO: 255428 - DNA, 130 bp, Gossypium hirsutum
atttttgcctctccaatggatgatacccataggagcagtgacgaataccatcaacctttactaacagaaccaagttcaaatgatgaagcaactatattgagagatgaagatggtgaagaaggaaaggact

SEQ ID NO: 255429 - DNA, 119 bp, Gossypium hirsutum
gttttgtcaccaattccacaaggaggatgttgaaggggcgtattggaggtccttgtgaagcaaccaaccctatcgaccaatgctggcgatgtgaccgcaactgggaaaagaacaggaaa

SEQ ID NO: 255430 - DNA, 133 bp, Gossypium hirsutum
ctttctcttatggtggtttttggatttataaaaacatagcgtttatgcttttagattcatttgtgttttggtgctgtggaggtgcatggggtgtaggcaaagttcataatattgatattgggatccttggggg

SEQ ID NO: 255431 - DNA, 126 bp, Gossypium hirsutum
gcaataacgaatctcatttgtttaatgaacttcccaatcaaagctcaaatgtgggtagctataacattgatatgggctccacaactaacaatgcttttgccaaagcagcagttgataagaataagt

SEQ ID NO: 255432 - DNA, 145 bp, Gossypium hirsutum
gtctttttctgtccagtgtataagcacatgcttaggatagttgttaatgaggagttgtatgagcaggagaagccattgtctttgaaggatgtcagatgcctaattgtcattctgagacaggcgttatggcagctcctatgggtga

SEQ ID NO: 255433 - DNA, 385 bp, Gossypium hirsutum
attgcttttccttccttccatcgctagaatcacctggggccacctgttatcggaagcccttatcaatggcgcccttgcttcagccacgaacgcatcaaccacatcattgaaaagataagttgctgctcctatatagtctcctttgtgatctttggcaataatcgcagatgtagaagtcctagtatcactctgaaaagtagcattaaaatttattttaataataacacccaaatctggaggactctatagtataaccgataacgatctgtagacaactcccatctttttcttgatactgatttaattccttaatatatccacgggaaaaacctaaaagatcctatagagaaaacttcagaccctcattaatcaatttatttcttct

SEQ ID NO: 255434 - DNA, 137 bp, Gossypium hirsutum
  unsure (1)..(137): unsure at all n locations
gtgtttagcagcgaaagggacttttgtggagttgnagaatgcctataagagtgaggcgctcttagaaacctatgcagaatggtgagattcatccacttacacgttatgtgatgaattatgtcaaactgcttgtcgat

SEQ ID NO: 255435 - DNA, 142 bp, Gossypium hirsutum
gcctttttcgatcctttgcccccccccccaaaaaagtgggtgccgaagttgaagttagaagatgaagaatcaatcaccaaattgtccacaaaatcaagattcagatacaattccccacttgttcaagtctcccttataggcc

SEQ ID NO: 255436 - DNA, 116 bp, Gossypium hirsutum
  unsure (1)..(116): unsure at all n locations
ccctcttttccgcagagttgttgtggcttcaacctntgtngctcttagattggtgggcccgttttaagactaatgtttttgcagataatgaaagcttcaatttaatgggtaaggaa

SEQ ID NO: 255437 - DNA, 153 bp, Gossypium hirsutum
ccaggttatccagccataactctgtttcccggcgcggagactatttttactaaattctttttgattggaacgtgctgacagactatagttttatttttggttctgttatgtgtattattataactggcaattctctgattggaccggtacata

SEQ ID NO: 255438 - DNA, 111 bp, Gossypium hirsutum
ggctctctcaaattttgctggaggatcgttttactgggggttgtttatagaggaatgcgcggattgggcttactacagcaattgtaaatctgatgttggctgctcaaatgt

SEQ ID NO: 255439 - DNA, 339 bp, Gossypium hirsutum
cccactcgtccgcaagaaaactatgtgtatggccatgcgaaatgaagattaccatcatcatcatcatcattatcaaggatctaaagcaacaactaattggtccatggctactgcttcttcatcaccaaaatcctgtgtaacaacaagtttcaacagcaacatgttggatttttcaagcaacatcaaagctgataccgctacaaggcaacacccaccattaatggatccatcacctgagtgtaatagctgcactgcaagtggtggggcattgaagaaaactagggttcaaccttctgcaactcaatctactttcaaggtgaggaaagaaaaattaggaga

SEQ ID NO: 255440 - DNA, 540 bp, Gossypium hirsutum
  unsure (1)..(540): unsure at all n locations
ggaaaagctctcctattcctatcaattgcagtagagcccctagaaatgataagccctttaatgtggaaatccctggggaaggttttctgtactctgagctttgggctggacctgcttattccaattcaccacctcctagttctttgccaataccgaaattctcgcttcgggtgaagaggacagtgtctcttgatttgcctgctgcttaccccattgttgatgttcaccaaactgctaagtctgcacctgcatctcctaccagggagcttgacccttctgtagctgaagttttttgtagtgctgcctctgcgaccaaggctttgcgtcgcattctcaatcttgacaatactgatgactgaaaagagtgtaggagtttttcagctcctgtaaataagtttactgtgcaaatttccgaagttagttttagattgtatataggttgaataagatggttggtagcatgagtcagtatgaattaatggcaatggtaggtcgacaatctccagattntgctttatgatggtttatgagagtttggtg

SEQ ID NO: 255441 - DNA, 350 bp, Gossypium hirsutum
gactacaaaaggtcaggccatggactagcaaggaaggccaagaacatcgagcagcttagtctttagcagcaaagttgccttgctgcaaatccattgataagtctacaaaggtctctcttgttccttctgtttcttcgtgttatttatagctacttcgtttataggatacgattttatacataactgcccaaaattagtttgaataaaatcatgttgaaatttgaattctacttggtaggttcttgcattggggatatagcatccctttttcaatggtaaaatagaaagttatgtagctttaccgtctaggtttcgaactttcagtaaccaagcaatgatgttcatcttgc

SEQ ID NO: 255442 - DNA, 333 bp, Gossypium hirsutum
ctttttcgagacgcagttccagaagagttaataattccgagtccatttttctttcaacagatgataataatgatccaggatttgataacagatggctccttgatttcgatggtgatttcttttatgacggggctgcaggtgattctggttacctcagcagtagaattcatagattaaatgaacgaagacgacactcaagactagagaattggttaaggctgcatggtggacatgatgaaaatcatcggcgaactacattttgtccatctggaatccaccctgatggcacttgctcatgtgattcttccctgatgactgatgagcctagtgctc

SEQ ID NO: 255443 - DNA, 292 bp, Gossypium hirsutum
cccactcgtccgcggacgcgtgggtcgcggaggattaggttcatttcaaatgcctggtgaaaacagcttagggagtatagagttggtttctgaagattaaacggagttaacattttccttgtggtggtttgtttaaccttttagttatggatctcttttttttatttgctcttgttttaggttgaactctctgtattttcagaggtttgacttttcaaagacaaagctatgtactacttattttttgagttgaagaaggattttactgttccaatcttggactgtccttatt

SEQ ID NO: 255444 - DNA, 397 bp, Gossypium hirsutum
  unsure (1)..(397): unsure at all n locations
gtttttgccaatggcctttacgacctggtcattggggtgctctttctcgactccaatctcctcataaagctcacttctctccgcagaatccgccgcctggagaccgtgtgggacgatgaancttacttccatgatgctgctaaatgccgctcttttgtcgccaaaaggcttcttcaagaatgcgagaccaagaaaggcaacaatagctcgataagagccgggtatggaggctggcttttgtacaccgctgcctcggctggtgacatccggtttcgtcaagcagctgttggagagagaccctttccttgtcttcggagaaggagaatatggggtgactgatatattttatgcagcagcgaggagcaaaaactctgagcttttcaggatgctgctggat

SEQ ID NO: 255445 - DNA, 117 bp, Gossypium hirsutum
tgctttaccggcaccaccgtcatctaaaaacatagtagacacttttaatgatccgttcgcttcgtctctgacggaggagccgccttcgtatgtgcaaatgtcagacatagagaagaa

SEQ ID NO: 255446 - DNA, 212 bp, Gossypium hirsutum
ctttaatctccaatctctcccccccccccacccttggtggctgtatgatgtactgtagggtgtactgtgacaacacaattaacttgggtcttttccgacagacagacagacaggcagacaaccaaatgaaaaatcactaatctgctttgagtcttttgaccacccacactctaaaccccttcactttcccttttcctacatcctagccttgt

SEQ ID NO: 255447 - DNA, 396 bp, Gossypium hirsutum
cttgatgattgataatgaatcaccttcaataatgatcttgggccatttcatctctatcccgatttggactgctctacggcaagcgagtgcctccgcggcaaaagctgagcctatctggtgatgaatctctaagcaagatattagggcctttccttcagtgtttctaaccactatccccgaagccgcttgactagatctttcatcatatgctgcgtcaaaattaatcttcactgtctgattagattgtccataacgcgcaacaaaataatcagcataaggaaatgttattctgagcaaacacctaggttagccattgtagaaattccatattagcctgtagaagcttctggaatgataattctgtccatactgtcactgatacagggcattcccgga

SEQ ID NO: 255448 - DNA, 410 bp, Gossypium hirsutum
ttaacgctttcttcatctcactgcatttgcttctctgcaaacgcttaaaaaaaagtcatctgattaacgctttatctgatgattgatttgctatggattttcattcctgctgctagctttgatacggatctgctgtgctctcagtttcacgagatctcctcactgttaaactcgctttgattgccaatggcgttgaagcgggggctatccagtgttggcgtccacaggaacagaagttctgaatctcgattccctatcgtgattctcgttctcttctcagttctcgctccgcttgttttctttgtcggtcgtggactgtatatatctgatcaaaataatgttcaaagtggctataccaagcagaatgttgactgcagggaaaggctggcattgcaatctatcaaaaacct

SEQ ID NO: 255449 - DNA, 249 bp, Gossypium hirsutum
gtaacatttgacatgcaatccattcattttttttcatggatcatcaatcatttctgtgattaaaaatcatatcttgctattcaaagtcttcatctttattttgtttcttttgatatataaaaaagaaagctctatttgtactttttttgtgaagatctggctggtggtggagacatggggagattattcgcggcgaatcttgaagggacgggttatggctgcaaacactgcaatacccaccttgctctt

SEQ ID NO: 255450 - DNA, 281 bp, Gossypium hirsutum
cggactctttggtttcaagcaaataatatcaaatctccttgggcttcttcttcttcttgttcattgagttgagtgttgcaagaaaaatgggtattaagcaatttataggttatgctttagctgtgttagcaagcttggtggtgccagctcagggctctgattttgcattttataagctgagtctgatatggccgacttctgcttgctatccactcgccaccctgaagactccaatacctactttctctaccatccatgggttatggcccaacatttgccaa

SEQ ID NO: 255451 - DNA, 249 bp, Gossypium hirsutum
atttaattttcatttagtctttaatttcaaccttttggtctattttcattttctttctcttccttggttcccgatcctcatcctggatcgccagtctttgatccctcgaagaatcgattaattggcggcggcggcggtggttacacttgtggtggcggatttgaagttggtctttgttggtggaaaacaaaagagagacacattaataaaattcgctcacttttattcatattatttcattttggggag

SEQ ID NO: 255452 - DNA, 319 bp, Gossypium hirsutum
cttttcctcgtcgtgctttccaacagatttttcccttggtttttactcttttttttttttttttttttgcctttattcctgcaacacgcgtacgacaaattataactataagtcccaccgccatgaaatcacgccgcttgctaagcttcctccttaaccatctcatttcccccgattaaactaatctattaagctggtttttttttctttgctttgtaagaaaaactgaaggcgcttcttgtttcacacacactcccttcttcattgctttaacaacaaagtcaatgctcctcactgctttggttttctctttggatct

SEQ ID NO: 255453 - DNA, 392 bp, Gossypium hirsutum
gatttgttgcgttggttaacagaaaaagcacaaaggggacgtgcagagttgaaaagcagtgctgattaggtcagtggcgtcgggcgatggcggaagataaggcagagacacaagcgttcactcctggtcccggatatcggcaattcaaggggagagatgaattcccctccaacattttgcacggcacattagcttgtgccatctggattggatctatgcattttaacgtctccctcctccttttctccttcctcttccttcctttctccaaattccttttgttcgtcctcttcctttattcttttttatgtatggcttttatgcttctgctggtaaaagaaaaagagaaagttaaaacggcgcacaaaatttatctttgattcaatacacag

SEQ ID NO: 255454 - DNA, 220 bp, Gossypium hirsutum
acagcttgagatcggagatcaaaggccctgtttttcattggggttttttgtttgaagctctttggttgtaaacctgattttttttaaaataatacttgatttttagcttttgggtgaattttgaatgtaataataatatatctctttttgattattttggggtaaattcttcgttagttatttttgggtcttcggaattggaatttttggggaatggagg

SEQ ID NO: 255455 - DNA, 254 bp, Gossypium hirsutum
tcgcttacgcgtccgattgttttttccttttgttctgtgcattcatacaaaccttaccatatttaggttattcgagtgatggaatcggaagacgatatgattgatgactcggtttgcatgggagatgatttttacagctgcgatttgagctattgttacgacgacgaccctagtgattacgataacgattattacttggacgatgacaatgattacggcttacttgaagatgacgatgatgatgatcaagatgg

SEQ ID NO: 255456 - DNA, 494 bp, Gossypium hirsutum
catttagctatcatggctgttggagcatcaaagccaactgttgtagctgatgctgagggattcttcagcgtgaaaaacaaaatgctggtgagtcccgtttctattatggagccaattacaatcccttgtagataaagctttcgttcgaactttatagaaaatttatgagataggataaattattacaaatctatcatgaaccaatatactcatttattgttaatgctttaaggtatcatgtagtgactgaaagcagactacatttatgatttttactaatataacagtaaaaagatgccgggatctgaggctatctaaaaaaagtacaatttaggtacaagctatgttactcgaactcttcactatttttcaagtacctgttgtctggcacatgaatatagacgaactccaataatcccccaaatacatggaaaaacttagaaaagactaaccttacttgtgtcgagtacatacttgtatctaacactcatacc

SEQ ID NO: 255457 - DNA, 406 bp, Gossypium hirsutum
ttccaaaacaaaattcacgtctttttcctctttgtcactctctctattccccccatgtcattcgcatacttagggttagggtttttattgtgattttagatatttccttatttactctcttcaagttagatatttaatttggattccgtttcgacttatctaggagttctcatcaatccgtgggttttaattttttttctttgttctatcggaagtttcaattatccctttttcctttatcgaattctgatatttcagtcgttaggtttctaaacaatgcctcctagaaccgtgaagagaggagccggggccggtggtccaaagagaacgccgaggtccactagaggggcatccaaatccgagaatccaccagcggagcctgtacaagaggccgtgaatacaaagg

SEQ ID NO: 255458 - DNA, 419 bp, Gossypium hirsutum
ggtgaaccagggctggaatggtggaacaaagagggggggaatggtggaacaagtggaggtggagccaagacttggaatcaatccactgctgatcaaggaggccaatcctctagttggagtcaatctggtgggtggaacaaaggctctagctcaactaatgaaggaggtgggagtcaagataacaaccggaagtcttcgaattcatctgatggttacaaatggtctagctggaaccagtcaagtggcagcaaggaagttactgaaagtaacaatcaaggaaatgggtggggaaagagttcaactacttctgctggagggtggggtaaccaaggatcgggctcgggagatcaatcttagtcaaaaactgctgatgaagccccatcttctgtgtggaacatgttaaaggatggaggtgaaaa

SEQ ID NO: 255459 - DNA, 372 bp, Gossypium hirsutum
cggacgcgtgggagaaaaacaaagttagctactgaaatgcctgcaggttaaacttttacctctccaccattagttttaaactatgcacagttaaaacacagtttaaacacataaagttgtaaattctgaatctgataggtgctgtgtggagctgggaaaaggctaataatttttgcatttactaggacaaaggtacatcatgttgatagttttcatgcatgcaaactgatacaatgatgttttgtaatctgtctcctctctatatatacacccaaagagcataaccaaaaaggtaaaaaagaccttccttactattggaagaacgatctttgcttacagtacatggggttttcatttgttacttttttcagt

SEQ ID NO: 255460 - DNA, 425 bp, Gossypium hirsutum
gttcactctctctttatcttgatctcaaaggcttctgttttgagctggaaattaagtagatcggagagtgataagtggttgccgtgttgtttacagatgaaatgagggaaaaactggaaacatgaatgcaggtcttgaattgtagtacaagttaaggttataaaatgagaacggagaggaaaccgcatttgataaagaagcctgctgatgcaaaacgtcaaagggttgatgaatcccttggccctggcttgaaagatgaagcaactgaggttgagcatttacttgtggaacccaaaagtgaacatgtctcggtagacagagtcttttgttttgggaaggagaatatagaaaaacacttgaaaatggaggacttctcttgtgcttttgattatggctggaaaattggttctggtggggctggattc

SEQ ID NO: 255461 - DNA, 459 bp, Gossypium hirsutum
ttctcgcgtccggtgcatttcatgcggcttctatgttcaaacccgacaatcctttctgcaggattatattgcgaccttcttatgtatacaagggagtacttctccatttgccccgttgctttgctcggagatatctgaacggagttgacggggtcatcatgcttcagataccggaagggaaaaagtggccggttcaatgcgtttattgtaacgacaatttgaagttcagcaaaggatgggccgaattcgtcctggataataatttggatgaaggagacgtttgtatattcgagttgattaatacgaaggagatcgtactgaaagttaccattttccgtgctcttcgagactgaaatcaggatagcattgaacccgaatataaccgagtcttccgttcttcaactaaataatactctcaggtacatctttcatgtaggatatggcatggagtttatgact

SEQ ID NO: 255462 - DNA, 518 bp, Gossypium hirsutum
ttttccttgaaaagcttttcattgtgcttatatagtaaaaggttccaattggggtttgtttcacttatcaaaaacgtggctagccaaatgtctgcctaagatctctcttgcaaagttgaaacccatgtggaatttttgttttggataagccaagacctacaattgagtggaaaatagcagtgaatatctgtcattggcttagttaactatacatgaggaaataattcactgccataacagttttttgtttagactgctaagtgaatccgtagagctctcggcagagcagaaacatttcggatcattacatgtcatgcaagtaaccaccagctttagatacatcaactcattgattcctttttgtttgcgtatatatatatgtgtgtacaaactcattggtgtctcatccaaatctattctcttctgaaaatatcctattcctttggaactctctctctctctcccacatttttctcctcctttcttccctcttctctcattcatttctctacttctct

SEQ ID NO: 255463 - DNA, 399 bp, Gossypium hirsutum
gatggaaagaccgtggttctaccatcagaagataacccacaacctgatgcagcagaggctaaagcgggcggcggttgttgttgatgcttcagaaaatataaaccctatgctcctccggtcctgtcagttaggcctcaagttgcggataatttcttcttcatcttcttccctaccggtaaaatgttaataaatacttgttttgacatgtccatgataatcttatggtggttgatacatggattagctaaagatgtaaatgaaagtgaaggtgaagggggcattaaaaggggaaaagaaaagcaaatgatataagataatatatttagaatgccagtgtaatttcctctgttttatttgactgtgattttacatattcaaaatgattaaaaaaaaccaagc

SEQ ID NO: 255464 - DNA, 446 bp, Gossypium hirsutum
tgtatagttcgcacaattccaactggtggcagaattcgaatcagctcaacgttgccaaataggctggggaagatgctttcaccattgcactggcatgattacaagaaaaagtacggaaaactggatgactttgtagctagccaccctacgttatttgtaattgagggtgactatatttggcttcaagagggagcacaggagatgatagcagcaactgcagctattgctaaagttgctgcagctgctgaagctccatcttcatactcctttttgccttctgtttctgttacaccgattgcacagcgtaatcggctaaagaaggcgcttcgatcaattgattcctatcatgtgagagagaatgcccttttcaaggagcatgcaggcatcactaaaaatgcttctaatggacagcagttagtaatgcaaaatcaacatcccaatggatt

SEQ ID NO: 255465 - DNA, 375 bp, Gossypium hirsutum
ttttcctagagtctccctcaacttccacgcccttcaggccgagttggaatcccagatctagtgcctgataacacaccaacacctcggccgcaaaagcagacgccgcgtcaaaatttatcctcagtcatagccctgatggagcaacccatctggttgtatggattcttttgtcagatcaagaacaaagaaaatcgaacttagatcgagggaagtccaaaatagttgaatagtcgactcgtttccatctgaaattcgtacgagttatcttagctactcaaggctcggggatagtcgaagattgtcaccatactatcgaactcattttggtacttttgaaagtgtaaatatttttaagtatagcatgtataggataga

SEQ ID NO: 255466 - DNA, 487 bp, Gossypium hirsutum
cttactcgtccgagtatctggagttggagcgccaactctgacaggtaggcggtggttacaccgccagattcaaaatctccgttcgatcaataggatgaatcttatggttagtaggactgaaggaatatcagctgccaatatgggcattgatcttgttaattctcacattgatcaaagtagggaaccaatggttcaacaagctaggacagaagatgcgggaactcagcctcaaacactgtttgcggagaggttacaggacaatccctcttcttcactgcaaggtagggacttcctttcttcaaggttgagccacttgagaaggcaagcagttcaagattcaactaccacttcgtttggtacatctgtcaatttgacgttatggcctgaacttgctggtattagttcaaatgagcaactccatcattgcagcaatggatcaaacattaggcccgatggctgtgatttgcctttttctgttagagatgac

SEQ ID NO: 255467 - DNA, 439 bp, Gossypium hirsutum
cctacgcgtccgccaaaatagcttcgattttttcttcttattttctgagaaaaatctccggaagaaaatgaaaccgacccgaacgaccgattttatcttgattcggactctctgtaaaccgacacatcaccctctcctccacctccgagtcgtcttcttgtttgttcccacctaaacacgaaagtacccacccgaaaagattgttgttttaaggtatttttttaacaaattttctttgttgctgaaacccaaaatgttgtcgtttcaatcgagcaagaacgtccttagcttaacagaagatctacttgtccggatctacgaattgctggccgctgagtcggatcggaaatcgtttcggctcgtttgcagagagttccgtcgaattgactcactgactcggaggcatcttcgggtaatacgaatcgagttcttgccgatt

SEQ ID NO: 255468 - DNA, 356 bp, Gossypium hirsutum
ttaggaacggagacttctacttctcacccttctttttctcgatcaaacaccgaccgtgtggccagaaaaagtcttttgctcgattcgattctctctctatctcgccgatctttcatcaatggcttcttgctcaggtattttttttcctatttcctctcttgattactttttttttctatttttatgtactatttccgattaatttccttgattctatcattttttttggtaagtgagaaaatttgaaaaaataaaaataaagcggaaagattagaaaggaaaaagaaaaaaaaggaaaagtgatgttggtcgtagtttcagttttgtgtattgataaaacgaaaaagaaaaggaaa

SEQ ID NO: 255469 - DNA, 258 bp, Gossypium hirsutum
tttttcaaggacaacgagggattactttgtgttcgtaagacattttggcgtcccacggaagaagaacctataaagtctgctattgtttgaacatgatgctcacataactgtaacattccatggccctagaatataatctgagatgttatagtttaccgtagatctagtcatccttctaatgcaaaatcatacctacttatgacaatttcaatttttgggccaaaatttccagattgaattaaaatgcataatttcgat

SEQ ID NO: 255470 - DNA, 449 bp, Gossypium hirsutum
tttctgcttcatcaaggtcaaattcccattaacgtccttctccctgttaaccgcctctgataacggccttccacttccttcctccgccgccaccccatcatccctcctcttctccccttccaattccttaagtacccattcttcctcccaccccaacccagagcttgaatcccactccgaacccgacttcgccaccatttttgcctcgcagcgcttctttttcacttctccgggcagctccaactccatcattgaatcaacaccgacgtcaaccgccgcgaatcaaacatcaaacaaagggcaccaccacacaaggtcgaccgttaaagacggtgtagcggtcccaactttgtcttcgaacccatatatggatttcaggcaatccatgcaggaaatggcggaggcacgtggcttaatggacgtcaaggccaactgggacaacttgcatg

SEQ ID NO: 255471 - DNA, 452 bp, Gossypium hirsutum
tttctctctaaaagcacgattagacctactctcacactaaaatttcaacatttatgaaatttcgctctcaaaaatttttttgttcctattttttcacacggaaatatctgctaatttaagatcgtggagatcaattgagcacgatttggaaataatcatttttggaatttgcatcggtgatcaattgagcacgatttggaaataatcatcggagatcaatcgaggacgatttcaacataatcatttttagaatttcaattcatggcccttcgttacaaggtgtgattactcaaacactaggcttacatcagtgggaaaaaaatagtatatagttgaggggcagcttagaatacaaggaaaagaataagggtgaaaaaaaaaagtatgggaaaagagtctccggccgattgggaatcgaaaacagcaagaaagaaaagcgataaggagctcga

SEQ ID NO: 255472 - DNA, 519 bp, Gossypium hirsutum
tgtacgcgtggggtttttatttgtgatgaagactgtccataaaacaaaatttccctgtgatttcctttggtcctgttgagtgtacatttctttaggaaaaaattatgatttcaaatccaattttttaaaatagaaattttatattttaatatctttaaaatggtaaaatttttgcattaataaaataataaaaattgtattttagttaatattatttggatcgatttggattggaaattaattaaggtattagtccgaaggaaatcattggaccaatcaacttgggaatctatatgaacaggttgaaccaaaaaaaaaactaattggattgggcaatcaaatcgaaatttttaataattgatttaattaatcggatgaattcgtcaaaccaattagacttataaatcgataacttaacgagttgaattttgaaaaccttaaatttagcttgttaaaaatttacaatttcaaataagaaatggggtaaattacagcaacaatcactcactttggggtagc

SEQ ID NO: 255473 - DNA, 478 bp, Gossypium hirsutum
gtaagaaggaaaaaataaaaaacaagaaccctctgctagggtttttctttaccccttttgcgccgccgttcgcctgcaccaacgctccgatcgtgaacggagatggcaacactccggcgtgttcgacgaaagaggtaagatcccttttctcttttctttatatattaagcaaaaataaataaaaaagagaaactatataaaaagaatcaaatatatatatgtataaatgaaaaataaaagattgataatccacaatgaagtaaaacagagagagaaaaaagaaaagaaaacctttgtatttcaaaaaagaaaatttcctatttgtgtttgtatttctttcggtctctcttttcgtaaaaaaaaatcttccccctattttcggtcctttttacagaattttcacggctttaaatagccgaaatggaaaaagaaaaaacaaaattaaaagaaatctattctgttttttttgttggcatat

SEQ ID NO: 255474 - DNA, 300 bp, Gossypium hirsutum
ctttttcgtgcgcttgaacccctatatattgtagggggggatctataatggaatattttgttgaccctatattatttatcttctccatgttctacgttgcaatgcctaataacctgactatgatcccagagcaaataacattgccacatccactttgcaggtcccaaatcgcgctggtgaactttgcatgtgcgatggtgcctgcacttccgatgccacaaccccctcctacgccggctgatgggaatgggcatagacaccggcgccggcgtggacacaggcacaggcatagacatggga

SEQ ID NO: 255475 - DNA, 271 bp, Gossypium hirsutum
cccacgcgtccgcccacgcgtccgtaaaaatccgtactgaccaaaaaaaaacagagcatatagttctttctttcaattaagagctcaagctggcgatctcttatgtatcatcatggttgcagctatgcaccatgtggaccgtattcacctgcagcttccccagttccgactctggggaatgatggtcaattgtatggtccacaacactaccagtgtgcttcctggttgcagccgatgactctaaccagtggtccgttcacgccaaaccctg

SEQ ID NO: 255476 - DNA, 376 bp, Gossypium hirsutum
aagggttaatatcaatttcttatgatattttatatatgtatgtcatattcatgtttcatgattgtgttagaattacataaataaaaaataattaaacaaggttaataatttatctttttatcatttaagtgtagtccttttgtatgtttattgggctgttttttggtgcgtatcatgttagtagttgtaaagaagtataaaagtctagcatggcaattatcagtgttgctcaactcactgaacacggtaaaacacccctgtgcgagcagcgagtttaagttacggctgcatcatgctagagagcttctttttcacaaaacaaggagattttcatccgcaagaagctgacccaattacacttctgtcgggcccccct

SEQ ID NO: 255477 - DNA, 443 bp, Gossypium hirsutum
ggattgacccgctatgagtatgtttcttggattgttatgttttagtcacaatattactcatagtgataactatgtatatgatcctcaaactttagatcatcattgtcccaacatcatgagtcatattttgatacagtcaaaacatctaccgtagcaggttgcactataaagactaatgttggatatacgacaatccatgtagtcggatatagttgatcaatataggatttatctatgacaccccaaacccgactgagacggattagcctgaatctgaaacgacacaatagccaccaaagtgactctccaactcaagaccacccaaaatacgccccaaccttataacacctcaattctaactaattaactatctaatattaatgtggaagcgattttgtgaacccatttaaactaattctaattatttaaccctaaagttattt

SEQ ID NO: 255478 - DNA, 409 bp, Gossypium hirsutum
gtgctcggaaggccctacaggatgatatgagccatttttcaagaaatttgaatggacaaagttcagatattgtgtggtcaggctctgcatggacatgtggtaaacacctcaaacatttcccagcattttgccgcagtgggaccacaatagcggttcaatcttttgtctttgtcatggctaaaggagagaatcactatcttgcttacttggaggatatgtacgaggacaaacgtgggcagaagaaggtcaaagtgaggtggtttcaccatactaaagaggttaagggtgtcattcctgtaaggaatcctcatccaaaagaagttttcatcactccttattcgcaggtcattagtgcagagtgtgttgatggtcttgcaagtgtcttaactcgagagcactatgagaaatg

SEQ ID NO: 255479 - DNA, 258 bp, Gossypium hirsutum
cggactcgtgggcaagctcaaggatgcattccatgcggattattgcgatccaaaaatctcatcttgtggaaggcctttcttggtttatccagctcctcctcctttctaaactctatgctttttaatttcatacgataaatagaaataatgggtgggattgtttgtctctttgatgggggattaccaaactttaattctattgttgctttgtactgcggtatgatgcttatattataataaagatatgctattaatctc

SEQ ID NO: 255480 - DNA, 461 bp, Gossypium hirsutum
aaatccattagcgagtctaggccctaccttggagaaaagttaggttgcagcgtgctttcctggtcttaccaggaaagataaaatctctgaatgctcgaaggacgcaacaaagaagaagcaggttgtggttcaacaggcttcccaaccgctatctactggtaccttgaagcatggccctgctttcatattccctttgagtcagtatcaaacaactgcaaatccatctgggccttctaaatctgctacctcaactggcaaagcatccttgactgataattcaacacttggaatttcgactagctctacggtgttaccaggagtagcaggagctgtgagctttaattacccaaatttggctgctaaccaggctccgtacttgactatattacagaacaatggttatcctttttctatctctgcaccagtcggaaacccatcagcaattagaggaggaaccccca

SEQ ID NO: 255481 - DNA, 505 bp, Gossypium hirsutum
tccatcgcgtccgcccacgcgtccgattggagctaccgggaagtgacgttgtgtcagatgaggaagctgagagtgatgatgaagtactttacagacgcacagtttctctgtagtaaagtttttcattacattaatgaattaactttgttttgaactgtaatttctctagcccatctttcttatctttaggcctctacttatgttctcagtttttgttatatttggattttctccctatattcattgttacaactacagtgcttgctcatgcacatccagacttgcctgcacttgcatggacggtcatatagtgcatattcaaaattgcatctgggagctatcttttttgctgttaattacccggtttgtttatagtattgggttttataagtttctccttagaattaaagctttgatcaattaaatcagaaatcagcgaggagtatttgtggacacctaggtgagcttccttgaattcttgaggacttttctatagcaaacttac

SEQ ID NO: 255482 - DNA, 468 bp, Gossypium hirsutum
ttcacgcgtccgaaaatccccaaaaaaggaagggaaattataaagatttccacggggagggaaagctcaaagcgaagggtcgaaaactttcagatagattttctttttttctttttgagggagaaaaaggtgtgctgtcgtctttctaatggagctcagcttcagagctagggtttcgtttttctttgcctttttttgaagattttttatgaaggtgttgaggagtgccataatttatcattttcgaatcttttgttgacaattaatatgattttacatgatcagcttgcttggaaggtttccttttagatgctctcttgaagtttcattcctgttctagatggaacaaaaattgtcagtacgttatagagttctctttgtttggtggttttgcatctaaaacgccatgacgcttgaggatttttttaccctggctgagatgaaagatggactcacggtcccttcacg

SEQ ID NO: 255483 - DNA, 370 bp, Gossypium hirsutum
cccactcgtccgcccacgcgtccgtaaaaggtttattggatatgttgtaattgcagcagaaagaattaagaaaatggggttccgagaaaggtggaaattgatcgtatagcaaatgtcatttttagttactaaagtcggacagtcatcctttgtttaatctgcaaaattacattagcttgcatttgcattttcatgctttggagttttaactagttggatttatagctcttagctcagagaggatttttactacttaaccagaagtcaacattgaataaataaaatggggctacatgaccgagggaggacctgaaaaggctaaaggactctagcttttagcttcatttttattcgtttggttgcagctgac

SEQ ID NO: 255484 - DNA, 464 bp, Gossypium hirsutum
cctacgcgtccgcccacgcgttcggacggagcaaatgtttgaggacgacgagaggcagcaatctcttccgtcggatcttgagttcgtttccaacaaggcgcaaaactgtaacgccacgggatctgactcgggtcacccggagttccagtcgacgtacccggaccaggttctggagaacgtgttagagaacatttttagagtttaaggaacttattctcgtttgctgcgatgggtttggaattagtggccctgctattttcgttaacaagtgcagggcaagatgagttgtctgattatcaatgatattgatgctggtcttggtagatttgatgagcttatgttttactggaacagaaaaccttgaactgtaccaattatgctttaattttcataaatttcctcttgtttaagaagttttaaaagggtacttatatactgatttcgtatcttgaactttatatatt

SEQ ID NO: 255485 - DNA, 241 bp, Gossypium hirsutum
ctttgtagaaaaggtgtgatcttcaatttagcggtaagatttctaaaattcgaaaccatagtcacccattggattcaagattttctattttgttttcttctttttttccccgaagttttggtttaaattctagggttttcgatagtcacccatgggtgaacgcatagtggaggatatgtcgttgtcagctctcttcgaacaagctcgtaagatccatcttacggtcacggagtccggtgct

SEQ ID NO: 255486 - DNA, 411 bp, Gossypium hirsutum
atctttctctttccaatttcttcttcgatccttgcccgacttaatgatcaaccccctgtggcgttttctcgatcgccatcatcattgagtcagtcaataaaaccaactcgggggtgagtttaccctcattgaaaaagcctttcttttttcaatttgaaaaaattccgtcctatctttttatcgatggcatgcgaggttataaattcatggacattcaatggcctagcgggtgctttccttgatcttttcattgcttatatattgctttgtggatcatctattgcttatttggcttcaaaacttctgggtttatttggactgcccttgcctctgccttggaatggattgtgtgggtacccaaacaagaacatttgtgtccaagccatgttagttaatgacccatcatttaaa

SEQ ID NO: 255487 - DNA, 443 bp, Gossypium hirsutum
cggacgcgtgggttaaagtgccagaagctttggtgacagaaattctatctaaacttccacgaactgatggaaacgccgacatcccttatttctctcaactttcagaagaaaaaggttgccatttggaacccatcaactagagaatttaaaatccttcctccatcctcagtccaacgacctacttacccaggccttacctttggtgttcttgtttacccggtggaaggaattgacaagtcttttgatttatgggttatgaatggagaagaatggactaaacaattcagtattgaatctattcctggagttgtcgacccattggggttttggaaaaataatgaactatttcttttaaatacaaattatgaagtagtcttgtttgatccctccacccaagagcttaaggtgcttgggatcaattcttacctggatcatcatcgaga

SEQ ID NO: 255488 - DNA, 453 bp, Gossypium hirsutum
tccacgcgtccgatcttttcctatcttattggtttctttctctttcaaaactcaaagctcagcaagctaaggattccttaataataagaccatgaagagagaagagatagttgggtgtgacattggtttttacacttactttgcattcagcatttagcctctcagatagaatcaagatttcttaatctagtacctatagcaacatagaagtcgagaaccaagatacaccaatgcaagcatcccagcaacatagaagttcagtcatggccagcagattgtttcctcgagtaaaggaagaagtcgagccttgcagcttccctcaattcccagctattgatcgctctttctgctataccgacagcagccacggatcccatttcttagtcaagaattcccatgagccttattgcaccttggaatcatcttctgcatgtggcagttatagagtctaca

SEQ ID NO: 255489 - DNA, 349 bp, Gossypium hirsutum
gctttttaagaaccggaggtgtctccgaaatggggatagaaatgaaagtgagtgttacgatgatgatgatgatggtgaagagagtaaagaaatcgaagaatttaatttattagggcatactatgtgcctcaaaaggggaagagacggctgttcttcttcttcgtcgtcaaagcgaatgacgccggagcccgatctcgagacgagaaaagcggccgtgaaatcatggggcaatcaaccactcagtgtagcggatcccgacgtgttcgacatgatggaacatgagaaaaagaggcaattcatgggaattgagttgatagcttccgaaaatttcgtttgccgggccgtcatg

SEQ ID NO: 255490 - DNA, 425 bp, Gossypium hirsutum
gacacattgtttttcccttcgatcgtattattttttctcaattaacacttcatatttttcttgttctttcaagaacctaactttttgaagcacatgattggtttgcgtcgtttcattttcttcttcttcgaataaaaagaaaaggatgccagatttgaaagggggaattcgacgatcaaagaggatcaatgacaaccaggagacccctgctgtcttagctacaactgctcagcgtggtggtgctaatagaggtcgaggtcgaggtagaggacgcagagcaatgaaccaggatgacaatgcagtgcttgttggccctggtgcttgtggcaggggttgcagtggattaaacttgccagtgaagcacccggttgagaaaactgctgaaagattggttgctgttgaggaagaaggaagcactagtccac

SEQ ID NO: 255491 - DNA, 103 bp, Gossypium hirsutum
tttctgagaaaggaatgcagcgaaatgggtgaagaagttaaggtttttggatattgggcaagcccttacagctacagggcagagcttgctttgaagttgaaag

SEQ ID NO: 255492 - DNA, 420 bp, Gossypium hirsutum
ttctacgcgtccggaagatatggagaagcaggtggaaatagacgatgctgaatttggtgaaggaatccccgaaacctacagacctgcattaatggctggagactcgcagcatcccgaggatttctttgctgaattggatgagatagagacagaccctctgaatctattgttcccacaaggattcggtggtggtgatcaagatgagcagaaagaaaagaaaacaatggatccttttggtctgtttgattggccaccagggaacaacgatgcttccttctgaaagacgccaaaaaagggtttatagcaagaccttgttttagcagcaacaaatttccacactaaacaataattcaaggtcctcctataaaccttattagtggaatattattataacttgaaaaatctctttgggggagtcct

SEQ ID NO: 255493 - DNA, 438 bp, Gossypium hirsutum
atatttataaaatgaaaaagttagggttttagaatggattgaatgtcggtgctacaactcataatttctcaagaactgtgctgaagtagctgaaagatctaagaaaggttttttttggtttaaactggactgatccgggatggcagagcggggtgtctgccggcaagttaaattcctaaattctcaaggagatagcactgccaaatcgttgcctgcaaaaattgaggaagaatatgatgaagatgataaaaagcatgtgaaaactatgttgatttcatgcccagaagtacggaagagaaaatgcctttcctccaaccaactgagaaaagaaaaagctgcaagatgtgggaaacaaagcttaagtaatggttctaacaagggcaagcaaaacaaacataaaaatactgtagagagatggtctgctgaaaggtataatct

SEQ ID NO: 255494 - DNA, 195 bp, Gossypium hirsutum
aaaaaatatttgagtgtttgattttaatttaagaaagatggggaaattaatttccaaaaggcttggagtgtttgtgatgatatttgtgtttgctataggtatagcagaatgtagaaaacttgagaaggaaacccttggaggtggttttggtggaggcgtctgaggaggggttagtggtggccatggtggtggttt

SEQ ID NO: 255495 - DNA, 452 bp, Gossypium hirsutum
cttttctctctcttatcttcttcttcatctctctagactggttttttaaaagcttttttcagcttttttttgttgttccattcctgccatggattcatatgaagcaacgaggatagtgttttctaggatccaaaatttagaccctgaaaatgcttctaaaatcataggttaccttcttcttcaagaccatggtgacaaagaaatgatacgtttagcttttggacctgaagctttaatccattctttgatctttaaagctaaaacccatctaggtctccccatttctaacccgccttcgccgtctcctcctccgccgttctcttacgccggtgtcgttaatgggtgtgccaaatctttgcatggtgtggccgccgacgacaatggtggattcgtggatgattttcagtttcaagaacatgtttcggattatttgaccggcggtagtgggggat

SEQ ID NO: 255496 - DNA, 440 bp, Gossypium hirsutum
gcggtccttgaacaaattatttcctcttcaaaccctagatctggggttttattttatcttctccctctctattttcccctcccttttcaaaattttcattttttgccctattttattgtttttcgacttatcaaaatcacaagtgcaaaaaagaaaatctcatcttttcttgaatctcagagaatgggggaattaaaggacaacgacgcctacgaggaagagtttctcgactacgaagaagaagatgaaaaagcccctgactctgccttcactaaggctgctgattctgctaagaagttagtcattttaatttatacattttttaaggaaaacaatcattctaatttatacatttttttaaggaaaacaatgttctaatataatctgcaagtattagtgtaaagcaatttgattttaatttgtttcatttcttttttatg

SEQ ID NO: 255497 - DNA, 450 bp, Gossypium hirsutum
cttggttatcaaagactgcccttgagccttctcttgtttatgaatatggccttcttttttctcacaatgagcttcagaaggaggatttagcctatttcagccatgaagttctttcagagcatgggaatttcagttgctaagcataggctggagattctcaaggttgctaggaaggaaattggggaaccccctaagagcttgtccaagctcattttagcaattaacaaaacaagaaagtgtttcaacaagtatgtcaacaagttggttcatcatgataacaacgtgattaaaccgttgccagggccagagccggttcgtcatcaagatcagcggagactagcggtggcgttgttacagaaaggtagcaagaacgagagggaggtgaagatagagcagccgatggtgagaacaaccaggaaggtagcaaaatctggtcccttggactataga

SEQ ID NO: 255498 - DNA, 508 bp, Gossypium hirsutum
ggcggagaatcagactctatgtcgctttcaacgctaaaaccctaattctctcttaaaccctaaaattattcattggaagggccatttgccaaatttcactctttttcaacatgcaaatgcccttgagttgagcctctccatcttccccccttttagtatatctcaaaaaatcaatgttacccacttctatttcaagcatgaaatctctaattttccctcccttttctcccttatctcttcatttccccaaaaccaaaccttttgccttcttctctttaccctcaaaaacccccaatgtgtcgtaccccaaatttctccacgtaaacccttcaatgcctttggcaaggacccccgattttttcaatccccgattcgacaatcgcatatagagacaccccaatcttcttcgctgtgcggtgaggtccacgtcatcgtcggacccatgtttgctggcaagactaccactcttctccaccgaatccaagctgaaagcaacaatggcagaact

SEQ ID NO: 255499 - DNA, 475 bp, Gossypium hirsutum
  unsure (1)..(475): unsure at all n locations
ggattaacaaaattcgagttccccaaaaggaaacatcaacaaagccatggctgaaactacttcttcaacatcatcccccaagcatctccagtcgccaaatcccttgttgatggacccttcatcatcggttccgacaccgccaccgtcatcggcggcggcgtcaaatattaacccgacgcagacggcgacgccgctaacagccccatctccgacagcgacaccaacaacaaatccctcaattgatccctcactgcaaaatttgcagcagcagcagcagcaaatctcgcaaatttcgtctccgcctctttcaaatctcgcccaacaacaacaacaacagcaaatcttgcaacaacaaacgcaacaaggtgttgggggtttatcaaattttcaagtgcagcaaaacctttaaagatcgccgtcaatntcacgtattaatcaactccaacaccccaaggaacatggtcatcactgatcc

SEQ ID NO: 255500 - DNA, 379 bp, Gossypium hirsutum
gcggctgccaacgccaagagcgcgacgtcaagcttcgtggacggaacagtagttgccaatgccatcaacactggtacagataatatgaacgtgatattttgaatttgaggtcactgataaaggatgagggaatccgaaattatgttaagtgggcgccaagctaatgagtttacaattgatatgcgagcgagtgacaaaacaggaggaaaggcgtttggggcctttacctatacagttctgaaggtcatcaaggagagggaaggtgcatcaaccaatagacagcttgtggtgagggctaggaatgaaataataaacctaggaattggcaagcagcacccttgcctttattgcaatgatgagaatgctgatacaggttttc

SEQ ID NO: 255501 - DNA, 519 bp, Gossypium hirsutum
gcgattcaaatcaaaccagtactcaacctcaccggatttttctctctcacgggatactccgccgaacttcactccaacgcccaatttctttgctcaaaacgccgtcggttttttttttctgtcattttgtaaccgtctctgcaaattgttctgcagaaaagaaaaggaaatcttttgaaaaacgccaatccaagaaaaaataacagttccatgaaaagcttaactgcaaccaccgtgctccgacgcgacgtcagccgtcgtcattactggaatcttctaattctttcattttattaaataaaaagaaaagcaagttcaattctatgcatcctctctgttgtatttccaccgtatcggatcattccccagtcaaacctttacccgacaacgtggccatgcctgctcatgcacctgtaactaccgtaacgaccttcctcttccggctcttcatttagatccaactcggttcgatctacggtccaaatcctgtgccagtccgatcaaaatcagaacaatcaa

SEQ ID NO: 255502 - DNA, 329 bp, Gossypium hirsutum
gtgacatgaattaagggaatatgggtacaaaggaggggaaatatttgataagtaaacaaatgagaaaggaaatatgaaatcatgaagatgatttcaaggaaattagattgagtaaggagttttgataaaataaaaggaaaagacttaataaaagaacatcattgtatatgagggcagaagaagaaaaacatctacaggcagattgaaattagagtaattgagaaaaacgcaatggctcaaaagatgttgatgatggcggtccttgtgatattggggacgaagatagcgacatttaccgatggtgatccgacttgtttgcagagcttgat

SEQ ID NO: 255503 - DNA, 458 bp, Gossypium hirsutum
acattggtggtagcaaaggagaagatgatgtgctacgaggaaatccgtcagaaacgtgtggaagaaaacaagaaaagaatggaagccctcaatcttccacagctttctacacttcttcataccccatctttcaaaccctctccgagaaaacagatgaagcctcggacagtcgaaaaacaattggttgtggttagaagatcgagtcgtgtcgccaacaaacccgccccggtttaccaagaagtgagtgaaatcctcgattctctttcatgggtttagttaaaaatgggggcatttatcttaccttccgccccggtttaccaagaagtgagtgaaatcctcgattctctttcatgggtttagttaaaaatgggggcatttatcttaccttgatctctgtgagtaggttcttgttgataaagtgatgatacctagaaggtaatgcttgtttggattttttt

SEQ ID NO: 255504 - DNA, 459 bp, Gossypium hirsutum
  unsure (1)..(459): unsure at all n locations
tggaaccagccaaatttacttttctggcctgtgtctccccagagagggaaagctgctatcggttaacctgcttcttccacaaacgagatgtgaaagtttcaattacttctgaacatgggtgttaggaaaggcagtacgaaatttattggaagggctgtttggttgatgatgaatgttcttttatgctagagaccaattttagtgcattcgtccggggtaacctgactgaaaaagcttaacttagctgcgtggcaaccaaaccaccagcgaatgaacatgatggtcaattccttggggagctgtatttaatgaacatagttcctcttcctctcccatttgacttcctaaactgctaatcaatagtcatctgaatatacaatatttattcggagtgactgatatttttgatagctcagataataagatcatctctgatatattttatcgattgangaaaat

SEQ ID NO: 255505 - DNA, 356 bp, Gossypium hirsutum
cccacgcgtccgcggacgcgtgggtttagaatgtaagaaaacctagaaacttccctctctattcaatgaattggagctttacttgtgtggggaagatagctcattgcaagctcctaaataatcagtcaaaattaggtattttgcattgctctagtgtttaaaagggaaaaactgtaactatagattagggttttgtatttcgtgaattagggattcctaactgaatttggtactaatttgtaatttgtgattgtgaactatgggtctctgctttgtgaggtaagcaaccaaatgatgtatagcatagttttgcacctaatcattgatctttataataggatggcagttagttggat

SEQ ID NO: 255506 - DNA, 363 bp, Gossypium hirsutum
ataccaagtcggcgttctcggtctcctctcacctgctccaacacccccctttcttttcttttcttttctttcttttctccctgtttcttgggagggacttgcctgaaactttgggtcgcttatcgttcccacaatccaaaaacaatttcaacgcatcaatcttcttcttctttttttttttttaagttaatttttttttgtttccttgttttcctacttgggaatctcatatattttatatgtcctaaaatttaatagagcctactgaattgatcaggtgagttattttacttttattttctcatttgacgtccgaataatccatactctctttttttccctcataaattcttttcttaattt

SEQ ID NO: 255507 - DNA, 365 bp, Gossypium hirsutum
gcgcgcgagggccgccctattttttttttttttgggggttttttttaatttttttttttttttttttttttttttttttttttgggcaaaaaaacaaaaaccgaaatggagttaatggggataatggaactttgggacccttgtccaaggatttggaaaccaggcccttgaaaaaaaaaaagggcccggaaggccaaaataatggctaacaaaaatttcaaaaagaaaacccaggaaaaggaaacaagggggagaatggtctgaaacaatcaggggcatttgcaaacttgcaaaaagccccctttcaattggcaccgggaaaggggggtcggagcaacctaagggcaggaaccaagggggggggg

SEQ ID NO: 255508 - DNA, 388 bp, Gossypium hirsutum
atgggattctcctacatctgatccttcatcaggttctttgcagaaacctcttactacatgcctcactgtttccatgctgctctctgtttttgacttttttttaaataaataaataaaaaaacttaacccttgttgtttaatctttgatcatatgaaaaatatttcagctatacttaaaagaaatcggtcacttactaaagaagagattgaagctctctggagatcaaaaaggaaaacagaggaagagcatcttaatgctatatatggttcaccagatagttgcaatcagcaggtacaaattatttgtttgataatcagtgtagcatggtaattttgtactgaactagtaccatcttttgacatctatataacatgaaactccattgat

SEQ ID NO: 255509 - DNA, 420 bp, Gossypium hirsutum
attattatcatatatgaagagtttttatttttggggggcttagtcgagattggatcggtagaaaagtcgtttactcaacactcttactgtatcgaaggcaacttgtattacgttatctttcaattccagctcagttcttacgaacaaaaaggttataaaaatgtcaaggcctctgcactaggtgcacctgcaatacgggtcacaagcagcagcaatgatcttttggactcccaagtgaaagaacaaacagaaaaggaagaattggatagaaaccaatcttcccacaggtttcctttttggtcacttttttcagataattctcctcttactaaatacgatgccactgacaatggttttgcatctgatcctttcactgttggaaccccaagaagtcgccataggttaacaatgctacttttg

SEQ ID NO: 255510 - DNA, 390 bp, Gossypium hirsutum
ttttctctcaaccctgtggatcctcaaccccgagtccagccaaatctagcaagccaccaccgtaactccgccgtgggtggtggccggaagtgccaaaatcaggccttttcgaccccttttcaaccccctttttatttataaaaaaatttgaactgctacgtctgtttttaaacaaaataaagagcgagattcgtaaaaacaaatggggatagaacaccgttcgatccctcgaacgaacctccccgtttttgaggtattcgagttctcatcggcgactactcaggtgcaaagatcgtggcactcagcgtacggaggctgagctggcgtacggaggtgcgctggaggccgtatgtgggggagcggcacgaggcacatgggggctagggtttt

SEQ ID NO: 255511 - DNA, 493 bp, Gossypium hirsutum
ttctttcctctcctctcctgggaggtcatttttgtctcaccgtcgagttccgctggttcttttccggatctgacccgtatcccgtgtcggcacaggtactgcaccccaaattgccgagtccgggtaacgaagtttataagtatgttcatctcaggtgaagatgataagaatgaaataggtactgaaaatactgcatttgtgcatgggaaaccacctcaagatgctgctggacctccgaaagttgaatctgatatggaaattgttgatgagaatgaaatagttactgaaaatactgcatttgtgcatggggaaccacctcaagattgtgctggacctccgaaagttgaatctgatatggaaattcttcatgaaaaagtaaaaaagcaaatcattaaggaaggccatggtcaaaagccatcaaagtattcaacatgcttcttgcactacagggcatggactgaaaccactaagcataaatttgatgacacatggc

SEQ ID NO: 255512 - DNA, 456 bp, Gossypium hirsutum
aaattagtgaagcgtttttcgggtcatcacgtaggatccagagatcgtgtttgatggagaaattatgagcatcacatcacttttgaagtatatttgaatctttttgctcggttgatgatacatatgcctgcattgtgttgtttgctaatggggatgaatgtgggggaattagaggccagtggtttgttatgtattaactgagtgcaactgactacatgtaggatgttaggcactgaatttacttaaaatggttggttttatggttgtgccatgactgcttccagcattcttgaaaaacaaaagaaaaagggtttaagcttctcatattgtaatgaaaagaggacacttgctggttgggggtcttttattaggaagaaaagggaggtgagaactaatttcagataatgagggaaatgaggaggcagttcagtgtaggttattgaacttggaattggg

SEQ ID NO: 255513 - DNA, 441 bp, Gossypium hirsutum
cacttcatgtattggtttccagcattggtgcttaaatggaatcattgacagcaattgaagaaaaagtaagagaaattagcaatttgcgggaaacaaacaccaaagaaagtaatattcatctattattatttgcgaaacagagcaattggcaatggtttgcaggtttcaactctctcaagctctaaaacacaaaaaatgcagtaaaaagaaacaagctttgtcactttgtcttatcctctgatatacctagtcatcttcattgtcctaatggtttaatcaccgttgttttttaagttaaacctctacttgtaaacacaaagtaccctccattatcagatatgattatctgctacatttcctagaacacctttctggcataaccaaaaacctaagctttttgaacccaatttcaagtttaacaacaacaaaaaagtttggggt

SEQ ID NO: 255514 - DNA, 510 bp, Gossypium hirsutum
ctcattcgtccgcccacgcgtccgcaaagaacgggggcatttttgtatcattcaaccgaacctgacggttccttgccctatcgccgttttgcttccatattttagctggcggacatcgtgcgaaggcctaatctggcctcgctggaacatgaatccgagagttttgctaggcttaacctcaatcctcatctaggctttgactaccacgaagcaaacaaggatttcaaagcctcttccagaagataagcatctacgcctttatttatttatttttacttacaataatgaaaatcaaagaagaaatagaagccaaatcaagagaagaaacgggacttaaaatcacctcttggaaactgtttttgaattcatttctctattcaaactttttgtacagatttgtatgcgtatccccctctttttacatcctttcattcggttttatagctgaaaatagaaaataaaataaataagagaaaatacaaattttcctactgtcatttgctattattt

SEQ ID NO: 255515 - DNA, 114 bp, Gossypium hirsutum
ctcgattttctctttagccaaaagagggggcatatttaagtcaagactctgatcggcaagacgatcactctcgaggacgagagctccgacacgatcgacaacgtgaagaccaaa

SEQ ID NO: 255516 - DNA, 254 bp, Gossypium hirsutum
caaaacccatttcctcttttgccgagggggcctttgacaacaaccggggctttgatccccacatttccctctttggggatgcaagggttgaagatggaagctccgatgtgcagctcacgcgtcctcacgcgcctagttccgggcttctattgctagacaagccattgaagctcacaatggaaaacaatgtgggtcaaccggggtcgtattcaactgagttttacttttctatagctcccggtgattgtgatgga

SEQ ID NO: 255517 - DNA, 445 bp, Gossypium hirsutum
tttattcgtccgcccacgcgtccgtaaatttccggaggagctgtttaactgcgtcgctgtcaccttaaaaatcatatctcgagttccaaaactcgaaaaccagttccgtaaatgtttcctgaaactagactcatatttccatctacaattttttttctagaatttttggtcgagccaattagtacagttttttagttaaattctcccctgtttcagtgttcgactacactgacctttgcgcattacaacttggatatctccctgtacagggcttcaatactgattccgtttgtttctatagaaactagtctcgaaaaggaatctacacatatattgcatgacttctaattatctctggttaatttataatgaatttccaaattcggaatagggaatccagaacccgttctggccctgtttcgcagaaacttaaatatctcacaat

SEQ ID NO: 255518 - DNA, 428 bp, Gossypium hirsutum
aaagtttttataatacttgactagccttttcaagattggtgtcttctatttagttaattttataagtttctctctttcccatgtttttgtttgatggtagaaatagattctttaccatgttttcaatagtcgaaatattccaccaccacctgattctaacattcctaatagtgccttgttggaaaagagaaattttagaggaataaaggttaagaaagatgattagttcctatcagcacgaaaagctatgggatacttgtgcgtctagtatctatgatttctttctatttgaaaatctgcatggcttcacgtgatatgttatcaaattttcaaggaaaatgtgaagttggattgtaagagtaaagtgtttgtggacatgcttctaatatctcaagtgtttcgcattgcaaataaaaagttgaatgatt

SEQ ID NO: 255519 - DNA, 441 bp, Gossypium hirsutum
gcaatttttgccttgatttcagttggagggatttatggaggaagacgcgatcaattacatcataggcagaatgatctccgatattcgccttgaaattgaacctgttggtgaataataaaaagtgaccttgaccacctcagaaacacaatgtctgcaatggaagctgtgcttcgaggcgccggagagcgatctgcgaccagcaatttcacagttcggcttacaaatccggaggatgaagagcaacccgtgaccgactattctttccaacgatggcttaaagtgaaaaaaaatttagaaatcatgcccattgattcggcaagaacagcttttccagaagttcgtcggagtaggatgaagatgatggaaaagatgggttatggcatggcaaaaccggagcatcagtctatgtcgaatggaagcaagaaaagatttatgaatttt

SEQ ID NO: 255520 - DNA, 409 bp, Gossypium hirsutum
caaatttttgacggagcagatctttcccaccaaatggggctttcagtaccacaaatgcctcagcccaacaacttacagttcaatgctcataggctacctcagaaagtgcagcaacttgatcaagttccaaagctaccatctacaatgaactcactgggatccattattcagccgcaacagctgaatgacatgactcagcagtcaaggcaaaatttggttgctcggactctaccctctagtcaagttttgcagcctcaagcccttgtccgaagtaacaatatccttcatcagcagcaaacatctaatccaactcatcaactccctctaagtcttcctcaaaacctgcagcagcagcagcagcagcatcttgtgggcccaaatcatccgcaaaacttaatgcattcccagc

SEQ ID NO: 255521 - DNA, 454 bp, Gossypium hirsutum
ttcttagttgcttaaacgctgaaccaatattcccagggatggtttaaatccctctcagaaatctgctttcactcatccaaaaacgcttccttcatacccaccctaccctttcttctatttcaaagccccgcccttcaagctccgctcttccactctccaaacgcctcataataccccgagatccgcccctgaatccttatccctcttcaaaaatttggaatcttacggattcaacactacccaaatcgccacattggtcgaaaaatgccccgaaatcttgcattccagatttaactcaaagtttaagcccaggctcgagtatctaatcgaaaagggttttaaaggtataaaaaaaaaagagtctggaaacccttcaacaatttttttttgaatcataatctacactcctttatacccctttgagggaattttcacgttttcaaaaaaaaaatta

SEQ ID NO: 255522 - DNA, 210 bp, Gossypium hirsutum
gctttttcgggttcctagaggtctctaatcaacccggagtttctttggctgcctcttgaccttatctctctcccggcgagattggatctaagcgctctgacatatatctatttttactgcaacctcacttggtgcctgcaaaccggaagagaaaccccaatttattaacttccgaggggatgccagttaggggtgtactggatctaccac

SEQ ID NO: 255523 - DNA, 356 bp, Gossypium hirsutum
cgattgtgtagacagccctgccaagcctacttcaactgttaatggtttagaaccaatgattagaggcattgaaaagccaagaaatttggaggatgtgtctgataaaaccaaaccttgggagctaaccgagattgttgatcctactcaatgtcgaacagtcaccttgccagataactctgagattgctagcaaggttgctagacttctttacacaaattctggtgttggggttcttgctttatatacaaatggggttcaaaaactacttctgttttgaaatgcattcgagactaatgtttcctgaacccttggggtttcaattttattgttcttaatgaacaaattggcgaatttta

SEQ ID NO: 255524 - DNA, 286 bp, Gossypium hirsutum
gttattttctacaattttcatcatttttaccctggagtgtggggctattgagacatatattttttcctatattttggaattatttttatgaacaatgtactgagaccttataaaccatttattgtgtgaagaagatatagtttgaataccatgggagcaaaatttccaagccctattaatagtctccataacttggaaaaccaagttcaagctctctttacgaaatcaataagtttcaaagatgtgaatgtgaagacagtgatgcaatcattcagttacaacaggc

SEQ ID NO: 255525 - DNA, 449 bp, Gossypium hirsutum
cccactctttcggaaagatggaaaggaaaaaaaaaggggggggactatttagaccttagtaaccaagcaatcgaccataaagcaaactcttaataactaaacggcagtgataaacagtcattcattagtttggatcactgatcctttcttcaacaaaattccattcaccccccattccatcttctcccgtaatagccatttcccaccagaaccaaagaatagtaatgcagagcctccaccgaataaagaaaaaaacataaccttccattcttgcccttcaccactctccctcagcaaacacctcaagccaccacacccccatccctgtctcctcgtttccgttcgattattttcatcccacgatagagtttttgattttgagctttgaatcagttacagagtttttgagcatgaaaaagaaaaagaaaacagagataggggagatgagg

SEQ ID NO: 255526 - DNA, 250 bp, Gossypium hirsutum
ggattacctttgaagaaagcaaagaagctaacacagctacaggtcaagcaagccaccggcattcaaggggacttcatgacaagggtcatacggatacgagaaagctgaaattggaaggtagggtggaaacaatgcaagcctcgcacaattcgaatgaagatgagctttctggttttgaagaagctcggaatggaaatgctagaaagcatatgcctggctggcctggaagctctaatgtccatgatacaac

SEQ ID NO: 255527 - DNA, 200 bp, Gossypium hirsutum
  unsure (1)..(200): unsure at all n locations
caattttattgaagagatttttggacaagacacctgggataagtgcagatagttgctcttgaaaagtccagaatcttctcagtcaagaaggctatgattttggttatttaattatttatttttcttttattactcccttgtaaattcatctactaaatgtaatttgcttcagcatgttaaaaagtgatcttaatnngatc

SEQ ID NO: 255528 - DNA, 271 bp, Gossypium hirsutum
ggaccctctttcaaaaccccaaaaccagacacttttaaactactactactatacaaggccccccctcgacgtaaaacaaagcaagctctcgcttctttctttttgcttgctttgatttctgactttaggggttcaaagaggagggatcatttcttgctgtcttgggtgtgattttggggtattcaagttatgggagaaaattttgagaaaagagtgaaaatttataatataaagctatgcttgagttttgccgttctggtgaatgtattgg

SEQ ID NO: 255529 - DNA, 500 bp, Gossypium hirsutum
cctattcgtccgggcatttcctcttcgctttttgtagacatccatctcgtctccagttggcctctgaaattccacaccctaatttgtttctttagggtttcttttttcaagatccaaaaatccattttttttcttgttatttagagaatctgaatcgaaatcaagttcataaaacatctgaaaaacaaattttggattcaattattccaggtattttagattcctttaaagtttgatccgacgttggttatcagatggcggatcaacaagaagaagaggatcttagaatggctctacggatgagcatgcaaaactcgccgccagagccgaagaggagcaagccgagagaagccgcgaacttagcgacgacgacgccggaagagagtcgccggttgcagcgtgaactaatggcagctgcagctgagaaacggatgctggcgacgggaaaaagcgttccggcttctggttcccctctgaaaagtgatagtggcggagatata

SEQ ID NO: 255530 - DNA, 423 bp, Gossypium hirsutum
gattttgagcgtccgccctttttttttttttttaaaacaaactgacttaactattactatttgggttaggattaaaatttcaaaattcaaaaagtataaggattacaaatgaccaaataaaagtacaaggactaaatccacaacttttgcaaaatacagggactaatagcagaatttaacttctaaaaaaatatagctaaattttacctcactgaatagagatgtccgaagaaattcggagctgagcgtccaccccaccgctcaccacgcagtcacccttccaccagtctgcacataataccttgtctttgtgcgtatcgatgatagaaacaggccacgctgttcttagatcccacaacattactttcccatcataagatgaagaaagtaaatgaagaggagacgtattgtgccacttgcaag

SEQ ID NO: 255531 - DNA, 253 bp, Gossypium hirsutum
ctcatgcgtccgcggacgcgtgggtcgcccacgcgggcgggcttacacggcggtcctgcaataatactagggagctttcagcagcagaattattacatcgaatttgatatggcaaacaataggtttggatgggctgaacgaaggtgttagtgagctgcactttgttattttgtgttttggccttgaatatggaagtcatctttttcttttgcttctatttttaatggaatggtgacaaaagggttattagctt

SEQ ID NO: 255532 - DNA, 391 bp, Gossypium hirsutum
cccttgcgtccggtgaaacacaagattagtggtttgagtcgccttttacactcggtttggcgcgtgcgagattcttacctcctcgaccttcgccctataaatccagcagcccaaatttgaaaatcctcgtcaaaagaaaagtaacttaggctacactttagatttttctttctttttgaaaaatttggtaaagggaaaatgggaagtgaagctgggattgtgaggaaacccagatttcttggcctccatggatttagaacaagtggagcgattctcaagacacagatagagaccaaatggcctaaatcggtattggaaaagatcgatatcgtttacccagatgcgccgttttcagctcaggggaaatccgatgtcgaagggatcttcgatc

SEQ ID NO: 255533 - DNA, 210 bp, Gossypium hirsutum
caaatttttaaatcctaggcgacgacgaagagaaagaggtgaaatgttgaaaggggaaaagatgttgtcttacgtaagcgtgttgttgtacggagtgggatggatagtggtggccgggatggcgttgctggtagcgttttaagagaagctcgtttacgttccggttttgccgggtctaactaagtcttacccgataacgccggcccgact

SEQ ID NO: 255534 - DNA, 436 bp, Gossypium hirsutum
cccatttttccgaaaaaaaaaaacaccattgaagaggtgcgtttttttgtcaaaaaaaaaggacccagattctcaaactgggtttttagctttcatttttccaatgtataaaccttgaacactcctttcatccacaagagctctcttttatgattttgtttttcattttgtgtgtgaaaactagcaatgggtaaaaatgtatcagctttgtgtgtgatagctcctttgcttcttcttggagctgtctcttcagctcccactacttcttcacctgcaaggattcttaatgggtttttctctaatgctttatctgcttcactgaaatggttatggtcactcaaaaccactaccaaaacagctattactgggcgtccaatggtgaaatttgaaggtggatacactatagagactgtgttcgatggaaagaaacttggga

SEQ ID NO: 255535 - DNA, 302 bp, Gossypium hirsutum
attttatacagaaacaccctcacttctaaatatctgcgtgtctttttacctttttaccaattcccagctcttttttttttccatttctgtcttaagtctcaccatctcttacaaagtaactcaatccttgcaattagctgtaacagatctgtttagagctgaagctttcttcataagaagcagtgaattgcagatctgttagtctggttttggatttttaagttgtgggctattatcttgacttcaatcagtgaagagcaaggaaaagaaaaagagggaaaaataaaaatcaaaacataccc

SEQ ID NO: 255536 - DNA, 283 bp, Gossypium hirsutum
  unsure (1)..(283): unsure at all n locations
cccacgcgtccgcccacgcgttcgcccacgcgtccgcccacgcgtccgcgagcctcgaacggaacccctcgggtcggacttttccgtcattcgaaccctaaattaggggaacagcttncttacttcatnctctcttctcttcgtggccccgctcaatccgccagagatttcgatagagtttggccgatttttgactcagcgcaatctcgtgattttcgaaaggttgtgcaagggataattactgagctggaagcacaaggagctctaccgaggagtaattcga

SEQ ID NO: 255537 - DNA, 351 bp, Gossypium hirsutum
gatgaaatagaaaaacccaataaggaaacatcgtaggagaattggtgtttttggattcttgtttttacccaatatatatttacatgctttttctcctttgatttaactctttttcctgatatgtataatttctgggattttttattttctaaaccgcctttggattaatcccacatcggaagtgattggttttgagtaattgagggttaaagtggtggctttggcctttgggtgctttaaaggcgactttttcataaatctaggttgagggtattgaagctttttatcgtatggatctcatgggagaagtattttatagctgatttttttttttttatctttggatgtatc

SEQ ID NO: 255538 - DNA, 404 bp, Gossypium hirsutum
gtttaggagctctagtgccactgtgctaaagcctggtaggaataaaatcacctttcctttaccacctcaaaaacctggatcatatgtcctcggagttcttactggacacattggacacttgacttttagatctcacagattctccaaggcaggtccagcagatagtgatgatttcatgagctatgagaaaacaacccggcctgtcttgaaggtttccaaaccaagacctctggttgatctatctgctgctatatcatctgccttgctgattaaagaagctcagtggattggaattatagcgcaaccaataaactactccttgaatggtgctgtcatgcatattgatactggtccaggtctgaagattgaagatgcgcattccatcgagatggagacctacataa

SEQ ID NO: 255539 - DNA, 359 bp, Gossypium hirsutum
cccacgcgtccggtttgctgccatgggaggaggagaagaatacgaagaggaagcaccggtgctacaatcgaagccccgaggccgccacataaagaaaagagctctcaaaaacaaagcactctccgtctctttcaacgagaaggatctcagggattacgtttctgggtttcacaagaggaagaagaagcgaagaaaggaagcccataagaagcaagagcaggctgaacgacgcatgcgtattgaacagcgcaaaaagagaaagttagaaaaagaatttgccctatatgggggagcacttcccaagacatgctcgggacctgatggaattgatgagaacaacgaatatgatgaacaaagag

SEQ ID NO: 255540 - DNA, 223 bp, Gossypium hirsutum
tcgcggtcgcgtgggttgagatcacaaagaaaatcagaacccaaaaggcaaaatagcaaagaaactatgaaccacatgcatggaaaatgtttgattcaaggggagttacatagagaagtgttcggatcaaagaggaggttgggttgggtgaatctgagccgcaaggcattggagcatgatgagtgtctgatttgcttagaaaggttcaaggctggtgacaccc

SEQ ID NO: 255541 - DNA, 460 bp, Gossypium hirsutum
acccaaacttccgactcttgctaccgattccgttccaaggtttcccgtcatttatctcggtcccccattaaactgcaaccgcctgaggagcccacttccttggctccctagcgtaatgctccggcactgaggacagtaaccttagcaccggcagagagagcaagtaaccgtgggtagaccacccaaacgtccggtggggcgtcagacaacaccaaattatagtcacagcccctgctagcggggtggtccggctgataataagtgagggtcgggaagcaaaaaccgcccgctgcagaaaaagtgctggcgcaaccagtagatgtatattgggcgaaataaacccccgcaatggccgcaatggcaggggacagggttacggccactgttgagatagccaagctcgctagggggagtcataaagtactgcaacatggatcagaaactaacaaagctgtgcctg

SEQ ID NO: 255542 - DNA, 278 bp, Gossypium hirsutum
ggcggtgcatatggtgcttgaggtgcaaatgagggaggatatggaaatggtggcaaagccggaggtggtgaaggtggtcactattagccttgaaagtaccttgtcacctttaccatatattaagagtattaatgttgttacaactggtactaaaaaaaataagagtaatttgatacgtaatccaaaatacttaaaaatatcgtatgaaacttatagaatccaaatagatgatgttaaaagttatatcatatgataatattgaaatgaatctatcattt

SEQ ID NO: 255543 - DNA, 213 bp, Gossypium hirsutum
ctcctgtaagagggacttcaatgctctgaatcattgggtttggagtattgggaagtgtataaatctcagtgtcagtgaaaaaacaactgtcactgcgataaccggacgttgataccttacgtgaacgacccatcacctttgatttatttatagaggaagctcacaaggctatagttgaaggagttcttttcatcatttcgtttatcagacaag

SEQ ID NO: 255544 - DNA, 312 bp, Gossypium hirsutum
cccacgcgttcgtttgtgacatctccttcttgtaatgaaaaaatgagacaaaaaaatcaaaagaaaaaaaaacaagagaagataatgcaagaaaatgaacggattttgaaagaaatcgagaaaaaaaaagagaagaaattgaaaaagaaaaagagtgtgaagagaaagaaaaagaaatcgagaagaaaaaagagaaacttgaaaaagagagtgagcttaaagaaacacaagaaacgagtgttgtggaagaagagagaggatttgaaaaagagtttgaaaaagaaatgagagaaaaagaaatgagtgaacaga

SEQ ID NO: 255545 - DNA, 116 bp, Gossypium hirsutum
cttgatactcccaacattacaaacataccgccgtttaaaactgttaacttcatgccgattgctatctttttttcctcaaccccaattcttaaacgcccaattttgggaagctattt

SEQ ID NO: 255546 - DNA, 105 bp, Gossypium hirsutum
ctgtattgttttctccataacattcgtctctcagatcctttgctcttagatcatcaaattcattccttttttccaccaaaacatgagggaaatcataagcattca

SEQ ID NO: 255547 - DNA, 258 bp, Gossypium hirsutum
cccacgcttgcgattcatcccccattccatcttatctcgtgaaagccattctccaccagaaccaaagaatagcaatgcagaacctccaccaaataaaataaaaaaaaagcataaccttccattcttgtgcttgaccactctgcctcagcaaacatttcaagccaccacaccccatccctatctcctcgttcaaggatgagctattaatctgtaatttcaccaagaaaaagaaaatagggataggggagatgaggaaat

SEQ ID NO: 255548 - DNA, 115 bp, Gossypium hirsutum
gccaaatcctccgtgtagacttattgagtcaactcgactccatttttagtaggataatccatccctactcctagtgaagagaggtgaaacgcatcatagtatttcgttacccatt

SEQ ID NO: 255549 - DNA, 200 bp, Gossypium hirsutum
cccacgctatcgcggacgcgtggggccaaaatgcaaacccatggtatctttttcctttgaaaattaaagtgaaaaaaaaaacgtattcatgcctttcaagtttcaatggtctatttaaaagaaggcaaagcttttgggcaattgtgctccttagagcatcggtctatgtcccacactttctctttccaccaatatttgtt

SEQ ID NO: 255550 - DNA, 300 bp, Gossypium hirsutum
caaatcataaatgaaaaaggtcgaaattccaatattgtttctcagctccatgttcttgatggtagtagcgttgcctattaggctgcctataataccgcgggtgcgagcaaatccgcctcgacttgtcccgctttgcacttcccaactaatgttagtgaactatgcatgtggaacagtgccattagtcccatccctatttctatcttctaacacaccagatgtaggaaatgagaatggcaatggaacaaggagtagtcaaggagatggaaatgggatagagaatggagcaggagaagggga

SEQ ID NO: 255551 - DNA, 126 bp, Gossypium hirsutum
tgcagtctgttcaagcctagctcagcagactgaaaaagatgggccctggtttacccattatcttcattaacgcctgagctcctgttctggaccctcaccatcatcatttgctccccccgtcacaac

SEQ ID NO: 255552 - DNA, 225 bp, Gossypium hirsutum
gcctcttgatttcaacacattgagccctttttttctctcttccttaaaaggaaaatgggaaaacagtttcacccaataacaatttcagtagtaaacaaagcaaaaagcaaacccccaaaattagttgaaaagaaaatgcctacactaccggacaccatcaaaaccttgaaattagagagatacaacaattatctccaaaaaactcacagcaccaaactcatcact

SEQ ID NO: 255553 - DNA, 133 bp, Gossypium hirsutum
ttaaagatagagagaagatattccccaggggaaaataaaaccaattttactttataaacaccaaaatccctccttcccttaaacctcccttcttcttcctcttctgtttcgagctgtgattttctatttttat

SEQ ID NO: 255554 - DNA, 427 bp, Gossypium hirsutum
tgttttatgattccaggcatgatttctttcctgggctttttcctttattcttattatttattaaaaccgattttgtagaagcatggaacaaataaaaaaagaaaataaaaagaaacggaaaacagaggaaaaaaggggaaacaatcagattttcccttttcaaatatttgttctgccttttttattcactagtgcgcgttcgtaaaaagaagaagaagattacaaaggtgaaatttcggcttttatagccgatctaaacaactcttgatgtctatttttttgttgctttgcgatttggctgcttctttctgttgcgtgtctattgctctttgcaggtgacagaggtgtcagagcatgcggaggagaggcggctaggagcggtgacagccaggcatggcagaggaggcgaaacggcgctgggggcatg

SEQ ID NO: 255555 - DNA, 105 bp, Gossypium hirsutum
gtgtccatcagtgataatgctggaggcattggggggatgtttgacatgagccacatatttccagagagaactgatgctcttgatgctgcaggaaacaccactgct

SEQ ID NO: 255556 - DNA, 104 bp, Gossypium hirsutum
ctcacgcgtccgaataaagattaatcgattctagttgtttatctgacccagggtttttgttcccctaaaaccctaataagctcaatagctaatccgtctcactg

SEQ ID NO: 255557 - DNA, 198 bp, Gossypium hirsutum
ataaaacccacttccatgtccaatatcccctggattctttatcaagcctttcattatcaattctgccttttgcctttacaaggaccttcatttctggtgcaagatagctccattccagcttagattcatgtccacatttccccacaaaaccaattatcttcttttacttatttaagctcctttttttttcttcttctt

SEQ ID NO: 255558 - DNA, 109 bp, Gossypium hirsutum
tcggtaaccttcttctgtacagcaggcgcttgcaagcacctgtagagcactcaatcatgttcccgccggcgtgaaagatgcgagcgataaaaagattctagctgatatg

SEQ ID NO: 255559 - DNA, 428 bp, Gossypium hirsutum
gcttctgcttcttccacacaagctgaaatttcctgcatacagaccactctcagtcacaggtacttttcattctccatattccctctctcacctataaacttcaccactaaccgtctcttgtaaccttctcacatcctcttctccaaactttgagcaaaacccaaaaagcaaacagaaaaagaaatgaagattttttcttcttttaattttctttttgatttaacaacatagtgaatttggttttcttcctggcttatgtatgttttttactttgatctcttttgatatgttctcttgattctgtttttgacaaaatcattcttttctgctttcccatctgttttgctttatcccctttgctttgctttatctcaaaaatcttatgctctctttggtttgagaaaactaaaaaattacaacttcttctc

SEQ ID NO: 255560 - DNA, 447 bp, Gossypium hirsutum
gctcactactctttcgagctcaaattactggggaagtccctacaagccgactctgcagagcagttttggttttccttggttgttttacttttcatttagcttactttgttttgctttgggttactgttttctaattttaacaccgtcaaggactttgttgttggtttttagggtggtcggagaatgagatgatgaactgaatgtttccctattggtttgattgccgtgatgatggcatctacaatgtattagctctatctgatcattctctttaccttttgcaaattgatggcaatgtttttcttttttttttgctattgtttttgacaaattttgaaactttgctatttctctccttgttaagtaattgtgtgctttgcttttgggccccgaaaatcaaaacaaacaaaaaaaaaaaagagggaaccccatttgtactcagtttac

SEQ ID NO: 255561 - DNA, 268 bp, Gossypium hirsutum
gggaaaggcaaccagctcgcgtgtagaaattgtttaatcacctggcacatttttgtcgaccaacaaaaaagaaccaaactcagatttcagctctctaacacacagctgcgatggccattttcttcttttccaactacctcacaggcctcatttgtcttggtttcttctccaaaatcttagctgcagagcacagttcttccttttctttcaaaagttttggtaaagatccaaaattcgagtccaatattggtttatatggggatgcaca

SEQ ID NO: 255562 - DNA, 333 bp, Gossypium hirsutum
cttgatcgcgagcggccgcccttttttttttttggtaggactaaaatgtattctattgttttgcattttagatcctattgggagcaaacttgtttcctacagtcctacacatctacacaaggcttcactttacagaacgacctcagggaaagttttctacatcaacccagtttttctttttatcaaatctctgaatgaaagatatgatgggagtatgaagtagattttacctggcattagcgttatgcctgtgagtctgattctcatgatgatctatccaaaaaatctggggctgaacagtagtaaatatattcctgctcctgctaatctggg

SEQ ID NO: 255563 - DNA, 120 bp, Gossypium hirsutum
atgtcgcgtgggttggtagagacgaaaccaggggacatttttaaaaagtttagtcattacgtcgccagctttggcgtcgccgacagcatgtttgaaggctgacgctgaagcagattgcgg

SEQ ID NO: 255564 - DNA, 369 bp, Gossypium hirsutum
tccgagagcatccaaacaaacaaaaaaacaaggcatttttaacagctcaatcatgggttcatccaatgattacattcacatcgtaatggttccattcatggctcatggccatctcattccattcttagctttagcaaagcaaatccatcaccaaactggcttcaacatcgccattgctaatacccctcttaacatccaatacctccgttcaactctccgaggaaaccccattcccggtatccattttttggagcttcaattcaacagttccgaccatgggttaccacccaacacagagaatacggagaacttatcgttagatctcatcggtaaattctttgcttcatcggtttatttgaaaactccgtt

SEQ ID NO: 255565 - DNA, 328 bp, Gossypium hirsutum
tctacgcgtccgcccacgcgtccgcccacgcgtgcgctgatgcgtgggggatcttcttaatcaacgcagacaagtgagtttatctccccgttcagaacagttgatttcaccagctagaaaagccatacatacagctccttcacctctgttgaaaatgggtatatctctttgtatagaacattctgaaggcttaatgtccttctttcgttttcgtggtgaattttctgactgcacacttagaagctcccctttgatcatgatgaaggaataatgagtgtatcaagttaaaacctttgtatagtagagaaacataatgtatgttcaatat

SEQ ID NO: 255566 - DNA, 148 bp, Gossypium hirsutum
ctaatattccattaaagcccttctgctctcatctgggcctgttttcatggccaagcgggtcccagcctctcctccaactcaattccctcccctccatcaagcaacaacctcttccatcgccgctgtccctaccaccggcggaaccccc

SEQ ID NO: 255567 - DNA, 100 bp, Gossypium hirsutum
tgagagttttctaagcaaggagaagtggtctgcctaagcggtgcctgaagcagcattggggcttggatagccaaactcctccttgctcgcggctacaccg

SEQ ID NO: 255568 - DNA, 168 bp, Gossypium hirsutum
ccaatagcggattcctcttcttcttctttgttcttgatcttcttcatcattttctgtgtttaacccacaaatttgctgctccttcagctaataacagaagcttaacaatctctctctctctctctctcttatttaacaccatgtccacttgttattagaaagcttcca

SEQ ID NO: 255569 - DNA, 111 bp, Gossypium hirsutum
ttctttgctacctctcattgctaacagagagacttttcattttttcaatccggggggctttgccaaagtctgtccgctccaaggcccctctcctccagcgcattccggacc

SEQ ID NO: 255570 - DNA, 145 bp, Gossypium hirsutum
cccacgtgaccgtttcctttccacgtcttccccttttgtttttcctgttcccgtgacaggcgagacttatgacgacgcatggcgagaccgctgcaacgagcacgcccgatgcacgtgcattgcaggaagggatagcggagttcta

SEQ ID NO: 255571 - DNA, 127 bp, Gossypium hirsutum
cccatgcgtccggcgcgtcagctagagcccgggataagaaagcattggaagaacaatggggtcctcctccacagctcttcgggaactgcagcaggacctcgaaaacaaagccaacgatcttagcaag

SEQ ID NO: 255572 - DNA, 463 bp, Gossypium hirsutum
catcatgcgatcaagatacaaagggctattcttaggcgagggagtgctgcaataacaaagagtgggtgcatcaggagtgggagaaagtttaggtgggtgaagcttgaagattcagtagatacaaagctgttgggtcacccccaggccctcaccaagttctgttactttctaatggatgccttgaaggagaaaggagctaagttgaagcctttgctttgtgcttgcatgttgcaagagccatctaaggtgttgattgttggggtctgcggaaagcctcgtcttggagcacttcaagggaatgcgttcggtcttgcattcaggaatgctgccgaggaaaccggagctgaattcttccatgagcttttcgaatcttcatggattgtgttggatgctgtcgttgttaattccttcatggtcaaactaactgaaaggctttgatgtaaagctttggattatgagtgac

SEQ ID NO: 255573 - DNA, 127 bp, Gossypium hirsutum
gcatgtatcaggcaacaggtctcgcggcaaaactgtggcaccataaggagcagtaaaaggatcatccgaaggacacaaaacaatcaaagaaactcatgaactatgctagtgggaagaggaacccact

SEQ ID NO: 255574 - DNA, 194 bp, Gossypium hirsutum
atttctctaacaacttgctcagaagctgaaacaggaaaactacaaaaccaaaaaagctcactcagaatttaccctttcttttgcttatcaaccatcatgcgtgttaaagataaagagcaggtcaccccagaaatagacgaccttgatgacaactactacaccaaaacgtcttgctctttgctttcttggggtga

SEQ ID NO: 255575 - DNA, 110 bp, Gossypium hirsutum
gaagcatcaacgccaaagagataaataacacgatgattgggttatattagatgagcaattaggatcaaacccatctaaaatgcggggatggagaaactctgttcaagaaa

SEQ ID NO: 255576 - DNA, 310 bp, Gossypium hirsutum
cagataaaaaagaaaaagaaaaaacctctctcgttgggtccatatggaaaatcgattcaagctaagaatctctcgcatgtttcgatcctcgtttgcctcttgtcggacccggaacatgtcggacgttattgagaaacctgttttttcacctgaaaaacacaacggcttccatttggtcgaaccattttcgtcgtcgccaccacccaagtctcgacccttccctttcgcttctaaacccagagacgccatcaatgctcctaaagaatctcttcccagacgtaaatcgtcagctcgttatccttcttatata

SEQ ID NO: 255577 - DNA, 339 bp, Gossypium hirsutum
ctcaaattgcaaatgcgaacctggaacctacgagcagtggaagcctaggtggctctgtaaattctagtagaaaaggtaatgtgctgcagatatctcgctctttttctgttcccttaaatgacaaggacggaacaacattaaggagaatggattcatttttccgagtagttccctcaactccacgagtaaaggaaggagaaataagttcaaattcttccgtgggacctgatgctgaaaatggcgatcctgatggtgaggacataccagaagacgaggctgtttgtaggatttgcctggttgaattgggtgaaggaggtgaaacacttaaaatggaatgca

SEQ ID NO: 255578 - DNA, 118 bp, Gossypium hirsutum
ctaatataatgggagattcccaggcttgtccgacctggctactttgacaggcttgacgggtttgcatgcggccatgaacaaccttgaaggtgaattgcctgcatcctctagcggccct

SEQ ID NO: 255579 - DNA, 411 bp, Gossypium hirsutum
tctcttttagaaaaaaaagggttgctcctaaagaaatggggtttcttcaatggagcctagaggtgcttgcagatcaaacaggtcttcatttgagaaatgggtggcaattgtattgacctttctagctgtggtttcacctctctatgtcaaccaaaagccaacagaactggagcttgaagagcaatccatggactccacctcatggttatgtctcctgtttgtgctactgctcttagcctttgctttctggctttacctgaaccagagctttactaggtttgaccgtcattggattaggccgagcaggtattcgtcatatgaaagactggttgcaataggcttgatagtcttaggtggtctttctcctctttatatcaacaagggcacgagtgagttcgcacctgacgagca

SEQ ID NO: 255580 - DNA, 395 bp, Gossypium hirsutum
cggtctcgtgggcggacgcgtgggttcgaatccttgggttctatatatgagaataatctaaactaatgaaaaacagataaaatacgatcaaagaaagaattaagacatggctcgccacattattgttgttgcccttgttttcatagctattgttggggcatttgctgctgatatatcaccgtcacaagccccatcaagagctaccaagacttttgctccttatgggtcgccatcttcatcctccaatactatcagcgctagcccaagcgagagccctagcccaagcgggagccctgaggaaagcagcaaaggaccctctggtgactctcccgattcagattctgatgaagataccgatgaagatgaagaagctgaaggaccagattctgatgatg

SEQ ID NO: 255581 - DNA, 468 bp, Gossypium hirsutum
cccacgcgtccgctcaaatgccaccatttttattcatctttccatttattcatattccattccttcttcttcttcttcttcttcttcacgcttctgtactcttcctttaaaaccaacttccatgctttcccttccttgattttatttctcccctacacttaccaattttcttttttattttttctataattattggaatttctttttgtttttcccttttttccttttttggttgcaatgtacagtgcggatcgttgcttgttcgttgattcgatcagggtctcacgacaagatggcttgtttctcagtgacaaaacaggtccttcctcgtttgtttcatccatttcactaaagacccagaaatgttttgtcgataaaaacgaaaatgtgtgtttggtttcgtgttctttgggtggtcaaaccctgggtcctgtgaagtcgaggagaagtggtggcaaagggggatgg

SEQ ID NO: 255582 - DNA, 458 bp, Gossypium hirsutum
gtttatagttcggcaggttgctatacaatctgatgcggattccttatacatcatatcctgaatacatcctggccaatttggttcatgctcttgctcatcattcatgtccgaacacagatgaatgcaaagatgtcaaagcatttgaattaatattccggcaattgtacttgactatttctatgttggtgaaaaaagagaggaaatattagattatagatttgaggctcgttacccccgccccccaaaataaaaaaccttgacccctgttaccaagggaatgtccactcttattgaagaggagattgaggtgagaaaagggccatggaccacggaagaggatacgctcctaacccattacattggtcgtcatggggtaggtccttggaatatgctgacagctgaaagtagatcagcagctgtactttgccaacttgatactgttttatttttggacttgc

SEQ ID NO: 255583 - DNA, 439 bp, Gossypium hirsutum
cccactcgtccgaaaaagaagagagaacaccccttctgtctccccatgttctctgttagggtttcaagaacccattttgcgctgtcgccatgcctgccgatcgagagaagagagtttctcccctccccttttgggtttgatttcggcgacagagaaagggtctccggcgacacgaccatgggagatttcggtctctttttgcaggtgatgtgaacagccagacgcatgcgaggaggcgtgcgactgccaagggtgaaaggggcatgcggcggctgaagcttgaaggggctagggttgctgaaatgttttgtgtagttgggctagggtttctagacttttaggcttgttgggcttgttgggtttagatagtttaggcctaggtttaatatgtaaatgggcatttattggactgtaaaaatatttggaatttggtttattt

SEQ ID NO: 255584 - DNA, 509 bp, Gossypium hirsutum
cggacgcgtgggccctttcaaaaatgaaggtgtggattgctgtgttgattgtatcatgggcttattggatatccatagtttgcatccagatggtttccgaagctgcgcgaatgagaaacatccagcaacaaatacttgcagttgcagagcctcacgcggatggaacttatggaacgtttaatccagatggcataatgatggagtacgaaaccagctgggaggacatttcctccgccattcaatctgcaacagatggaatcttcgcaagggcagttcgtttagtatatgatgctcaagaattggttttaagcaccctgaggcaagttattttcatcattgcattaatgccaatggaatgtaacccaagagctaatttgcagcttttgcgcatgccaacctcaacttcttctttgagatccagtgcttggtagataacagtgacacttgtgaaagagtgttagcaccaacctcacatattactggacaaaatggtttctgcgttgatgtat

SEQ ID NO: 255585 - DNA, 461 bp, Gossypium hirsutum
cccacgcgtccgacaccgtgaaacatcgacggagacgctccgccattaaatccatgtttggcaaacatcgagcttcgataattttcaaatcaaggttgccatgtaaaaatacaacaggatccgaagcatcttcccccattgaatcaaatcgagaaataaagaaaaattattcaaagacggtcaatgagaaaaatgaagatgataaatagcaatgtaaaaggtaggcaagggacgttgttttcgaaacatcagaatcccagtttgttttctccgactaaagccaacgtccataaccaaaggctgtaacagggagcgaaattccagaagtttacggttttgtttctttttggctaatgtggttctgtttatcattctttgcctttgccggctactctctcaattcttctttatcattcttgttttgggttttcattttttttttctaaatgactgacagcttc

SEQ ID NO: 255586 - DNA, 201 bp, Gossypium hirsutum
gcttttccccaccgtactatttaagcaaccatatggggcattttctttttcacatagatatctcaattcggggtaggattctaaatgctagaatctgaatttgaataagtgatttcatgaactaattaagctaaatccgggatcattgtgcaaccgtgaatgttttgagcactttcttatcatgaaaattctcttttattc

SEQ ID NO: 255587 - DNA, 410 bp, Gossypium hirsutum
cccacgcgtccgcccacgcgtccgctgaaatccgaatggattttcttaaaaatccatctatcatttcaattttcagaaggtttttttttaaaagaaaaagaaaaagggaccgaaagttaaattagtaagctttttttggaaccatttttactttaaagtatttaatgaacatttttaatattaaataatttataaatttattaaataatttataaaaaatatatttacttaataaattgttaaaatacaaaaaaaataaagatttaaaaaaagaataagtggtcttcgtattggggcagtggccagtaaactaaagggctgtggatggcccatacaataaaacaggcgcctctcgaggaggcccaataataatgaacccaaaaaaaaagaataataaataataataaata

SEQ ID NO: 255588 - DNA, 323 bp, Gossypium hirsutum
cccacgcgtccggatgaaaagcccaaagaggcagagcaaagtgttgtgcaccttggtatccattactggagcactcattatgaccctttacaagggtcctccagtactttacccaccaatacaaccgtatttacacacattttcttctaccatgataacaacatctaacaattggctcataagtggtcttttcatcgctactgtctctgtgtcactttcagcaaacattgctggtcaggctggggatctgaaagggaatacatcggagataacgtagggtctcttctatagcctctatgggaccatgcaatctgcattggtta

SEQ ID NO: 255589 - DNA, 381 bp, Gossypium hirsutum
tgaatggctacaagcagggtttctgggttgaaattggtttcatttgtgaaccggggaagaagcagcctctcctttaggttgcgtccagatcgcttgcggatttcatgtgctgtatgtttctcattgaatgatatgatattcgtttctacgcaatgtaacccattagtgaagggcaaaggctatataacagggatttacatttctttttagtgtccattccatcgacaataagggaaataacatggacttgtaaattaaatagagagatgataagataagaatccacttgtggactctcttctaacagtgcatggttttcttatctttgatatttctcgtatgggactgtttgaaatatggctaactgtttgtgctattatt

SEQ ID NO: 255590 - DNA, 468 bp, Gossypium hirsutum
gatttattctttcaccatttctctccatcgaaggagatttttataaaaagaagaagaagaaagagtagaaaagtagttattttgaatccaggtaactcacataatcaatctcctttccactttgaacaaaaaggcgaaaatggagagtttcagcgccgaagatctgtcaacaataggaggcatagccaccgtttcccttcttcattccttcattcccacccattggcttcctttctccatcgtcggacgggcccagaaatggaccctttctcgtacccttttcgtcaccgcatttggagcagttttgcatgtaatatctacttcgcttcttggtataactgccatcactatggcgaacacgattgctggagaagaaacagtgcataaacttgcttcacttttgctcatagttcttggtggtagctatatactgctgtttttgtctggaaaaggtgggcacagtcattc

SEQ ID NO: 255591 - DNA, 404 bp, Gossypium hirsutum
ttcctttcttgtttaacaaaaatgatctcagaaatggggagaaaatttatcaattttatttgattactacagcgtgaagattcaagcttgcaatcgaatgcctcacttgaaactctgtatcagaactgccatacgagaggatacaaaaaagatcattgctgaggatggcttgcaaaggatgcctaaaatgcttgctgaagctggtgcacttcttgatgactctagatggactggcaatggttggatacgggatctacttgagtgttgagtacaaaagagctgctgatgatgccatgcttgtgacacctgtgggcactgaccaaatacagctcggtcggcccatgctcatggccgtgtctctttcgtctagtattttcgataatcttccaaaagcatggtttata

SEQ ID NO: 255592 - DNA, 455 bp, Gossypium hirsutum
gtcataatctgctgtgaataaggaattgggcgaacgggagtttttggagcagaaaaatggattgaaaagcatgatttcaaggactggttctgtgtcggggtttgaggacaatattttggagcaagtagagatgcctttggactgtgttgacctacaaagtagaacccatatccgtcatggttcactgtgtactggtgtcaatggcaggttgtacagtaatggaattggattagagaaatcagttgaagaccgtcctgatgataggttactgtctggggtgccgaaaggggatgataaagttgcacagatttcatcatccaaggatatgttatccgatcaaaacacagtggcatttgtgaagcagaaaagccttacaaatcaggcaaagaggacagtagaaacggaggcatcgggcaggaaagatgtgagtatgaggaggacctcatcttataatg

SEQ ID NO: 255593 - DNA, 319 bp, Gossypium hirsutum
cccattcgtccggcatcaaatggtgctaggaaagtggggactgctaaagccaagatggtggggacactcacgggggtgatgttggttcccctgcatctcaggatgaccatgatcaccaccatcggttcaatcaccgtgaagaagaaagggaaagagcgccatcgcctgttgaatcgcatgtaaccatggagaagtatgtggataaagtcactagagatgcacaaagcatagagaaatgtggattggatgacgtcaagaacacccatgttgctattcagcatgttgagcatgataagatttctagctgcaccagtagttc

SEQ ID NO: 255594 - DNA, 178 bp, Gossypium hirsutum
acgatctgtgacagagagttttcgatccaacagcagaagatagattctttgacggcatcgattccttcgtctcttaattccatcaagtccctagcgcttgatactgctcaaaatcatgccaaacttgcaaagttgaaagccaatttaagagaagccgaaaatgagtttgtcaaggttt

SEQ ID NO: 255595 - DNA, 409 bp, Gossypium hirsutum
ctcacgcgtccgcggacgcgtgggttctaactggctgtgcgctgctctgattctattcaggaaaacttttatcatatgggaactaatagaaagagaaggataaaagcgttagaaccacattcagaaattaatgtgcacgaaggttgtaagggagtcgataaatctagaaagacaagcgttgagcagcagcttcagggagcaacaggaaaaacagaaaaggatgagcattcatcacctagtggttcaggtgaagcatcatcttcaaggtctaaaactacaaaaaccagaattgtggaaggaattacaatatctgcacttgacttgaatacagaagaaagactttatccttccactaagattaagttgcagctctttccgatagatgaaagcactcgtctaggtttagaaa

SEQ ID NO: 255596 - DNA, 337 bp, Gossypium hirsutum
gcgttctttttttgctcttcacctgaccctatcaaggggacccagatttacatctgggtgccatacggcgccccttttctttctcagtctctttgttgctggaaaaccctaaaatttcgtcctttgttcttctattttagctactccttacattgaataaaatatcagtcttttctcagtcttaatcgacattgtgttttttttttaaactgtctcattgggtgtttatttttgtgcttttctttaattttgagatctgctggaatttattttctctgttcttctgaattctaggttacgttgggttggtggttagaaaattgggggtttcattgat

SEQ ID NO: 255597 - DNA, 356 bp, Gossypium hirsutum
ttcactcgtccgcccacgcgtccgttcaactgggtggtacaatatatgaagtgggtgattgggtgaagtttcgaagaagtgtcactacacctacttatgggtggcgagatgcaacccataaaagtgttggctttgtgcaaaatgtggtggacagagacaatcttatcgtgtcattttgttctggagaggctcatgtattggtaaatgaagttgtaaaagtgattcctcttgatagagggcagcacgttaagcttagagaagacgtcaaagagccaaggtttggctggcgtggtcaatcacgtgacagtattggaaccgtcttatgtgttgatgatgatgggattttgcgtgttggc

SEQ ID NO: 255598 - DNA, 334 bp, Gossypium hirsutum
cccactcgtccgcaaaaaacacaagttttcaggggcgaaaaaaaaaaaaaaactctttgttgggtgttttttttctttgggtttagatttgttcttctacttgcatgaaagagagtttttgtagaatgtcttctggatggtaaattcgggcccaaattggacatgagaatgcttgtgggaacatgcttgagccaagagaagctgatatacctgcattgtttctagtcttggtggtgcttcctctggttacatatttcttgcttgggaaatggagtgaggtttcaaagaaacgagagaaggtaagtttacttgctcatcttgccgctgaagaagc

SEQ ID NO: 255599 - DNA, 402 bp, Gossypium hirsutum
tctgtcacgcgtccgatcaaaaacaccgcaggggggaaaacaacagcggcgtttcgcacaagtaaagcaatagcggtgttcgccaaaggtaaaacaatagtggctttacagaaaaatgccctctctttgccatcagccgccgcatccggcgacctcctaccaccaccccttgctcgtcattgcaaaacctcactcacttacgttggctcgtccgtaccctcgggcactatctacctccactttaacgtcgttctctgttctgcactttgtttacttctctctttccctcttccttccgtcatcttcgttgctcgttcttccgtctttgctgctttttactccgttcaccggactctctctatttttattttctctttggttatcttttatctttggctggat

SEQ ID NO: 255600 - DNA, 350 bp, Gossypium hirsutum
ttggttccacgaaaaataaagaaaaaagacgggagggacggattgtaagcaggcggagctcatggaaatgggttcgggctctttgacagactcaggtgggtcttcctccaactcctccactgagtcactcaacggcttgaaatttggtcaaaaaatctattttgaggatacatcagctgctggcaccggtggtggtacgaccatggggactccactcaagtcaggtatcgggtcttcaagctcatccgggtcgggtaagaaggccatgggtggagtggtgcaaggtggtcagcctccaagatgtcaagtagaagggtgtaaagtggatctgactgatgcaaaagcttact

SEQ ID NO: 255601 - DNA, 391 bp, Gossypium hirsutum
gcctcttttgctttgggcctcttttgctttaccgggtgggaagctatgcaaaggaggagttcttgcttctaaaactgcagcagaggcattggaggaggccaccactgccgagtctcttgttaggaatctaagcgtgttttcagaactttcctctaactccaagcctgggaaccctttgccaaccattgaccgatttttatccatttacgacgatgtcgtaaagtacactggaattgctgaaactgttgcagctggttacagatcctgcattgaagaacactcgaaatcatcttctctatgggttgaagctgcagtgacaaccgatcttgaaatagtctcccttctaacccctcaaaacaatgaatctctatcagctttacaaataaacctg

SEQ ID NO: 255602 - DNA, 451 bp, Gossypium hirsutum
agttcagcttagcatattagcaaataattgaaggggggtggctacagagaccaaaaccaatttagttaaggtgaagaacagtggtcaagatggttcttcaaagccaaaatttgatgctgttatcaacagaaagaagatcgaaacttcaagcaaacagcctgttgattccaaacaaaaatctgtaataacaaaagcagaggtaaaatcgaaaacaaattcaagctcatcaaaaaccactgctactacaaaaactaaagttagggagaaaaaagtttatactttgcctggtcagaaacatgatcctccagaagagagagaaccattacgaatattttatgaatctttgtcaaaacaaataccaacaagtgaaatggcagaattttggatgatggaacatggcttgttgtcccctgagagagctagaaaagcgtatgaaaagaagcagagaagg

SEQ ID NO: 255603 - DNA, 390 bp, Gossypium hirsutum
gcgcccactcgtgcggtttttcagacccggcaacggggggggaagataagcaccaatggagctcctcctgctgaggacagtgcagataatgcagggatggagtcaagagaacctttttcatttccggagatcagtacggttcgttatggtatgaatccagctgatattgatgacggaattcctcgtttgtcgagggtgctatcaaataaatctagatcaaccaagtctaagcaggctgctgttgcaaaggtagagctggtactgctgggtttggaaaggcagtggatgttctggacacccttggtagtagcatgacaaatttgaatcttggcagtggctttacctcaggggtaacaacaaaagggaataaaatatcaattctatcttttg

SEQ ID NO: 255604 - DNA, 389 bp, Gossypium hirsutum
aataataaaaaaagagtagaaaataatttttgggcggtggtttgggaaaccgaagggggaggaaaacatagagagtgtgtctgcgcgcggggggcaatgactctggaggaatttttgaagcagtgcgagcagtcaggtgatggtgctttcgctgccctcaaatcgcttctggagaagcttgaggatcccaagacccgcactgaagcccgggtcttcctttcggatcttcaatcccgggtcggttcctcagatgattgcttccacaaataccatttccggatacaggacatttacttggatcggtctgaaggctatcagggaaggaagaaactgacaatgatggtgatccctagcatttttatgccagaagactggtcgtttacctttta

SEQ ID NO: 255605 - DNA, 358 bp, Gossypium hirsutum
attaaacatcccagaagaaatccctggaggtgcgcttctctccttgtctgactatccatgtctgctttccttctcctttcccttctttccctctcccatttcttcatcttctcttcttccagtcatcacccacctcataactcccctgtttacgcctctgagtcctctcaaatccgccttgcttgcaaatccactcgcttcccacaaccctgcgaatcctccctttcgcgatcctctcttctccctcctaaatcgacctccctccaattcatccaatccgccatttccgtctcttccgataacctcaaaaccgggcaatccatggtgaaatccatcctcgactcctccaaaggcaacc

SEQ ID NO: 255606 - DNA, 449 bp, Gossypium hirsutum
cccacgcgtccgcccacgcgtccgagagagacggggtgaggatgttgttttgccggggattttctaggatttgtacaactcccagaaagagcttgtttggtttcgttctctctcgtcgagctgacccttctctattccttctttctaatcaatatgtttactctactataaaggttcgtagtggcagagaaactctttcttggagttttccttcattgcttggtcttggacggcaaattcatcagagtagctctctaatagaggttatcctttaattgctcatccttctacaatttgcgaggttttttttgttcatttaccgaatttctttcatatagttttaggacaggagacatggttatccagggataggatgttttctagtgtgttaaattttctaatgttcaaatatgaaacaaatgctactattttggccttaagttgattac

SEQ ID NO: 255607 - DNA, 306 bp, Gossypium hirsutum
ctcacgcgtccggtgaaattaagaggtgggcgggagttttctagaagaaacttagcaagtttgggtaaaaattctagtattagtactgggaatagtgttaatgatgatgaaatggaagattgggaattggagtttgttggagagattgatccatttagttatcaagcacccaagaagcggaaaaaacaagagaaatctagggttcttaatgatgaagaagggatggattggtgtttaaaggctagaaaaatggcactcaaatctattgaatctaggggattggcgcataaagttgaggatttgatt

SEQ ID NO: 255608 - DNA, 239 bp, Gossypium hirsutum
cccactcgtccgggcttatcttcaaccattgagggtggatattaaggctgctctggcaatattctggcttattccccacccccttgtctctttagataatggtaatgataaggctacttatgtcactactcactatactataaaacactggaaaaattgcaacgaaaagctcagattgaatgaggagataatcaacaaatgctatactactggatttcgttataagcttctgctgcaat

SEQ ID NO: 255609 - DNA, 363 bp, Gossypium hirsutum
ttttgattcgccggcatccagctcctcgagggggtttccttaaaccgggtgcgggaagccaaaactccatgaaccccaaacccagatctttggtttcttggcctttccactgccagggtataggctgtatcattaacagaccgaggaataaaacgctgtgtgatcactgacaaagaatccttttctacgaccagacaccggaaacccatcattcgcgcgcacagttataaccttacacaggcccttgcttcagcaatgaacgcatgagccacatcctgtatcagataagtgtgggctcctataatatcacctataaaatctctggctaaaactgctattgtagaagttctagaatctgtttga

SEQ ID NO: 255610 - DNA, 169 bp, Gossypium hirsutum
ctttctctctcactgattcctcaacttctgctgactcaagttgctgcaacggtggattcttaacttgttcaagaccgcattgtctcttcgtttttaagcacacttattctttttcatttttttcctgattttatttgtaccgctgaatctgggtttcactctgactact

SEQ ID NO: 255611 - DNA, 386 bp, Gossypium hirsutum
cctttttcttctcttccctttgctctcccgcaggggggagggaatatcttattttggggttcttggctctctatattcccaaatcttaatttttatttttcgatctctttatattcagattcagtgttttacacatcgcttctgtttctgatccgacgacggagattgagtttcttgtcaaaaagaccgaggtatgcagcagggtgatcagatggtgttaagcttaagacctggtggtggtcgagggagcagactctttggtgctccctcttcttcatcctcctcctcttcgttagcctttggttccctttcttctgatcttcccgtctttcgtccccatgctggtgctcctcccgccttttctatcaaggctggagactcacgat

SEQ ID NO: 255612 - DNA, 370 bp, Gossypium hirsutum
tgctgggatcaagagctcttcgacgacatcggggggtaagttcgatgacgtatgggggatctcggggtctccgcctcgtcccaagaataagtcgccaaacaactctccgtttgatgacctgcttgggaatctcggggggaaagaaccggagatgaaggttaagagtgagagagtgaaatcggagaaagatgcgcctctgtttgatgatttgctttctggttttggccggagtagctctcctacacccgcgagatcaacttcagatgctggtcagtcccagaatccaccttcaaattcaagtaagactgggtccaatttgatggaagacccttttgttgtcttaggatcaacatcagaccctgcagatgca

SEQ ID NO: 255613 - DNA, 376 bp, Gossypium hirsutum
gtataaaatcgggcatgcctgagactgggagcggagcaaaacgacatgagggaaagcaatacgacaattcagaaggggaggaggaggaagaagaagaagaagaagaagaagaagaagtggacgagttagaggatgaagaggaagaggaagaggaaggagtgagtcgagttaatgagtcgcacggggctggaacggcgccgtcgagtgatgctgaggtgagagactcgcaattggaaaccctaacaaatgatgatcgttgtgagaggttgcaggaaaatcctacttcggaattgaaggaaggagctgaatctaaggagcaagttaagatagcccaccagaaagctttgcctagtttggctgtccagggtgcagaagc

SEQ ID NO: 255614 - DNA, 386 bp, Gossypium hirsutum
ccgcccacgcgtccggggtttttggtggcttattaaaatctgtagtggtatattcaatcaatcaatcatgactggcaaagccaagccaaagaagcacacagccaaggaaatagcatcgaagatcgacgccgccacaaccaatataggcggcggcaaggccggattagctgaccgttcacgtgtggagaaaggtggacatgctaagtacgagtgtcctcattgcaaaataacagctccagatttgaagtcgatgcagattcatcatgatgccaagcatcccaaggttccctttgaagagtcaaagcttgtgaatctacatgctgttcatgtggttgagccttccaagcctcgtcctggtgttaggggtagccttaaaaagtgataat

SEQ ID NO: 255615 - DNA, 515 bp, Gossypium hirsutum
tgtgtacgcgtgggcggacgcgtgggttttaaacgggtgctgcaatttatttatatagaactataaaacaaaaacagtttgaaaattgaagttgtctgattttgtttctgtacccaaatcgatccataatctcagtatattaaactactaagagcaaagatgtatgaacatttacttcggtacattaatcattcaccttctataagtcggtaaaataatcacggaaaattggcactaaaactgtacttagttgagtggaaaaatggagagataagaggagagagcggaaagtgggaggaaaacaaatttagattgtgctttgttaagaacaaagcgaggggaaagaaaataggacggtctgctagtttaaaattatgtattttttaattttttttttcatttttcatatttctagttttctacccattttacagtaaagtttaaatgtgtgcttgattgggttgaagtagacatgtccattggccgggccgcgtccaaaaaattttcggtccgac

SEQ ID NO: 255616 - DNA, 146 bp, Gossypium hirsutum
tttttattgttttgtattttagttctccactggggagaattttatatcaggatgggggtcttactttctttatctgactacctagtgtgattagtactccgcatcttaaattgtttaaatagcaatggatgaataatttttttctt

SEQ ID NO: 255617 - DNA, 530 bp, Gossypium hirsutum
tattatttcaggtgatgtggtacaatattagaggggaacatacaatgtcctaataactagactagtggttgaactagtcagaccattggttcctggttcaattgattggatcgggtttacaactataccaataataattaaataaatattcataattcataaaattttaaaaaataaaaaatttattaaatcggattaaccttttcaactattggtttttgtctttattttttatcgatttcaagcagttttcaattcaatcagctcaacccctttgtttggactagtgtatggttgatcttcaatccaatcagtctgaccaatcaatctagtcatgttccaaaaacactgatcatatcatcaaatcttaacgaaatccaagttcagggaccaaaatgattctagttgcaaatttaggtatcaaagtgaaccaaaaataaaaatatcaaagtgtatgtaattgccaagttccaaaaattatattattcaaatttaaaagtgtaaaaatgtaataatgaattatataaaaa

SEQ ID NO: 255618 - DNA, 503 bp, Gossypium hirsutum
cctactcgtccggaacaaagctattccattttggtgtacttgaggtgtataaatgttgttaattgagatgttaaagtgctgcaaattaaagtgtttaaatgttgtaaattgaactgttaaagtgctgcaaattgaagtgttaaagtgctgtaaattggagtgtttaagtactgcaaattgaagtgtttagttgctggaaattgagatgttaattgaggtgtataaatgttgttaattgaaatgttaatatgtgtgtgtgtgtgtgtgtgtgtcccttctgttaaattcttcgttatgtatttaataaagtcaattttgtgtctggctacaggcattagtgataataagatatatcattatcacttaaatcttggaggaagtgtttctaccaaaaggctgactaggctaccttcaattcctaagaatgatgcaaagttcagctatacgccataaacatttctctgatcttaagttatacaaaacattatgaccttatttatttg

SEQ ID NO: 255619 - DNA, 414 bp, Gossypium hirsutum
ttgtcaagagctatcagacaattatacggggagtcttttaaatattttttagtttttctcaaacaatcatttcgaagttcgtgttaatctgcaattttttacggaaatcgacccgggatccgccgtaattagacctccagaaggttcctaactgaagcttacaacaatccgctatattcaagaacaggattttgcatggaaattagtctcagtaccaacaaattggtttcaacaccaacataattagggttccgacggaagagtcaagtcatatcatgtacggttgataatttcgccgccacggaaagggggaaaaccaatttttataaagtactttctcttgattccgagaacgtcagtttagctgaaataaagaaggcttatagaagaatggttcttcaatatcatcccgac

SEQ ID NO: 255620 - DNA, 523 bp, Gossypium hirsutum
  unsure (1)..(523): unsure at all n locations
aaataatcataaaattaattgtgtttttatggtgagaaaaattaattaaactcattgatatgttgaagggtatttatatttctatttgagaatcgaaaagagattataaatagttttaagtattatatcgaaaaaattaatttatttatcattttttatcatttaagtcgatatttattaacagttctactaacgaaatgacatagtaaaagggctttttagactttttgtctagaatatataattagccttaattttacattgttgttaatctacccatgttctatactattcaaatattgtttaattactcattgaaaaataataaatttttaatgattaatttctaagcatgtttaataatttgaaggactagaattttgattgtttagatttgagttttaccatgctcatttaagcacgtgtgggttattttaaaatttatttcagatttaagtctttatcacgtattggtcttattcatttttattctaatatgattnttttgaatatattctattat

SEQ ID NO: 255621 - DNA, 247 bp, Gossypium hirsutum
tctctcgcgtccgcccacgcgtccgcccacggggacggtcttgagactaaaagggtggggcaactacatcttggggaagggtttgctgctgaaaatcttaagcaagtgggctattatttgggctagggtttagtaattgggttatttaatgtgtaatgggtctggttttaattttgggctacacatgttgtaaatggacttgaaatttggactttttatttaattatttgggttttgtttgttttaa

SEQ ID NO: 255622 - DNA, 529 bp, Gossypium hirsutum
aatatgttaaatccaaaatttggaatctttcataattagccccacaataaacggaccataagggtccgttaacaaaaatagccaattaaaaataaaaaaaagtttacgtgtccccatttttctcctattattcacaaaaaaatctcttcttccctctatttctctccagttctttccctttttgtctctctttggatttcgtttccttcgaaaatcaaagagctcaagcttctacggtgagacgtgacattgaggaagttgaatgagtatcaagagtgttacaattgttttatgaaaataagttaggaaaagaaaaactaagattcctagttgttcattatgtgtgtgtttgctctgaagattgatagtgttgatgcaaatgctgattaaggtcaatgaggacgagattttctagatttaggtgtttatggaagtattgattatccttccaagcatttaaagctgtgggtacaaagagtttggtagtttagacattgcagcagtatggctattgctggtctacacaaag

SEQ ID NO: 255623 - DNA, 468 bp, Gossypium hirsutum
cccactcgtccggccttccccgactactgaactgagacaaaaacaagtctgaggctcacagaagtaacaatgtcagctttgaggtttagctcacgctttaacccaatgttatcaaacataatccttgttcaaaccaaatcattattattcagtttctcttccttctcctcatcagtcagaaaaccttgtaagactctttgttgctcttccagctctccactttctgggttagaggatgagttggttggttatatttttgggaagaagaaagcaacagaagtggctcatttggtttggaggcatgtcttgcataaaggggatattgtcatagatgccacatgtgggaatggttatgataccgtagcaatgcttaaaatggttgctgatgaatctggtcatggtcgtgtttatggaatggacattcaaacagaggctttagagaatacttcttccttactggatgaaact

SEQ ID NO: 255624 - DNA, 184 bp, Gossypium hirsutum
ttttgagcttggtctcattcttgaggtaggtgggaataacgtgcatagtgtgatggagaagcttagcagtttggatgtttctgctgagttaataggacgagtaaccacctcacctgtgatagagctaaaggttgatggaattactcatttaaatgagaaaacttctctgcttagagatatgtgg

SEQ ID NO: 255625 - DNA, 505 bp, Gossypium hirsutum
ttttcgcgtccgcccacgcgtccgcctggccgtgaaaatggtgagcagtatggggctccatttaaagaagaagcgtgggatgatgaggaatattctagtaaccctttagatacaattactcctgtgaagccacctaatgaggtcattcctgttgataatgtaaaagctaatgttcaatctgagtctccattgaatgatattgaggagtttatgagacagtttgctgatgagcctgtgcctccacagccgcaagcttatcatagccatgtattgcatcaggttgtcagtgcagaagagacacaaagtactttgctggatccatctccaaggggtgttctctttcccgagcaacttacagttctccatggtcaagcaagatttgaattttcagagtcgcctatttctcaattgctgttgcaggaggcacctgaggtcacaactgtcgccgaccaccttggtcaggtacctcaattatgtgaggaggatttcttggagattgatgatc

SEQ ID NO: 255626 - DNA, 417 bp, Gossypium hirsutum
ccctctcgtccgtatttctcttgttttgacagggagggcatcaaaagtacaggagtgtgggttagttccttttttctggagcttgaagttaagaatcctagtactttttactgtaggcaatgaagaggaccatctatttatgattgatgtggcattcttatgcgtttcacagacaaatccaagtcgggatatgatgtaacttttcatcataatatcgttcctgccaaagccactcatctgacaaatagcatgaagtttttaaatatcaaatcaagagagggaatcaatatagaggcaaccaaaggctccaggttaactttagagcctaagaacatgaggaagacagaaattcaaaggaaggctcctcataatgacttgagtagttggaataaaataaatagtcagggtgtagatggt

SEQ ID NO: 255627 - DNA, 401 bp, Gossypium hirsutum
ctttttctcaaaagccctctcgcctctttatctgagggacttgtacaactcaacacaaggtgtctccaaagcttccgcacttcacttcacttcacttcactcaccaataaaaaaaaaaaaaagggagttccaaaacccaatcaacaaatcaaactcaagtttagcatcacaactacaaattaccccaaacggccaaaccttagatccccatgatgagccccaagttttccatgaagactattacagtacctgctctacaccctatgtaagcgctccttcaagccctggccgagcgccaggaccaggacctggctccatcaatggctatggtgggtgctattatagtgcaccagctagtcctatgcattttgcactgacctcagcatcttcttcaatggtag

SEQ ID NO: 255628 - DNA, 374 bp, Gossypium hirsutum
ggggggggtttcttttgtatgcattaaccctaaaaaaaagtgacttaaatgattttcagcatcatcaatagaggtatttttacagattgaagctatgtttatgggttccttcgtttggatgttggccaatgctcaaaatttttcggaccaaggaaagataggaaggtgaagaagacaacagtgtaaagtgaagcctaaaaaaggtcttttaggctatgggaaatcataattgctttatacccatgcgccattttgaagtaaactattggttaaactcaaaatgatgtgagctgagttgaatttgagacgactcaaaacaaaacattttgaatatagactgatccaaattcaatctaaaattgactcaactttct

SEQ ID NO: 255629 - DNA, 251 bp, Gossypium hirsutum
gcgatttgatctttggaaacttttctggttaataggacgtggggaccaattgaagtttggaagttggtttgctaagccaaattaccttttagggtaatcattttccttctggaaaattgcagaaattcagaagaagtctggataaggatctgtagagaccgagtgcagcttcaccatctgtacttgcagtgaattcaatcaaggatcggataagcattgctgtggaatggaggtgatggtacttttatgga

SEQ ID NO: 255630 - DNA, 412 bp, Gossypium hirsutum
  unsure (1)..(412): unsure at all n locations
cccacgtgtccggggaatgcctttggagttaaattttacaaaattttcaatctgattttctgcaaatttaatcttcaagtggttgtggtcggtggcttttgaagtgaaattttgcaatttcagtcttcttctttgtgtgttattcgactgaggtttatgttccaaatcgaacatgtaaagatgggagtgttgtgaatgagaagacggctgaagttgtgttattcgattttttttctatctttttcatttataaatttaatccgttaaaatgaaactagcttaacagttgaagcaggcaaaaaactgccctgccctgctctgttgntatctctactatttattatagnaaataatttaatttagaacccatagtattttggtaaatttttattatatttatattatctaactg

SEQ ID NO: 255631 - DNA, 187 bp, Gossypium hirsutum
gttttttccatctcatgtatcgcagttgacatctactagtcaggctgagaagattcatacaggccagcatggaggagcaagtgtaaatgctcctatggcacgccttgaaccgagaaagaaagttagagatgaagatgatttcttggttcctgtttttgttaattcagagacaggtttacaacatagc

SEQ ID NO: 255632 - DNA, 135 bp, Gossypium hirsutum
cccacgtgatcggctgcccagaaatactgaaggaaagaaacaatcagaataatcagctaataataagcaaatgagcataactttaccaatgaagttgttattgcctttaacttctccaaccagaattccatctcc

SEQ ID NO: 255633 - DNA, 235 bp, Gossypium hirsutum
cccacgcgttttcccacgcgtccgcccacgcgtccgctctctgtgcaccacaaacaaacaacaccgaatactgtaaaaaaaacccaccataaaaaagattgtaacaaagagaaataaactatcatttttcgagctttgctcactaaagaagacgatgaagaagaagagtggtgaagtttttcgttttgcgcaaagcaatgccccttaaattactgaattcaatgctcttctgttg

SEQ ID NO: 255634 - DNA, 137 bp, Gossypium hirsutum
aagagtccgatgtaaaagcttcgtcttcttcgcaagagaatcagaaggagaaccataaacttgctttccaagctaagcgtgctaagacctccaagcctcaaccccagcttgagtactttgaagataagcgtaacttg

SEQ ID NO: 255635 - DNA, 382 bp, Gossypium hirsutum
gttcataaccgctgccgtaaatctttatgatcatccattaatggctgcccaaacagtgcccaaactctgtgaaatccttgaaggggacctgtgcaacatgccactaacttctgtttcattggaaaacatcgacccgttaggctcgaggctctcgacatgtttgcctatctctgctggctcatcctatgcgcatgacatggtcgtggcaaccaaccagatggagtttattgatactatcatcacatcaatgccatcagcatcatcttcctcttcatcatccttatcagctttatccagtgggcaatatatcacaaaccctaatcttccatcaggcggttgggacccttggcacgacccattcacattttcttacatgattggg

SEQ ID NO: 255636 - DNA, 181 bp, Gossypium hirsutum
gttggttatcctccccaagaggcgccactaaaaaaatacgctagaatagtcctcgccgtgtcagcatgctacccaggtccactgaaaccagtagatcgtccatgcaaatcactgtgtagctcttgtccatcatgagcagaagagaatcgcaccgtggttagggcagtcggaccgtcgtagt

SEQ ID NO: 255637 - DNA, 137 bp, Gossypium hirsutum
ttacctgtggcaaagggttacatcgaggggaccaacggggttaattgaggtgccttctccggatcctcaatgaacccagctggtgcatccggaccagccttggctagctggacacgggacaaccacaggatctactg

SEQ ID NO: 255638 - DNA, 193 bp, Gossypium hirsutum
gtttaatggtaccaatttaccacttattttttggctctactagtgaagggttgtgacttagtccttggcattcaatgattgttatcattagggccgattgtggggaattttagctcattcactatgcaattttagtgcctggggcaggcgtgcattctcagaggtattttacgaggaggcctacaacttttat

SEQ ID NO: 255639 - DNA, 294 bp, Gossypium hirsutum
ttttagccaagccgacaaggctcttgcttccgccatttcattcaaagatggtgaagatttcgatatccttcaatcaccacggaattcagttgatggaagccaaaatgaaaatcctgttccaagaagcatgcctattctgccagtgggcacacccgagcaccatgatgttggcttgagctatagtaaagattccgaggataaaaacggctctgctagtgaagtggtctcaatcgaaatggaaacactaaagggtatctctgaagagagtaggaaagtcaatgctggtgttagtgt

SEQ ID NO: 255640 - DNA, 374 bp, Gossypium hirsutum
ggaaaaaaaatctttactaggaaaagagagagatcaaaagatggagacatgaaagctattcgggttatttggtaaattacaggactgcacaataatttgtttggaagttcatacaagttgtaatgcaaggccaaaggggtacttttggttccttgcctgaaaccttatttgatcatgggtcttcatcaagtaatgctgctatagaccagcaagtatgctggaataatatccgaaatcccattgaaagcagattgtcggattgtttgctgtcagctaatgatgcgaatattggacatgggaactctaatgctggagaggatcaggagctgggtcggtgcagcttgggagagcctagctctagtggcacactgagt

SEQ ID NO: 255641 - DNA, 351 bp, Gossypium hirsutum
gagaaagaaacaagatagtgaagtatcaaaggagaatgcagtgcccgtaccaaatattgatgtagtggcagaaaaaggatctactccaataagtttgagtgctcctgctgttaacacaggtggtcgtgatgccatgcctttaagaacattagtggtgccaggttcttcatctgcattggatttaattaagaagaagttgcatgaccctggagttccttcttcctcacctgttccggttatgccagtaacagcaacgcatgaattaaatggctcaagagcagttgatgttaaaggcctgtatagtgagagcaacaaagataaactaaaagatgcaaatggggatggtagcat

SEQ ID NO: 255642 - DNA, 336 bp, Gossypium hirsutum
ttttaattgaaataatataatttagaataatattttcaatttcactatatatatttcaattccttaatctcggttcacagttcatccagcacgtaatttcattgagaaagatcaagaaatggagaagaacagtagctgttgcttttcaaatttatcttcaaatcttccgatcacttgtttgatcactttcatcaccattttcctacaccgagttcttaacgtcatttaccgaaccggcaagccactaggcaaaagagtttctccgcagcggcctcttagcactctcattgttttaggttcaggaggtcacacagcgcagatgattaatctcttgtt

SEQ ID NO: 255643 - DNA, 329 bp, Gossypium hirsutum
gatctttttcagaggtgaaggaaaagattttggatgatttttcaccccatttcagtctgttgatcaacttctccttcacccaccctgcatccctttttatttttattgctttccaatggctgttcaagctcagtatccttccaatgtgctcttcttaaacagaggtggacaagaggagcatgaattttcgttgcagcaacaagcgggaggagtttttcttaatcaaccccatatgttattcaacaatggcaccaacaataagattaatccaaggaaaagagcaagggaagttacggcaggggccgcaataactacgcccatgaattcat

SEQ ID NO: 255644 - DNA, 186 bp, Gossypium hirsutum
ccaaattttggcattactttgttgagtgttttcaggggattctattattcattttgggctggtgggtttttgtttcttttgggaggagttgacctaaaaggctaacatcaaattggtgtctgattaggggattctctggtcttaggcagggatttgaaggtgtttttgaagtgggtttggtggctt

SEQ ID NO: 255645 - DNA, 125 bp, Gossypium hirsutum
cattatcccacttcaacttttcaactcaagctgcagcgaaagtagaagccgaagtacaaacgatagcgaaaacacagccatcatgtggagaagagccctgatggatagcaaagcttgccaatcat

SEQ ID NO: 255646 - DNA, 107 bp, Gossypium hirsutum
cttttaatggcgaaaccacacattgtggtaatcccgtatcctgtacaaggccatgttattcctctcatggaactctcccaaaacttggccaaacaaggcatcaaaat

SEQ ID NO: 255647 - DNA, 114 bp, Gossypium hirsutum
attgtgggagcctccacttctacctatgaaaaatgtgatattaagcgggtgtccaataggaagagaagatccacagagctcccaagtgatgttaggagcctgagaatttttagg

SEQ ID NO: 255648 - DNA, 168 bp, Gossypium hirsutum
aaataaattccttttttttcagtctgctctccctagaaagcttccattttttttcctttttaaaattcctctatttctctctttcttcacaacaacaacaaaaaagtttcaatccaatctcaattattcatgtcggaggacaagggtcggccattgccgaaatttggt

SEQ ID NO: 255649 - DNA, 103 bp, Gossypium hirsutum
gtccgctctttctatctcgatttctccgtctttcttccctaaatgacgacgttcaggaagcttaatcgacccactggtcatcgtatgtccatgctcagaacaa

SEQ ID NO: 255650 - DNA, 464 bp, Gossypium hirsutum
cttactcgtccgcggacgcgtggggaaaatttctgtgattttgggccacgatgataaagtccatcctcttacgtacctattctgctcctatccttgtggaggttaaggatatccgccgttcgggattatcaccgttgtcgaaaacgagatttgcttccacgattcgctgttcttcgagcaacgacgcctacataccgaagcttgagccttttagtagaacaaaattcgagcgtgctgttaaagaccctcccttgattgagaaatctgagaacgatctcgctgattactgttcgacacttgaaggagacgaatcttatagttgctggagagcttatttcgaactcaaagatcttgagaaagaggtagcgaaagaagaggtagagcagttgattatacaagcagggggagttaagtcactgattggtttcttacatggaatcgcatccatccacaacaatggaaac

SEQ ID NO: 255651 - DNA, 428 bp, Gossypium hirsutum
ttcttcacgcgtccgcacaaaaccacacatttatgtggaaacttaactcaaatacaatcttcatcaccattcacgatcaatttctaactcagcgatttcctgaccaaaaactctattaacaaggttctattgccgatttttccctctccgtattttgagctttcttgatcaccgtcaaagaatccccttgaatttcatcatgcataatccccaaatttatacccacaatacctacctgtacacaagcaatggcctctgctacaaaaactgaaggatctatcttccttgggatcaaaagtggcatcaaaattaattatatagaaacctaacaacggatgtctccatctatcaaaatcagggctcatgctcaagagcatagggggcagtttcgaataagggaaaagagaaagctatcgagcagcttatcc

SEQ ID NO: 255652 - DNA, 413 bp, Gossypium hirsutum
tcttttcaacaaactcctgttgcaggaatggatgaacatcttatagagttctcagaagctttgagaactgttgcgaaggcattaagacgagctgctgaaggaaaggcttctgcacaagctgaggctgctgaatggaaatggagatatgagctggagagaaccaggaatattcagatggagcaaaaagctcgcatggcagagcagttctctgcagagaaaaatggtgatcttgattgcgagagggtaaaaaactccgacaaccaatcaatgctgcagaatgaatcaaatgagcattctgagacaggctgcatgaagcatgggatttggtcgcatgaggttcttcgtgacagagaatcagattcaaattccaatgcagatcgtaataagattatgagaaaggcatcttttaaact

SEQ ID NO: 255653 - DNA, 337 bp, Gossypium hirsutum
tttcttacgcgtccgatggatttacctcattgaatgagatcatgtcatcaaaattttttttgaaaataactttattttttaaagatatgtcataatttagtttattgatagtagtttatattccagacaatataatgtatgaatcataatgatttcaattttaatgatataacatcatttgattgattgactatatatatacatttaaagacacttttatatcatgataatgcatcaaatatagaataaataaaattttgggtgcagtgatcacattgcacttttaaaagtgagaactcaaattcaaactttatagatgacattgttgagattggta

SEQ ID NO: 255654 - DNA, 371 bp, Gossypium hirsutum
tcgtttttatcaaaaaacgaaaaaagaaaaactcaaaaccttctctcaaaacgctcttctctctcagtcccctgggcttcatcggcacctaatgcacctccatctccgtcgcggtttcaactagatccataaggatccgtcaacctttggacaggggaagcaaactttcactagatcgataccaacagcagataagaaaaccctcttcttctttcttcttatttttgtatcaaaatgaaagaaaaataaatgaataaataaaataaaaagcccgaagagaagcaatgaaaatcacctttttgttttctttttttatttcgatttctatggggtttttggattttgaagattgagtttttttgttttcaaaa

SEQ ID NO: 255655 - DNA, 398 bp, Gossypium hirsutum
gcaattctgaatgaagatggtgaagagggggaaatagtgtcgtaaaaatactagttttggttgcagcttcagcatcagcatcccctgtgttataactcctttgttaataatagtaaaaaaaaaaaggaaaaaaaatgatagccatatttgtagggatatttgtaaccaaatcaaaacctaacacgtatatatatttatacataaatagaaaagctaaaaatattttctccattttcatgagcagtatggccattccctttaaaactttttttccctatacttggctgtaaacagtgctattttattagtacagcgggaggcaggcagagtgtcagcggatgaatctagttgtatgcttcttgttgttgaactgaacactgttttttatatgtatgtgt

SEQ ID NO: 255656 - DNA, 322 bp, Gossypium hirsutum
gtaatatctcaatttttaaggtttctgagcattttaaagcccataaatacacactagaaaaggacctaaatgggacacgcaaagtagaatgcagaaaagctcgaagaacaccgacaggctcaactcaaaagtaggatctctttcaagactgaagatctctattcaatttcttagaagtttttgggttttttttatgttttgctgttttcctatttttgagatgttttctcttctaagtatgaactaaatttcctaaatacctaggaaagatgaaacctatgacaaatcttattatttgatttttctgaatttttcttgctcc

SEQ ID NO: 255657 - DNA, 386 bp, Gossypium hirsutum
gtaattctagctgtagccgcctcggttacgcgttttgctttcttgaagagtaagatattaaaaaagcttctagatctataagttctacggatactgagctatcttttctttactgattcttagttttcttgaggaagttcttgggatttcgaaaagaaagttcttgggatttcgaaaagaaaatagctgataatgtcgcggtgttttccttatcaacgtccggcggggtatttaagagagggattgatcgaatcgattaaggttcgttgggcaaaagtatttggttttcactttcgttgctcaactgcatgcgtttgtgatacttgattatgattttatatttgcgtatttgtagagtttgtaaaaactgaaatatgacatgaacc

SEQ ID NO: 255658 - DNA, 247 bp, Gossypium hirsutum
ctattttatgcttgtgttcatccatagagtcatctgtgttggttttgttagggtcaatcagtttcatgcgtcatctctagttaattgaaattatatttatgttttggtgtgtctagttcttaaacgtttgacatatgcttctatttaaggcaaattgctgttttgtgttaaaaaaaaaaaaaaaaaaaaaaaaaaaaaaaaaaaaaaaaaaaaaaaaaaaaaaaaaaaaaaaaaaaaaaaggggggc

SEQ ID NO: 255659 - DNA, 436 bp, Gossypium hirsutum
tcgttttcagtccctttgcaaaacctgccatctctgaagcttttgtatcaaattttctatagatataacctcttcagaatctgtgggaaagttttgccttttggaaggttcttaatccaagaaaagggaaattttggatgttaaagtggagcagatggtgtttttgtagaaatttgggaatggaagatagatatagttttccatccttgagagatggggattttgaggaagaagatgtttgggcagctcttaaggaaagtaaggattcaacttacagggttggacattccagtgaatcttccattcctgatagaggacatgttccaagtgctgcaagaatgatcccaagaactttgtctgcaattaataacagcagtaacattggcagttgttgttctagttacagtcatgaggctaatgatgttaagcagcaatc

SEQ ID NO: 255660 - DNA, 440 bp, Gossypium hirsutum
tcgtttcacgcgtccggctgcatctgctccctttaggggttcaggcaatagccccaggcctgccaccgctgagcgtaatcagactccattacggatgaccatggagaagagagcaactgctcaagcccaaagtaggaatgacttcttcaatcttttaaagaagaaatctacttcgaattctgcttcctctgtccttgattcaggctctactgtgtcaccacctgtctcagagaagtctgatgaacttggcactgaagattccagcacttctgttgctctgctggatgggggtgttccatcatcagagatctcaattgctgacttgccaactgaaaataggagtgaagtggccttgaatggagatgcttatgctgagcctcagcatggttctagcaatggagatcagcattcgagacctgatgcgtacctttatcctgatg

SEQ ID NO: 255661 - DNA, 510 bp, Gossypium hirsutum
  unsure (1)..(510): unsure at all n locations
gttttccttattttatttttctgaaaagaagaagaagcagctctgtttcaatttcataccctgttttcttgtatggaaagagagaaaagtaaagcttacgttaatggcgaagacgaagaacaagaagatgagaagatggaggagttcttttccttaataaggaattttcaagaggcacgtgatagaagaagaaatgagctgaaacaaatggagacgaagacgaagacgatgaagggggaaaacaaggtaaggaggttaaacaacaatgagcagccgagttgggttccgagttttgaatgggctgattttaatgaagaaatcgagtttcgaaaaccgcctattatttacccaacaccatacaacggcgacgatgacgataaggaaaaacagcaacaacatgatgaggaaaacgatggtttagatcttaagctcaccctttagcctttttttatgggtttaaaacaatgttaattactaagtanttttaatgaaattaaatttaggtttttg

SEQ ID NO: 255662 - DNA, 542 bp, Gossypium hirsutum
  unsure (1)..(542): unsure at all n locations
tttcataactcaaaacatggttggtttcccaatgtcttcttcttttttttttgataaagtttttgttcttttcttcctgggttttgctcaaaatatctcttttctttttctgaaactataaattttggaaataaaaaatgaccatacaaccacaaagcacacagtcacacactttttactattttttgtttgagggtgtttagtcctgggaagatgctttataaaaaacacttaccttctgtcatctcatttgttttgtagtaatctcgcggcatgtgtctttttgcatgttatttactcccttttgtttacgtttttgatcaagactattaaaatttaaggtttatctttataattcttttttctcttttttatgttcttaaaactcctatttgagttccatcactttaaatggttctttctcggtctcaagacttagacacgactgtaagttgctgctgctgaatttcttttgggttcttcatcaatcatctcttttaatgggctttttattgcctttattatggnctngaatttttttt

SEQ ID NO: 255663 - DNA, 441 bp, Gossypium hirsutum
ttcacgcgtccggccaatagtaaaatcaactcacagtcaccaaggacgcagagactggttcatgcagggaaggaagggagcaaaagcgacagaccactgtcatccagagacagaaatggtatgaagtgctgattcttggttaatacttacctatttttgttcatagcttgtcgtaagcttgacatgtttcactgtgcagcttccctaaaggttgtatattagcttatttagttcacatatttcaccaatgtcaggttcacagctagcacttgcactctgaatggtgtttgttctttatagctcctctcacataagaagctaaagaatgtcgtaccatttactttaccgaaaatggttatgctgtaccatttactttatcgaaaatggttatcttttttcccatgttaataaataactttattgttttggttcgatttttca

SEQ ID NO: 255664 - DNA, 243 bp, Gossypium hirsutum
cggacgcgtgggtcgtccacgcgtccgcctttacggcaacaatcgctgtggcgaaattgcggcgagttttggacaattccaacggctccggggtctcaacttggggggaaatatcctcgacgccggcattgctggtattctgggttatattgccactctcgaagaactggatctcgcttataaccatttttctccgtctcatataccgagcgaactacgtaactttaactgaaccttgagcag

SEQ ID NO: 255665 - DNA, 401 bp, Gossypium hirsutum
cttttccataacctggacttgcacaacaagttaaaaaatgggactcaagttgaagattctcaaaattcagaaagcatttcacttagccccggtgaaagaactgctatagctaagagccttcctgaatctcagtcaaaacgagccctggcagtggttgaagctttggaagggaagcggatggagacattcatgcctgcactgagagacttggctgaggagagtgggttattccttaaaaagcttgacaaaaaattggaaagaactctcttgcattcatatcgcaaggcatgcataccctacttgattatattgatttgtaaaacacaacacacacacgcgcgtgtaaactacctccttatggttgctagaccttcatgcttttaaagctttgcagcaatatt

SEQ ID NO: 255666 - DNA, 468 bp, Gossypium hirsutum
  unsure (1)..(468): unsure at all n locations
gtcagattgaattctgaaaagaagaatgttcaaaagtttgagcaattgcgacatacattcctttctggcaagccttcctcttattcatcctccctccccaaatcaagttgcaaaactaatgaaaggaaatgtgcttcatacccattcaacccactcttaaccttatcaaccaagtaaccagttgtttcctttctaaccctcccatcaataagtggcatcccaaggtagatactaataatcacccaaaaaccctcagtttttgtccccttagagtttttaattccacatctccttctgtttaggctttggggattccgaattatcttcgacggtaaccttaaatcttcagctatgctaaataaatctgaaccctgttttttatgtttcttttcctttctttgaagttgntttgctttattgatttttggattaaaaattccactggtttattactaatactaaaatttt

SEQ ID NO: 255667 - DNA, 403 bp, Gossypium hirsutum
ttctgttcgaaaaacaaaggccattaaaccattaagtgggagttttgttttcagctagcttgctcaaatggcttttcttttcaacaaattccaagatgctgttagaatccttgcaaaaagccccacttttgctaggtacagaaggaaactccaatttgaagacgatatcaatctcctcttcatgtataccagttacaatcgtctaggaaagaatgctgatgaggccgatgccgaggagattatcgacgtggctagtaaggcctcttttacggaccaacaaatgcaagtgcaggaaaatgttcattttcaaattaaaaacttttgcactgttatggatgaaatccttcttcctggtagtgctgttcccatgacaagaccaataaaacgctctgaactctcactg

SEQ ID NO: 255668 - DNA, 439 bp, Gossypium hirsutum
cccacgcgtccgttccttgcctattgaaaaaaccgatctttctctctctattttctctatttctgcgtttgaaatgagctaagaaaaaaaaaatcaccagatgggtcaacaaacaatagactctaaagttagtgaatacgggctgcggaatcctgaaagtaacttgccgacttgtgataagcaacctctggttggtacaaagaagacaccattaagagatctgcagaacgaaaacagaactgtgccgtactcaacgggaagctcttcattttctaaagatagaggacctgttatcgatcctgctaaggtttctggaaataagagaccagcccctgaatgtcctgtgagtccttcacgctgccaatctccgaacagtagtgctataaacgggcatcttgtttatgtgcgtagaaaacccgaagcagaattagcgaaaaac

SEQ ID NO: 255669 - DNA, 487 bp, Gossypium hirsutum
cttttgatggtttgggatttttgctcttcatttagcagggtgctcaatttatggccattctctcttgaagattttgaaaatgccatctgtcacaaggatagtaatttggttctcattgtggaaacacattcagctctacttcgtatactcataaaagatgacggtgaatattcattggctttacagaacaaaaaaacgaaagtcgaagatttcactcatcacttggaccgagtatgtctgtgatttcttggaaatgatcaatgttactgaattatgctcttgtatgaccactataaagcgagggcactatggccttctggatgctaatgctaagttagggattttgcgcgaattggtttgtcatgcccttgaaaccgatcttatcaggggcaagttggatgatctaattgagcagcgacgggcacttggagccacagtaagaggggaagctttggaatatgctagaaagaaacgagaagaaaaagaa

SEQ ID NO: 255670 - DNA, 431 bp, Gossypium hirsutum
ttggttcagacacacactttagcacttgcatgccatttcccaataacaaagtctctatcctttatagtttattctttttcttttctctcctttttttttttcttcaaattttagggttttttttttgaaatgttgatttacgatgtcacaatctgaagaaaccactcacaccgattccgcccttctgagtttagggcttaactcgaccgatccgactccgattcccctcgacgagtcaccgtctgatctcaatcactcggttaaggaaaccgaccaccacgaaaacaatctcgaacagcagctgaataacctcgatttgaaggaagaggaggaggagaaagatgacgtagagacacaaaacgacgttgaagaggaggaggacataatcgagaatgagaatgatgatgatgtgaagaaggatgaagaaagga

SEQ ID NO: 255671 - DNA, 204 bp, Gossypium hirsutum
ttagcaattagcattttcgctttctcactacaaacattggcggcgatttctggccactgcacattccggtcacaccaattccctctctctttcaccgcccccgtcgccttctcttcctctttctacggggaagctatccgatcttccagcatttccttcgcttctcctccgtctgtccaccgatcccttatatcttgccaggcc

SEQ ID NO: 255672 - DNA, 268 bp, Gossypium hirsutum
tggtgataaaaaaacgacaaaatgggaagagggaaatttaagggcaaaccaaccgggcaccgccatttctctactcccgaagagctccgtgctacgtagagaaaagaaaagggagaaatttatacttttaaattttaagttttagcttcgtataaacttgggaatgattccgcctttaatgcatgaataacttgggaactttgagtcaaattcttagacaaaaataagaaactatatatttttcttttataacttttattaatttcac

SEQ ID NO: 255673 - DNA, 139 bp, Gossypium hirsutum
ttcaaacgtcatgttctaggatcatattatgaaggcgtgtagatttgattttaataatgcattcaacatgcttgatgaaatacctctgtgaattattagctttcaatgaatttactctgcatatgatgatcgtccatga

SEQ ID NO: 255674 - DNA, 160 bp, Gossypium hirsutum
tgcacccagagacgaggaagggcgtagtaagcgacgaattgcttcggggagttgaaaataagcgtagatccggagatttccgaataggtcaacccgccgtctccaaatccgcctcctccttcgtctccgtaatcatcttcaaggaaaggagggtgtattt

SEQ ID NO: 255675 - DNA, 348 bp, Gossypium hirsutum
tccacgcgtccgatttaacctacctcacctcctttcatttcattataactcccctctctctttctctctcttagaaccatcgttcaatggaacacccaaaggacttatgtccaggaacttctgccatagtttttctccttcttactggccttctctacttatgtgtatggactccttcaaaccctttacttcccttccatgaacccaatggttcacccaaaaattatactggcgtagagttccttgtgaaagatgagcttgatttggcgttggaggaagcttcgatgccgtacaagaccgttataatcgcggttgtaaatagggcttacgttgagcaaagcgttaatg

SEQ ID NO: 255676 - DNA, 271 bp, Gossypium hirsutum
tccacgcgtccgccaatgcctccattgcccttctctgaggcatcagcttgttgcagtcaatgggaagccatccagcggtggggataatacaagtgaagatgagctataataactgatgataggcacttgtctgagcagctttatccttttactacgtttgttttcctttaaaaatgctagcaatggtaaacctcaccagcctttctggctgggatttagaaaataaattctggtgccattttttccaaaagcaaaaaattattttattgat

SEQ ID NO: 255677 - DNA, 410 bp, Gossypium hirsutum
ttgattgggttgccgataatgatcccacccttctgtccccgccccctggttctgccttcaaagtaaccttcttgaaactcaaagagagtgttagcaatgaagtgcaaggtgggattctaggggaaattaaaggggtgaaggaggggatctctggtattcaacagatgacttgcggagagaatttctcacctgcaagagcaaagggcttttcacttgcctcggtcgctgcttttggtggagttggagaaatggaggcagcagtgggaaatgaagagtatgtgaacctacagaagcaaaaggttagggacaatgtggatggtgtcattgttgtcgattatgtggtgccagcttcttcaccatagattattaactaaaagaaagaacttggttcttgaatgatggaagctttg

SEQ ID NO: 255678 - DNA, 251 bp, Gossypium hirsutum
ttatctctttctatttacctcccttgtgcatctcttttaatgtagtttttttatttttttcatttgataaagttttttttatgtttatgaaaaaaaaagtgaaagctaaaatcaaaataaaacttgctactcatattctctcccacatttacaaacctttattatccatcatcgctttaacaaacctatttgattctttcaatgatctagtccacaggttcgcctctctcgaagaccttaccagtcgtgac

SEQ ID NO: 255679 - DNA, 209 bp, Gossypium hirsutum
ttcccaccagaaaaaaaaagttccatcttttagataagcaaaatgagtgatcatcttgttgtatgcgtggaccgccttacgaaacccgaaagtttgaaatcagtgaatgaacccgaggttgcgggaccttcgggtgaaggttcttctgtagttgctgagccacatgtttgtgctattgatgttgaggaagtggaggaacacggttcgtg

SEQ ID NO: 255680 - DNA, 292 bp, Gossypium hirsutum
tccacgcgtccgataaaccgcacacggcggggatggactatagtttagcagcgctgaaactgctatgcggccaactaaaagacgctcgaggaacaccttcacaaagcgccttaacccttggcggcatcctctttcaacgtgtctggcttcagggcgttttggtttcaaacgacgacgaagatcacctgcttctcgacgatagcactggcattgtcgagcttaacctctacggtgatttccgtctacgtcaatggaaaacaggcatgtatgcaatggtggtgggaggatactt

SEQ ID NO: 255681 - DNA, 311 bp, Gossypium hirsutum
tctcttttcttttttaaaaaatttacagagcccaactccccattttttcttcttttcctctgctaggttttcaaagcctagcttgcgctgaataaaaagaagcaaaataggttttcaatctttctctgctagggcaaaagagttagcccatccttgcagctgctccgttgtgcgcgcaccaacgatggcggcccgaaaaaaaatcaacggttctgctctctgtatgctcttgtccttgctactgttctatcactgtttcagcctctgttatggctgctactttcgtttcttttttgctctctttgcaagct

SEQ ID NO: 255682 - DNA, 376 bp, Gossypium hirsutum
ttataagtgatttaatctacgttattcagactcgtgtgttggatatgggtatgcatctgacagagtatatccaattatttaaaacttttctatatatttggagggcttttaaaaggttatatccttgtaactgtgtccaaaatggtgttggagttaagtgcttcaagaaaaactaagacgcgaaggtaaacgggtcaggtcaatttggattttaaaatttacgggttatttagggttcagatcctttcaagtgtaggttattctggtttgggtaatcttctgctcgggttatttaattctgctagttggttcttttcagattaggtcgtctcaggtttagggcattttggattaagtgtttagctcatttccggtt

SEQ ID NO: 255683 - DNA, 220 bp, Gossypium hirsutum
tccacgcgtccgcttatgatcttttgttcaagggaagtcctccggtgaacttgtagatttcctgtatttcttgttgccgaaatccacagaacttaagagtagaagctacctgcctaaggagaagtgcaattgcaggtaaatgtccaaaatgtttccaccatccagagcatgaaaggagattatcttttatctctgtatacattggtgctgggtttttgag

SEQ ID NO: 255684 - DNA, 315 bp, Gossypium hirsutum
tagtttgaccctagatttaaccctggtgtcagagtcagttgttactatggtccacaacttccgacggctcaatcttacaacataactttgtatgtaagcaccacggtaagcgtggaacctaataaccaagatggagatggtgtagtgctcacgagcagtggcgaatactgcaaaaattggccaaacacgaaagcgtatcctgtgccgaaagcctctcacctaggtattttgcaaaccactgacatcttgaaggccatcgtaaatgccgccaacttggtgtaacccctaaaaataaataaattccgtttttttgga

SEQ ID NO: 255685 - DNA, 236 bp, Gossypium hirsutum
tccctgcccccttttgctgtccagttaacccccagaatgctcctttcttcatctatgcgccaccatgaacggcgatccgcgcattcgaactccaaaggagtgattttcagccttgagaccccattcggacttcgatttcaacgaagtgaaggggaaatgacagctaacttacatggtacgggcgctgtgctgacgtacgggggctgtgctggcgcaggcgtggctgttggaggata

SEQ ID NO: 255686 - DNA, 99 bp, Gossypium hirsutum
tcatttctcattacttcctacattccctcacgtctcatatggaagaaaattacggatcacatgattcacaaagctcagccatatttcgcagtcactgtt

SEQ ID NO: 255687 - DNA, 184 bp, Gossypium hirsutum
tcacgactttttcatgtgaacagaccattctcaactgttctctgttccttaagcggaagaggggatttctttctggctgtcctaacaaggcaaatagcctaaggacgggactgcttcctgcttgagaatcagctgttcgggattacgttgattgacctaaggacgggataggaatgaatgatgg

SEQ ID NO: 255688 - DNA, 248 bp, Gossypium hirsutum
tccagtcgggcgcatagaagttatgcgtcaacatttgattagtatatggaaactgcattgaagtcgagtgctgccattgtttcagcctgtcaagctttcataggaacggaagaagcagatgaaactgcatatcaatggctgatcaatactgattacaaagctcataaagccctcaacataattgctcgcttctaccatgatttagcgactaatgaggatgaagaaaagagaggactggtttgtggaac

SEQ ID NO: 255689 - DNA, 429 bp, Gossypium hirsutum
ttcacgcgtccggtcagacgtgcctaaatttaaaaatcgcgaaacacacgggcaaaaattagggcacacgggtgtgcccgacgggcgtgtgccccaaaatctatataaacccctcactattcatcatcttcctccccaaaaatctctaaccctagtcacttcaactccacacgccctacctgccacacccttacgccgcctacaacactatttccgatgactcaagcttctctcttttgcgtttgttcactcttttctctctattctctttaaatattttgcctatttcatgttttctctggtccattttactattttaagtgaatattaatagtagaataatataaatactcgtgcttgtcatttttcatactacattcatccatttttcttattttcatggattttatatttacccacatacattca

SEQ ID NO: 255690 - DNA, 112 bp, Gossypium hirsutum
ttgaacgcctctaagtaagactacggactagaagcgacacacgcgcccgtcgcccgattgcacgacccgcagtaggggcctgtggaccccatgggcacgtgtcctaagtgca

SEQ ID NO: 255691 - DNA, 424 bp, Gossypium hirsutum
ttcacgcgtccgggcactcccaaggcctcccagaccgtgtcagaggcatcgatgatgttattaacgcatggaggttggtaactatgtccaccatcacagcccattgtggagtcacattcattgactactttagctttaacagtttgtccgttcccatgtatgttaatatacttgagacaccttttttttccttgttgaaccatcctgttgaaaatgtcaccacaagttctttgttggagtggtacttgttatcacattcaggtggtccgcggccatcctcaccatcatcaaaccgtacgttgagagtctgggttgccttcgtatggtttgaaacttgtggggaacacttgtaaatgtcataaagcttgccttctttgcagcaattggagtcatgttttgtattacgttccttaggaggcttttt

SEQ ID NO: 255692 - DNA, 297 bp, Gossypium hirsutum
agaatacaaggtgatccagatagtgtttcgaagaaaattgagaagagtcgactccagtactacatcaaccacttcgagtgaatcggaggttcagattttgactatcggcagcccttcttggagggatctaggaacgataccataccgttttattcattcgaaaaccaaggctttggtcaatgggagactccattggctttccaagcctaacaggtacaccactgctagcttgctcgtatccttcgatctcgaaacagagcaattccaggaggtgccgaaacctgattgttgcggctc

SEQ ID NO: 255693 - DNA, 373 bp, Gossypium hirsutum
ttgacgcgtggggctgccgatcatcgttcttgatgcctcgtcaaaatcgaagatgaccggcaatcaccaagggaatatgtagttgatctagttggggagccaggaaatattcacggtccggattcctccatcaatggaggattcctttcttcaatgccttcgccatttcaaatttcttatctaaaagagttccagcaacctgacatggatactgcaccgtgttgtcagataaaagatttgaagaattcacattctttttgtggcattgagaaatctcaacagtttaagagcaacgggttgcttgaaagtcaaaaggcaccatatgtttacaccaattgatcaagactgtcttggaatgtcattgatgactttt

SEQ ID NO: 255694 - DNA, 446 bp, Gossypium hirsutum
  unsure (1)..(446): unsure at all n locations
ttttgccatgagggaggctgggaaacctggaatgtctgatgaagaggtgcctttacatatttgttatgtgatatattacattctttcgacttttcacttttggtgaagtattcgtgcttgagggatatgggtattgaaatataatcctctaaggatcttttataacttttaaatatatcagggacgaagcccgaagtttatctttgggatcaaaattaaattataaaaatttagaaggatcaaaatataattttatctttgtatatgtttgttattttagaattttaaagggattaaattaaaatattttcatctgtggagggagaggggggcaaaattacattttaaaattttaaaattttaaaatggtcataggactatgttatctttgtatatatgcttgntattttaggattttaaaacgactaaactgaatttttttaatc

SEQ ID NO: 255695 - DNA, 379 bp, Gossypium hirsutum
ttcacgcgtccgcccacgcgtccggttggctcggatcggctcgtctaagactccggtcgagatggaggaggatgaggaggaggcacccaaagagctcaacacaataaatagctcaggagggttcttggatgtggcgcctgataagttgtcggtgaagtatacgagcgtaagcctccatggccacgatgtcggtgtggttcaagccgataagccggctccaatgaggcgtctgctttattacttcgagattcatgtgaaggacgctggggcaaagggacagatagctattgggttcaccaatgaaggctacaagatgcgaaggcaaccagggcgggaagtaaacagttgcgggtatcacgccgatgatggatagctatac

SEQ ID NO: 255696 - DNA, 373 bp, Gossypium hirsutum
caccacctatgggaggaggaatgggaatgcctccgatgccaccatacggcatgccacaaatgggcagctattaagtcctaaccaagtctgttttgtcaaaaaggttttattagcagcggggaatcccatggtgcattgaggttaaaaggctgacgtagttctattagtggcaaattttcacgcttcgacgctgtcattttatttttcttgtccgtctctggtagggtgtgtgatatgtcttgtaatattcattttttttatgtagcaagaggcatttttttggctgctgatagggggcaagccgaggatttaatgcatatttgtaattttcctttttgtagtattattttcttccggtgtttggaagcgactt

SEQ ID NO: 255697 - DNA, 265 bp, Gossypium hirsutum
gaaagcctgccttacagattccatgaaatccgcgaccctgcagtggtagaacctggtgaatcagtttcaacttgttgagatttgcctcaatcttcatggtaatattagcagaactgacactgattttctagtctgaccaggaatccatactgagctttgagttattggaaacccattgcaaagtaaagcaatgtatatctccactcaagttcaggtcaacagaaaataacagagctaaggggttttacctatgaattctagctga

SEQ ID NO: 255698 - DNA, 262 bp, Gossypium hirsutum
  unsure (1)..(262): unsure at all n locations
aagagcatgaaaatggaaattgtagggctttatgcatcttacattgtcgaaagcttgaggaagtgactctctttgaaactatttcatgaatattgtagtaaattttactcgttgggtattaaagaaatgttggcnnaaaaaaaaaaaaaaaaaaaaaaaaaaaaaaaaaaaaaaaaaaaaaaaaaaaaaaaaaaaaaaaaaaaaaaaaaaaaaaaaaaaaaaaaaaaaaaaaaaaaaaaaaaaaaaaaaaaaaaaggggggg

SEQ ID NO: 255699 - DNA, 237 bp, Gossypium hirsutum
tgttgatgcttcaagagtacagatatcaaattcaaaagggaattataatgagaaatcaatttacagtgttgcttcaaatacacttaatgctaggatgaacaaagtgtttgatcctgaagtggctgctctgcttgatgatagtgatttgttgcgttttggatctgatgttgaggatttggaggaggatttttgttgttagggcaaacactggtgaagaaggggagggtgatgagagtg

SEQ ID NO: 255700 - DNA, 383 bp, Gossypium hirsutum
gtctatccatgcacttcatcatgttggctgttgaaagaaaaacaacagaagagattcttcttctaggtgttctttggttgcttatttcttcgcaaggaaagaacacctagaagaagaatctcttctgttgtttatccatgcacttcatcatgttggctgttgaaagaaaaaccttttaatcatgagtgacctatgaaatggaatatagattgtaggtgaattaatttcattttgtatgatgtcgagtttattgtggtttgtcctttgtgttgagtgtgatggcatgtttcacattattaatattcataaatggaattgaatgattgatgaggacgtatgttgaatctatgtaaataagccctatctactgatttttatccttt

SEQ ID NO: 255701 - DNA, 437 bp, Gossypium hirsutum
tttcacgcgtccgggcatttgagcatcaatggacctcacacactgaggttgaactacacacgaggcgaaggagttattagaaaggatataatgcaatggatgctgcacaactgaagatttgaaactcttttccgtttgcatttgtggacttcagaaaccccctatggtcgtggaagggggtatgtttggtgctggaaattgtttttttgaaaggatacattgcttttgagtttggcctgttcatgggacaataaaatgtacttgtcatctgcgtttgtagattctttcgagtctatatgttccagcattctgttgcttggagaacacagatgttatgacattgtcgttatgttatacaagatctgtgaatcatttggtttgccattgccatatggaaattttctttggacactatttgtgataacgttgaattttac

SEQ ID NO: 255702 - DNA, 367 bp, Gossypium hirsutum
ttgacgcgtgggtttttttttttgaagctttcggcaatgggcgcctctgaatcgtctctcgcagcttattcactgagttcggccgatcaaatctccactatttctcagcgatcggaaacagtcgatccgattttagagaagcttaaatcccttagaattacatctcctatactgaccacaccgccaacggatggtagcttaacggacattttagtgcgaagaccgtcgtcatcttcatctcaagctgctgtaaatccaaaggtgttcctggagctgttatcagcgtaccgtgattggcaagaggagaaggctcaaacgatttgcaagaagcaggaggatatagaatacaaaatagaagtcgctgacg

SEQ ID NO: 255703 - DNA, 396 bp, Gossypium hirsutum
ttgggcattccgttcaacgcaaaagaaatcatgtgtggagtagtagtctttagggtctagaagatatggtggttagaatgtgattttggtgggtcttgatgttttgtattattggacccaaaccaagcttttgacatatttaactagtttaatttatctttggtgatgctaattacatattccttcttcaatttcaatagtggggttgaaagatcaaactgtgtatgtgtgtaaagtagagtgcaaaatgtctagttattaaattttgaccaaaatcttttgtgttacagattccaatttcaagttacaaggaatctattctttttgtttcgtaatttagagctttgggaatgtgtggggccaatcaatttcatattttataatgacaaaactttg

SEQ ID NO: 255704 - DNA, 433 bp, Gossypium hirsutum
tttacgcgtccgcccacgcgtccgcccacgcgtccgtgggttgctgtggagccacatggaatcccagacccagaatttccaccatttcaatcctcgacgaagatgaagaaacacctcaatcacaacaagtcattaccaggaccaccacccgattcaatgtcgtaaacagcgccaccgtccccctgttgctggcccgccaccaccaccaacaacagcaagcggtacccaccccgccgacatccgcctcggggatgaacttagcaatggcgctggccgcggagcgtaatttgcggggaaacaacgacaacaccaacaacgtgggtcccagaccggttcaggtaaagacattgatgagattgattgaagaaacggagggtgaagattgttggacacaacatgaagagcaactgaataagaagcagaggaaagaggc

SEQ ID NO: 255705 - DNA, 291 bp, Gossypium hirsutum
ttcacgcgtccgcttaaaaaggatccttaaaacaggaaaagaaatctggaaatttcctatacagatttgtttcagatgcccacagagaagaaactaaatggcggtaagaccttcccctcaaacagaaacgtcaggaaggagattgaggtctgcattactagatgaaacaaatatccccaatctaaaaaaaaacagagtaaatttgttgtctatggtggccggtgggagcgacgatcggaggctgctaaatcagaagctttcactagagcatcttcaacccaaaaacagtct

SEQ ID NO: 255706 - DNA, 465 bp, Gossypium hirsutum
gtactattcctatcccttcctccccccaaaagaaatctacccaaagctccaattctatacccaaagctgctgttattgtgattttttgagttctgggtatggaagaaacagagaaaccaatagaggtattagctatggaagctttgggaaaagggtacgatataactggagatttcagattgaaatatgctaaaggaacaaggttactggtgcttgatgaaaccaacaaacgagacattgttttcccaggtgctgcttcttttactatgaaagaagtttctcaagatattcgtcttgataaaggcgatcgtattcgtttcaaatctgatgttcttgaattcaatcagatgtctgagttacttaatcagaagtcttctatacaaggaaaagttccttcagggtatcttaacagtatcttcgatttgagtggaaattggctttatgatgctgcagacaccaaaactc

SEQ ID NO: 255707 - DNA, 357 bp, Gossypium hirsutum
ttgaacaacacattgtttgcacaatgaatacttgtgtgtgttgttcgaacttcgaacctatccagcatctgcaaatgatgatgaagattttgaagccatactcaggtgtttgtgattgtatgttaccgtgagtagtgcatttttaaggtttaattctaaatactgctgaagggcacctcttcagtggccgctttagggttaattttgcgtttgaacttccccgcctgtttgcttgagctaaaaagaaggagaaagttagtgtgttttcagaaatatgggttttgattggtttctctgaaaatggtaggaagggctgatagatgaaaatgggcagttgcaatgttgatttcagggatg

SEQ ID NO: 255708 - DNA, 457 bp, Gossypium hirsutum
  unsure (1)..(457): unsure at all n locations
ttttcctctctgcttgaagttaccaaagaaacagagcaacaatggcgaaaaccagccttagccgcctattcgcgtcactctcggagcactccatagccaaaccgtctttcactggttcgagatcagagtcggtgactcgttcagcttacaactccgtgactcgcttcgtatgttcctctgctcaggaaactcaattgatccgtgaagaaagatccaacgagggagatcgagaagctgcgaaagagaatctcgaatctgtgaataaagaagaagatgaaggtgaagatggtgatcacgtgaataaagagacgggggaaggtttcnggtcctaaaggcccagaacccactcgctacggtgattgggaacggaatggtcgctgctccgacttttgaattttttttttaattgttatgaatgtaaaactgaattgaatcagcgatttttaatttcccggag

SEQ ID NO: 255709 - DNA, 238 bp, Gossypium hirsutum
tctggtagcaatggttgaacatttcccatcagtgagttaagaaaatatgcatttactttcgtttgagtgtgttgtttcagttaaaggagttttgggtgcaatttttctttattgctttcatgggttacatatgtttctcccttgaatgctttttattatgcagttcaggtggagaaattttttcttaatgtttctgagctgttttttttgaaaaaaaaaaaaaaaaacaagcatctac

SEQ ID NO: 255710 - DNA, 136 bp, Gossypium hirsutum
ttcacgcgtacggtttaccctggtccaactggtaagtacgactgtgatttttaaaaaaaaaaaattgcatagcaatgttacgatagttgtagttataaaagtaagcgtgatttggaatggtaggggaagtgtatat

SEQ ID NO: 255711 - DNA, 257 bp, Gossypium hirsutum
ttcacgcgtcctcccacgcgtccggcgccattaccggggattggtaacgtactaatcttgttctttgttttttatgaccagatctactccaagtacttttacgtttgattcgaagatagaaaaaactgcgagagccaatcgcaaggaaacaaagttatgcaaaaaacagttaagagtggttgggactcagaataacccaccaccagaaattggaatcaacaacgaagtaaagtctagggttaatgaaaaccctactc

SEQ ID NO: 255712 - DNA, 368 bp, Gossypium hirsutum
tgtagtgatggtatgcattctcctggcttccactctttttacccctacttttaccatggctcgacagctgggggagaaggacatcaatgatccaccagtgtttaccactgctacggcgggtgaacataatgaacctcgaaattgtggccgtggaaagtcttataaatactgcataggacctggaactccttctatggacccaccctgttccgtttataaccgccacggctgctaagagtagccaactaaaccttgaatgtaatgggcaagctataggatccattggcgaaattgtaatgcgaacatattaaaaccagatcacgaagttagttacattacctgcccatggttagtgtttttgtcaagac

SEQ ID NO: 255713 - DNA, 292 bp, Gossypium hirsutum
ttcacgcgtacgtccacgcgtccgaccacgcgtgcgtccacgcgtgcgtattttttcactgaattcactttctcactcttcgatttagagcttccaatcaaaattacgtaaataaaaagccaaattttgtatccctaatttaaagaaaaatttgaattatttgctttaaaaaaaaatatagtcctccgccatagaatcttgtttgtgattcattgaatgtatattatttctatatactcacattctttgattacaagctctagggtatttcttttttttaaaattgttcact

SEQ ID NO: 255714 - DNA, 215 bp, Gossypium hirsutum
tccacgcgtccgatcgagggcgagcactctccttcctttttctgatgcttccggtatcgcatttcggtctggcaaaaaaggctggtactaccgctgccgtggacttgacccataaacaaccccacctcaatacctctattcctttccaccaataacccagatttggtttttatatgttatacgccccacataataacagaacaaacccattgttt

SEQ ID NO: 255715 - DNA, 219 bp, Gossypium hirsutum
tcctttccaagtggtgggaacctcctcctttgtttcctgcatgttccattagcagacgtttcctgtaacttgcttttatgtattcttcgtgctactgtatgggatattaattgcttccttggaaagatcatggggaggtacatgcagggatttatgcaaactttatgtatcaactaataacgctaattctctcaccttaacttaaaaagaaaaacaaac

SEQ ID NO: 255716 - DNA, 272 bp, Gossypium hirsutum
ttagtcttaccattttcttaaattctcaacagcatcgattttgtgtttctgttgatcatcagtggtggcttgccggctttgcaaggatggtttgtcaggctactatattttactaaatttattgaatgacagttgatattgtttcaggttttagacgtttttgtatgttcatttatttagccagtagagcgagcttactatcaagaaaataaattacccaaggtgtgagttaatttaacaaataaaatgaaagaatatatatttatatttta

SEQ ID NO: 255717 - DNA, 292 bp, Gossypium hirsutum
tcagtaccaggagcaacagtagttcagatgacgaatcttaagcctttgagaagaagtcaaatgaagaaacctgtaatcttggttctgatgcggactcgtatagtaccgaggataagtcagctactgttttgtctgaagaagttctgacggctgctgaaaataacacacttaagaatgttgatagtaattctgcagtggagactgttgctgatgacaatttggtaaagaacatgtcacttgtgccagaggaggtggaattttctgcaaagagttcagtacctgatgtggttga

SEQ ID NO: 255718 - DNA, 255 bp, Gossypium hirsutum
cctagccacttcaaaaatgaaggaaattcccactttcactattcagccgattaacactctaaaatccccatctcaggcttcaatttctatgaaggagataaggactccgatggctcgttttcgaaggtgtggagaaacggcagtacagaagaagccgttcgtggaagccatgcgtggaaactactcgtgggatcaatctgttgttgctctagcacattccagagacccctagagtttctagtgttttcacattat

SEQ ID NO: 255719 - DNA, 383 bp, Gossypium hirsutum
  unsure (1)..(383): unsure at all n locations
ttacttttgaggcattgataacaaagacgagggacgaaagatgaatgtttaagttacttaattgtttttccagttttatgttgttctacatgttaaacgcgatgtgcgattcttgttctaataatgatatcaatagatgagatatttgctctaaaattactgtaggtaaattagtcgctgcaaatccacctcaattttgatttgggttcatgataggggtaataatgctattgttgtccaactcattaatcactgttgccttttcagcaaacaaacataaacgtctttatcaaaattgaggtggatttgcatcttcttttgnaaaaaaaaaaaaaaaaaaaaaaaaaaaaaaaaaaaaaaaaaaaaaaaaaataaggggcggc

SEQ ID NO: 255720 - DNA, 131 bp, Gossypium hirsutum
tcctgcctggggagttggccaagcacgctgtttccgaagggactaaggctgttactaagttcactagttcttagtttccgtaagtctaaaatgtcaaagaattgtagttttgtataatttattttatttga

SEQ ID NO: 255721 - DNA, 175 bp, Gossypium hirsutum
cgccaaaggaggcaagaacccagaatggaatcacgtgtttgagttcgacctcgaaagcttaccccccgaggaatccgatcatcttttcctcaagttcgatttgcgtgcggatggcttggtcaatagaacaatcggcgaggtgcgtgttcctttgaaggctttgatagatgatttt

SEQ ID NO: 255722 - DNA, 399 bp, Gossypium hirsutum
ttcacgcgtccgcttatgcagatccttcaggtcgagtggacacatggcctagccaagaagataagcttgagcagatccactcagctgaggcccatgagatgattcaaaaccacgtagcactcatcctgggaaatcgattgggtgagtcaacatctgtagcacagataagtaaactcagggttgggcaggtctatgctgcgtcggtgatgtatggatacttcctgaggcgggttgaccagcgatttcagcttgagaggacaatgaaagtccttccaagtgcttcagatgatgacaaaagtagcattgagcaaactgtggggggatgacacaagaccttctggtctaggggactcctatcaagctgcttcatcacaccctgaagtctcatcatggtctggt

SEQ ID NO: 255723 - DNA, 258 bp, Gossypium hirsutum
tagcgcgtgaggaagggtcaccggatttcatactaatagattgtccggcggggattgacgcagggttcataacggcaataacgccagcaaacgaggcggttttggtgacgacgccggacataacgagtttaaaaaaaaaaaaaaaaaaaaaaaaaaaaaaaaaaaaaaaaaaaaaaaaaaaaaaaaaaaaaaaaaaaaaatataaaaaaccactaaaaaaaaaaaaaaaaaaaattaaaaatggggggggccgtttta

SEQ ID NO: 255724 - DNA, 470 bp, Gossypium hirsutum
ttcacgcgtccgaataccagtacttggctagctcgttttacactagatcttgaaaccaaagccaccttccaagtcggggttccattcatcggtgaaacgggtgtcgaaatatcttccaaatacgaaacaggaatcgagtggggaaagaccaagacgatgaccaccgacatggaagttacgcaccaagttcgtgtgccgcccatgactaaggtgacggtgtatcttaagatgaccaatggcacgtgcgatgttcccttcgtgttcactcaaaaagacagcctttataatgggttcttcgttacaactgatgtcctaggcaacactttcaccggtactaattattacaacatccaatatgatagcaaagaagaacccctcacctctgaacccctcacctctgaaccccccacctctggaaatcagaacatcaacgtatattgtgaaataatttaaaatgaaaattttaaaaa

SEQ ID NO: 255725 - DNA, 249 bp, Gossypium hirsutum
tccacgcgtccgcggacgcgtgggttcaaattgaagctacgggtcgggttagcaacgggggagcaccaaagatccactgcaaaaacaatggatgggcaaaattcggatgactcaaagcaaagcactgctgatatgactgtttttgtgcaaaatcttcttcaacaaatgcaatctaggtttcaaacaatgtctgattccattattaccaagatcgacgacatgggaaaccgtataaacgaattggagcaa

SEQ ID NO: 255726 - DNA, 263 bp, Gossypium hirsutum
atagtatagacgaggatgccgagattggaccttattcaggattggcaattagcttatgttgaagggctcaaaaaagctggacaagaggttaaacttttatacatggaacaggccacgattggtttcttattgttgccgaatagcaatcacttccatactgttacggacgagataaccaagttcgtgagttctgactgtattaaaacaataggggaaagaatcatgcaatgtatcggagctctattatgcgtagattatgtatg

SEQ ID NO: 255727 - DNA, 486 bp, Gossypium hirsutum
ttttatcgtttgtgagggagttttttcaaggtattgattacgagttggaagaaggggctgcgaggtactttgtcaatgttctcctaaactatcttgttctgatggggcagataaacagagctcgctgtgtttggaaggttgcctacgagaataagcttttcccgaaggcaatagttttcgatcagcatattgcttggtcacttgacgttagaaatttgtcggtgggagctgctcttatagctgttgtgcacaccctccatagatttaggaaaagaatgttgtattatggagtggtaccgaggcgtatcaaattggttacaggacccactctgaagatcgtggttgcacagatgctgagctctgtagaatccccatttgaagttagtaaggtggttttaagggccaccggagactctgttatgtagtggttcaaaaaaccgattgttcagcagtttcttttgaatgagattccatcaagagctgaca

SEQ ID NO: 255728 - DNA, 342 bp, Gossypium hirsutum
tcacgcgtccgctttcaaaccctaaaagaacactcatttaaacataatcaacccccccacccaaaaagctatgagagtccccgtttcttctccacaaagcaaccattgccaaagccctaaacctaacaacaatagtaacactagtagtactaggaacataagtttccatggtgctactattaacagtgtttcaacttcgtgttatgagcctacttcggttcttgaactccggcgaagcccgagtcccgggcatgataatccggtggatcatcatcagcatcaacaacagcagcagcagcatcaagctccacttgagtgggatgaacatgtgttacgaaacat

SEQ ID NO: 255729 - DNA, 470 bp, Gossypium hirsutum
tttgtatcttctcttcagagtagttcccagattcaatctccagcttcaactcaggcagtatcgctttcccctctaacaccatctacgccaataactcctatgtcattacatcagcaacaaaaaaaccacttggtgcctcgtgggcttggtaggagttcccgacctggtgctagtgggttgaacaatcagataggccagcaacaacagcggcagcttcaacaacagcagtttcaacaatctggaaggcaccaccctcagcaacggcaacaaacacaatctcagcagcaagctaaacttttgaagggagcagggagggggaacatgcaggtgcatcagaacctttctgttgatccttctcctctgaatggccttagcatggcctctagcaaccaagctgctgagaaaggagagcagatgatgcacttaatgcaaggtcagggcctgtattctgggtctgttatgagccctgt

SEQ ID NO: 255730 - DNA, 357 bp, Gossypium hirsutum
ctaagaagaagaatcagctttgcttcctttttgctgggtgtctatttacatggcagctcacattgccacagcaatgaagcccaagaacaataacagcaacagtaacaacaacagcaactgttgcagcaatggctacagcagcgatgtcagtaacgggagcgacaacaactctcgaagcccacctccatcgccaccgaagcctcgtcttactctgtccctgtcgcagtgccgccgtcggctgcgttccaagaccaagtccttcgtccgccgtgaaaaccttggttccggcctgaacttccggcgtaatctccgttacttgttgctgctgccactttcgtacatttccggcttgttaat

SEQ ID NO: 255731 - DNA, 291 bp, Gossypium hirsutum
ttcatcctctccccttgtctccggtcgaaagggccactgaccatccgttcacccaccatagacggtggccgacgttgcgtaaaatgtggtttttcagctccttttcaaatgggtctgaagacgaaaccctcgaagcctgcaaaaaccaaaagaaaaaggcccactttcaccccctttttcgtgttcgattccgaccgtggagagaaacctccgatgacgggaccacatggtgacgatgcagtcgtgaggtaactccggtgagccatttcctcttttttttaatgtaaaaat

SEQ ID NO: 255732 - DNA, 218 bp, Gossypium hirsutum
ttcacgcgtccggttggctatgatattggttgtgtccttagcttgatacttctttatgggaattatcatcttcaaataactcaaggaaatcgttttggcctttccgatatcgatcaacagagaaccagtgacgaatcaaggtgctcacatttgatgaacaaatgccgtacttcactagagctgttctttgcattatggttcgtaatgggaaacgttgg

SEQ ID NO: 255733 - DNA, 341 bp, Gossypium hirsutum
tttcaatgtccttcacattcaaattggatccaatgtacctaaaacgggtccttcaaacgatatttatatacgagttaatgatcgatttcaaaatttgttaagattatcaagagatttgtcaagaaccaaaaaagattgtttaattgagttgaaaatttatcgttgaatataataaaaaaagcaagatttattcattagggttgagacgtacttaccaattttttgcaaactaagggtgttattgactttaattacaagccaatgaaaaaaagttagaatggtgaacggtttgatttcagatagcaaaatagttttcagaacttagatgaaaattttgatgt

SEQ ID NO: 255734 - DNA, 460 bp, Gossypium hirsutum
ttcacgcgtccgaaaaagacttcggttcatctgcttaacagaaatggactcttccaatagctttgctttggcattcttcgtggctgtgacgatttcaagcattgacgttggcctagcatgtcgctaccttctgcaactgccttcgatgccaacattgactacaaccacactaccaccattaccatctatccctaatttcccacagccattcataccatctttcccaaggcccggggcactttctgcattttctaccatgcctgggttgcccacactgccaagtgtaccaagggccacactgcctcctctgccaggcataccctcttgcccacaatccaacctacaatatcctgtattcctttcctttgtacaccaccttctacttgtaccccttaaaaatccctttcggcttatgggacccagtgcagagtcgggacatgctactagtgttctcatctca

SEQ ID NO: 255735 - DNA, 438 bp, Gossypium hirsutum
ttcacgcgtccgctaggttcgaaagaacatacccgggtggtatgcgtcccacttccatggcaccaccagttagagtaagatcaaattgtaccattggactagacattgtttagaagcaatgccattgttcaccaatgcttaaccattttgttttcaactagtctttctttgattgactaaagaaagtgtatgaatttgacgagtttatgaattcaatattgtttctaattatttctttaattgttgttttgtatgttctagagaactaatattgttctagaattgctacctattgattcgatggtgtagtaatttcattaataaaattatacattttatcttcttgaaataggaaaatagcttattgcaaaagatcttgataagatccaaacatgggacataagatattaacattagaatataaaacaaatcactagc

SEQ ID NO: 255736 - DNA, 251 bp, Gossypium hirsutum
tgtgaaggaaagcttgtcaatgccaccatattcagatgttagggtgggaagttaagattaacaacaggaggggtgctattatgatcgtaggaaaaaactactatcgttgagaagataataataacatcagcagcactactacttccgtcgtggaaaaaaaaaaaaaaaaaaaaaaaaaaaaaaaaaaaaaaaaaaaaaaaaaaaaaaaaaaaaaaaaaaaaaaaaaaaaaaaaaaaaaaaaaagggggggc

SEQ ID NO: 255737 - DNA, 354 bp, Gossypium hirsutum
  unsure (1)..(354): unsure at all n locations
tttcacgcgtccgccatttttatcatcttcaacagaaaaaagaaaggaaaaaaaaaacaaaggaaggaaaaggggaaggatttgagagaaaaaagagaaggatcgaaaatgggtttggttccaccagaactaagcttggattttaggccaaatttcgtaccaaaaacgatcactaattttctagnggaggtttcactggtcggaaatgtttccgataaggtctcgaaactcgatacatttgtgaaagggttnggaatgaagaaatgaaaaagatcgatgcttttaaacgtgaacttcctctctgcatgctccttttgaatgatgcgattttagtattgaaagaggaatcaacgc

SEQ ID NO: 255738 - DNA, 225 bp, Gossypium hirsutum
tccacgcgtccgggatgataaggttggttgatacaggatctctgaggtcgagtgattagtttttttacaatggtgtatgtgggttgttgagcttttcttttgtgtttaacttgtgaccgttgatcatgcttactttatcatgatcatcatccaatggctgatgttgtttgtgaatttgtgttaatgctcctctgttttctataattgcttacatttcttttcttt

SEQ ID NO: 255739 - DNA, 479 bp, Gossypium hirsutum
  unsure (1)..(479): unsure at all n locations
tttagccaccacctcaataagaaattctaattatgaatctaaaaatcctatgcacaacaataaatgaatctgcttaaaaaaggaaagaaaagaacctgatcatatgccatattcaatcataggtggtggctatctagtagcacgagattgcattcatacgttttttctttctttttgggatcttgagtaaccatgtcacagctcattaacgatccaaattttggatcgtgtaatcccccatgaaactgnagtggtcaaacagaaactcttgaaaattgccttggcaaagtattttctcatgttttctggattggctgcatttataggtccaaaccctacactgcaaaataacttggctggagcaaacaggacatattcacctaactcgacaaacagaaacagttcgactgacagcaggatcagacgacccacaacatcccgatatggtagcaatattcacacactaaaacacgatgagg

SEQ ID NO: 255740 - DNA, 231 bp, Gossypium hirsutum
ttcacgcgtccgggaattttgcatgaattcaattagtagatagaaaccaacaaaattcagcaaaacgaaatgaaaactggtaatagtcatattattacctcagcaatcgatgtggcaacgcttaaaccagccaattcctgataattcacataaactcaaaccactgaagctttaaaacaaaaccccaaaagaaagaaatagaaaaataaaagaatgtaaatttaagaattt

SEQ ID NO: 255741 - DNA, 225 bp, Gossypium hirsutum
ttcacgcgtccgcccacgcgtccggttgtcttgttttttcttttgggtgtttcaagttttgatctttttatgttctgttagcgattactgttttctgttttattcagaaaaatgtggtttggattgatatgtaattaaacgaatctgtaaatgttttactatttgggtcatgatgatgagacaaaatttcatgatgaacagaaggcaaaatcttgattcacactc

SEQ ID NO: 255742 - DNA, 269 bp, Gossypium hirsutum
tccacgcgtccgcccacgcgtccggatgatacccgtgcctacttgatccgtaataccatgagcataggagccatcatacggttgacctgaaggctaacccttcggtaggaaatgaccaggctcccgacctagctgcttttgttccatcagatgccccaattgtggcagatcttgctgctcaagcacctacacaagattctaccggaaaacatgttagtgctgctagtaattctgcagcagttgcagccaaagctattaagccatctggt

SEQ ID NO: 255743 - DNA, 356 bp, Gossypium hirsutum
ttcacacacgtgccgtaatgatttaatgctgaggaagagctatgactgcacttgtacacatgacagatggtgacctagaagctttaggcataccaatgggcccaagaaagaagataattttggaattggaatcaagagcctgataatcagagttttagcaagtagtcgttgcctgtttaatctcaagatgtgttaatggccaatcctacaagactgtaaggctgcgttttgggtgataagaacctgcatatgtaccaattctttttggtattgtttttgtttagttttattaacaaaaatatggcttcacgggcctttgtcattgaaatggaaggatggaatattattagattgaa

SEQ ID NO: 255744 - DNA, 169 bp, Gossypium hirsutum
tctcacgcgtccgtgtcacttggctcgatccgttcatggtgtttgaggatcaattccgtaacaccgatgtataagtacccgtcgatggtagttcgataagggtatgtaaaactccgatttcgagttgttgatctttgcgcatcgagaataaaaggtcatcttacggttc

SEQ ID NO: 255745 - DNA, 294 bp, Gossypium hirsutum
tcccacgcgtccggaaaaattaaaaaaaagaaaaagaaaaagaaaatctcttttattcattttatttttctctctctttctttcttgcttcttggtattattagatttcgattcagctaacagttttccacttatagttgttaaagattcttcagatctatgtaaattttatggatttttttgggtatttgccttttttttcttctcctttttaaactgtaatgtaattatagttctctgattcctgaagatgaccgtgggaaagaatctattttcccttcattttcactacag

SEQ ID NO: 255746 - DNA, 229 bp, Gossypium hirsutum
ttgaaaagatgtatatggctcgacaattaaggtgaaaccacgaactttgttttctactgcggattgggctgtcttaacatttacattttctttttcatttattttcccttattgcaacctgaaaaaaaagtaggtaccattaagaatatatgtttgtaaaaaaatgttctgcggtcacattcattggctaatgctgctgaactgaattggctttttagcagacttttcc

SEQ ID NO: 255747 - DNA, 229 bp, Gossypium hirsutum
tttcacgcgtccgcccacgcgtccgtagacctaaaacaaaaactctcttcttcttctcactaccatctctccctattggagaattttctgttgaatttcgctttcctttttcattgcatgtatggatccttccagaggactacaccaggagatggggaaccctttgccggaaagcatggcggttaactcaaaaggacagcagcagcaggaaagaaaagcaaggcctcaa

SEQ ID NO: 255748 - DNA, 416 bp, Gossypium hirsutum
ctgcaaaatttctcctctcaactatacttagtaaaagaagaaaagaagaagaaagaagctaagcccattaatataattcatgcaaatcaataataaataagggcaattctatctggcctgcttctcctctgcatcgctgttgcattgtttgtgtactgtactatttgctctgtcatctgctcaattttctggtatctgaaacacccatcaaaagaaaataagaaaactcttcgtttgtctttttttcccccatggcgttttgagcacctcttatcaactcgaggctcaactcacctgcttcaagttccccgagtctactcgttgaccattaagacttggagaagagaatctgataaaagagggtttctcctttttcttcttcgtttgaatttttggttgctttcaccgatgaatcg

SEQ ID NO: 255749 - DNA, 270 bp, Gossypium hirsutum
ttcacgcgtccgctgaaggccatgattgttgatgctgccatattgttgtaatttaccatagaattttggtttggaaatttaagcaataatctcttcatattttttgacacctgtaattctttatcatctctctggaaatttcactgtttggtatgaaggaaaatggaaggaaaattatctttcaaaggataaaaaaataaaaaaaaaaaaaaaaaaaaaaaaaaaaaaatctaaaacacaaaaaaaaaaaaaaaaaaaaaaggggcggcc

SEQ ID NO: 255750 - DNA, 361 bp, Gossypium hirsutum
ttcacgcgtccgatttgtttagataatatatagaaaggggaagaaactgagaaagcaaaaatggcgactgcacttaactgttgcttgtcttcttcatgcttctctcttcaatctaagctcaattccctttcacttaaaaccaacatcaactcttcttcttcttatgctttcaagactctcagtttctccagtaacctctctcacaatctcttctccaaagggaatctgtcttttagtacagtgactccgaaaccaattcatcgatcttttgttgcttgtgaggctgcaccaaagaagaaggctgattcagctgctaagagggctcgacaagccgagaaaaggcggggtttaccacaaagcg

SEQ ID NO: 255751 - DNA, 247 bp, Gossypium hirsutum
tcatgatcttgtcggaccaaaataaaaaaaacggttaattctcgtaaacaggccgacgccgacgcctactccgacgcggctcaggcgctcactcacctacagcatctcccttgaagtagtagtcccacagtggatatattctaattgcatttgattagtgatttctgcagactccaattccaactatatatataataaacatttcgaggtctatatatacctatatatacgaacagatcgatgacta

SEQ ID NO: 255752 - DNA, 418 bp, Gossypium hirsutum
ttcacgcgtccggaacgccttatggcagacgcttcataagtcaggagttgaattcatatcttgaatacttgtttaaactcattgttgagaggggtcctgatgttggattgaaagtttcattaaatcgatatgatttgtttcatggtcacctttttattgccacagagactggaaggctaggcatattgtttcatgctaaagaataccccctgtatgataaacaagtgtttccatactacttgggttattgccagaaggattctaatgtgacttatgatgattcgataaacttgagaaatattctctggcttgctccattgccaagcaattcaacacaaggctggatagctccaggagtcctgcttgtcctggatgctcatcctggaggaattgtatatagggatctcatacctgagta

SEQ ID NO: 255753 - DNA, 327 bp, Gossypium hirsutum
ttcacgcgtccgcccacgcgtccgattacctgcaaagctcattaaatccactttcagatccctagaatctatcaacccaaaacctcattcgggtttctcaaatttttatttcgtctatcgaggagaagaaagcttcacagaggagaagcgatagtcaaagtttcatctccatctgacagtggagatggtagatgggggtattcctgattcttgaattttttctttgtgtttctaatattatagggagctttctcttaaagtgaaagtcggtagatgaaaaggtatatagatgggaaacttagttgcaaagcatttaacctttgcaga

SEQ ID NO: 255754 - DNA, 446 bp, Gossypium hirsutum
ttcatccacatattatccgccgtcgtcgcaacagccgctttcttcttccgccatcgtgggacccaccgaaaaggtcttatcctcaagccctgacacccctctatccttttgtcccagtgaaccagatgagaagcctcagcctcagcctcagcctcccaagaagaaaacttcggttaacactctcaaaaggaaaaaagaacaaattttagagatggtgaaggattttacccatcgcaatgaattgcttaaaaaggatattgagattaagaggcaattgcttgatcaacaaatagctgagaatttggaattgaaatcgaagaaacaaaagttaaatcagagtcttctcacaccagtaacaaataaaaggttggatcttggggtacaatcagcccaagttagtattggtcaataccatcattatcaacaccaacaccctactagatcta

SEQ ID NO: 255755 - DNA, 364 bp, Gossypium hirsutum
tgacggtccaagccggtggacgacgcccggtcaccaggaacgacccaatggttacctcttcaacaggaccccaaggccaccagctttcttggatccatctataaatgaggatgttatattggaaaatggggtaaattatgcctctgggggtggtgggattttgaatgaaacaggaacttactttattcaaaggttgtcactttggaaacaaattgaactatttcatgggacaactgaatcgataacaaagaaaggctcaacagtagtggatgaaacatgcaaagcaaatcaaactctcaaatgtgtaatttatatgtttcttgtttaagacggtgtgtattattattataagcttccaaagcat

SEQ ID NO: 255756 - DNA, 208 bp, Gossypium hirsutum
ttccacgcgtccgcccacgcgtcgcggcacacgatcgtcaagcgtctcggcgccatatgggccgttggtttttcaaaacatttgccaaagagagctgaaggaagggggtttgcatctttaaatgtggactggcaaatgagaatatatatagccatgcattattactgcttaaaaaaaaacagactctagcaagctcttatggttcgag

SEQ ID NO: 255757 - DNA, 352 bp, Gossypium hirsutum
tgtctattgcctgcttctccttgagattattagcgaaaaccgagattaagcagggacattaaaaacttgggctgaacttattggcttacagtttttactctctaacagtggttttgtttcattcattaattgcttcagtggttgactgaaggggaagtgctggattggttaatgtcaaatctttataaccgggattccattctagaagttctagtttttatgcgtttaataaagaagctttggttgtctatgaagacatttactgataagagaagaaatgcttcatctgatggggggaacagtggatttaaaatgaagcagctttcatttatgggagttatttgttcagtta

SEQ ID NO: 255758 - DNA, 120 bp, Gossypium hirsutum
ttccacgcgtccggaaattttcgttgtaatttattactaaacttcctttgtacaatggattgtcaacctctgattggggattttaaagtccacgttagagtatgttttcattgcttttaa

SEQ ID NO: 255759 - DNA, 224 bp, Gossypium hirsutum
tccacgcgtccgcccacgcgttcgcccacgcgtccgcccacgcgttcggttgtaaggattacatacagttggttatagtggagaatataagaagctgttctttccatttcctttgaatcactttttgatggtactttagccttgaaacgtatgttttgggaatttgttttatgcacttatggtttctacaaaaaaaaaaaaaaaaaaaaaaaatacaagactgt

SEQ ID NO: 255760 - DNA, 235 bp, Gossypium hirsutum
tttccacgcgtccggacggggtcaatggatgatcatcaagatccatggcctagggtagtgacctccattgcactcgggaggggtgctcccctaaggtctccccaagttgggagagcctacgtcataatttgtggcagcgggggcctgcgttcgcgcggcccctatttgaaatattaaaaaaaaaaaaaaaaaaaaaaaaaaaaaaaaaaaaacaaaaataaaataaggggcggcc

SEQ ID NO: 255761 - DNA, 488 bp, Gossypium hirsutum
tgtttattttgttgaaagcagcccactttgtcccatgttttttgatgtcagaactagttaatgatccaagttgtcagctttgttgaacttcgaattacgtatagaaatcgctgaaagagagagtctgagtgagtgaagttttcctttttcgagcttttgttgaagatatggctatggctatggcgagtgtgcaactcgagagacaaactagcatacaagacagtccaaggagtcctgaagcaaagcttgggatgcaagtggaggatttgtgggatgttcaggaaccagaacttagtcctaatgaaaagctcaacgcttgttttgagagcatccctgtttctgctttccctatttctcctcaagggattgagataaaatcggatgcgagtctggccgaggctgttcaaatactagctcaaaacaagattcttagcgcgcctgttgttgatgttgatgcgcctgaggatgcaacatggatggacagatat

SEQ ID NO: 255762 - DNA, 433 bp, Gossypium hirsutum
ttcacgcgtccgggaaagtagagaaaaatgtactcttgtaaataccgatgttatgcaagatggaaagcagcttaaaagatctgaaagtcaagtgcatcctagagttagtggatgcaatagtatggaaattctttccagcgatggaaatcagaaaaaaggagaagctttttactatgataccccattttctgaagaaactggaatttgggtacctgtgtctgtccctcctgtgtctgaaaataaacatgaagaatgggatagaggcctatgtctgaatggaggatactttcctgatgatggtgtgcgatcaaatcagtttattgaagaaagtaaggatctgaccatgtgggatgtgctcagtgagatgttaatagccgctcgaggcaaagtgagttctatagcttcaggtgatgttcaaagatatgggatcact

SEQ ID NO: 255763 - DNA, 363 bp, Gossypium hirsutum
tccacgcgtccgcccacgacgtccgcccacgcgtccgcccacgcgttcgtccacgcgtgcgggatcatcagagtgcttaaatgttcaagatattaaacgaggggtatggaaagctatccaaaactggagtaatcaagttaaggagagaacatgatgaaggcaacgcttacgtaccatccttggttcttttatcttagagatctattagggtagctagcttgataagtttcaaatttcttgccagcaatttgttatcagtctatcagtagagttgggcatatatatgttgtcaagggtacaccatgtgatacctgatgatcgccaatttggccgagaaaatacaaagactaaagactttgaaat

SEQ ID NO: 255764 - DNA, 364 bp, Gossypium hirsutum
tccacaatattccacagcttctctagtttgcattcattttctatcaatatcttgattgtcgacaagattggcaacccacacctatagtttgatttcgtttcggtcgttaagaaataactatgtcgaagaaaggcggagcttcgttgccaaaggatgatccatggcgggcctcagccggaaaatcagttcctaaaatccaccactcgcctgttcttcgtatacgtcaaaatcctaactccaattacgccatcgctgtaatgaagcacccggatcctataggaagcgggttagcgactgaggctattgtggaagcggagggacccgaatgtattgttccgggtcaggttactcccgttagattact

SEQ ID NO: 255765 - DNA, 166 bp, Gossypium hirsutum
tgaaatacccctttccacacacgaaacactagcatcacattattgtgttagacgtacaatctaagtctacctgcgagaaaatggcatactaccaaaccttagctttcgcagctttgttattgatcttgctacccgcagccgttactggagatttaggtgacttatc

SEQ ID NO: 255766 - DNA, 307 bp, Gossypium hirsutum
ttccacgcgtccgcccacgcgtccggttggggttgagaatggatgcaagtgtggagacaactgcacttgcaacccttgcaattgtaaataagagggggggaaaatgaacaacaaagagaagcagagaggcctttgtctttttaactaaataaattctattactttagtatgtatcagcaaatcttcatgaggatttggttcttaattatgtgtaatgtgggcttttctgctatgtcagaatgtattatgatatttaagaaagtttgttttcaattgaaagaatggcagttcctttctctttggctta

SEQ ID NO: 255767 - DNA, 102 bp, Gossypium hirsutum
ttcgcccttgacctaaagtcagtgcaatgtggcatgctggcgcaaagatgggtcttactgtctgtagaactagtgcctttaatgatggaggttataatgctc

SEQ ID NO: 255768 - DNA, 104 bp, Gossypium hirsutum
tttatgcttaccttaaagaatctggaatgcgtgctctactacttacctcgttatcgtcaatggcttaggacatgaagattaagatcgggattaacggatttgga

SEQ ID NO: 255769 - DNA, 276 bp, Gossypium hirsutum
ttcgatgtttcttcaatggagatgtggtggctgattaatataagagctactctaattgctcttatttttatatccattttttatttttccaagaagatttatgttaaattccttacaatatcgacatctccttcttcttcttcttctttattatcatctactcttcatcttccttctgcttcttcgcccatttccaatcaagattctcaatcaagaaccctagaggttgtgtctgattcagatttgaagtttttaattgataatttggatgagaag

SEQ ID NO: 255770 - DNA, 323 bp, Gossypium hirsutum
tggaaatgatacagatgacatcaatggtttaccgggtgatgaagttcagcttgtgaaggaagagagccaggattcagagaacgtaatgcctgttggaaaagaacaagatcatccccatagtgatcgggcccttggttctgaaccagacattgtgcctggtgagaacctctctgagagaaaaaaaaaaagaagaagaagaagaccacccaagagaatcaagtaagtgcaaatgcatcagtttcacaaagtggagataaggatacttccactttgaagtctgaggagaaacaaactgctggcaaatcttctcaagtgagaacctt

SEQ ID NO: 255771 - DNA, 296 bp, Gossypium hirsutum
  unsure (1)..(296): unsure at all n locations
gcgtccgttggtgcctaaaataaaaaatttttatggttggatggctatttgtgtaatttacccaaaagataaatatgataaaattataaaaaaaagttatatttaaactagattatggtacacacgtgggtgatattgattatttaataatttttttaaaaaattgatataaatattagggtaaactacaaaaatagtcatttttggtttgccttanattacatttagtcacttatgtttgaaatgttacattttantntnttaacttagggttttgttatgaagtaaccactctg

SEQ ID NO: 255772 - DNA, 139 bp, Gossypium hirsutum
ttctaatgcctttgtttatctaatgaacaatgcagatgtatttcactattgattcaacattctatgtttcattcacatttatgttatatcttacattacggattgggggaaaaaaaaaaacaataaaaatacaaagggg

SEQ ID NO: 255773 - DNA, 391 bp, Gossypium hirsutum
cgcagtacctgcacaaagacatcaaggacatcctgagcaggatgctgaccgtggatccgaagcaaaggatacggatgcacgaaatccgagagcacaactttttcaagagcaagcgatggacgaaactacctcccatcctttccgtcgaggagcaattgcggactacgattccgatcagtctcgacgaagatgtggacgcggatattgtgaagagtttagtgagtttgggctggggatcggaacaagaagtgcgagaggccctcttgtccggagactgcaattatgaaactgtattttatcgacaactggaggagaggaaaaggtttccctaccactcttctccgcgaaaggcaaaggtcaagacgaggggaagaaccaacaccctcacaac

SEQ ID NO: 255774 - DNA, 391 bp, Gossypium hirsutum
ctccaaaatcaaaatgtttgttgcttcaatctctatttggtgggtgatccgagttgggtgttgctagtggctattttttatctttttgaggtggttgtgtggtgtctcttgactggcaattgaggatgtttggctagtcttgtgctccattgttttctcactgtcttgtaagcaaggtctttagtggaaataaaggctcgataaacgagattagacgcattaattttttcattagtggttgacaccaaaataactagtgatgattccttctttttttccttttttttatgtggtttgacggtttatgcttgagatcatggtgtaattggctttggctatatgtcattgttgctatgtctgtgatgattgttgttatatgaaatgaaacttc

SEQ ID NO: 255775 - DNA, 295 bp, Gossypium hirsutum
ttggttcgtgatgggaattcattgtcctctgtggcaatagatgaaggatactcaactgttgcaggaccttctaaacttccggtgactgaaataacggagatagatggtcctagttcagctgagaattatattaaagcttctagtcctgttgctcctgtggctacaactcgtaagagtacagtccatgctgatcgacaaaattcagaaatctcatattatgcagatgatgaagacggaaatcgtaaaaagtattctaggaaggggtccacttcgtcataagtttctcagagcattg

SEQ ID NO: 255776 - DNA, 396 bp, Gossypium hirsutum
ttcttcgcgtacgagttttgggttttttattgctttttaggctttgcttggtatggatgattgatagagttcaaggatcaaaaaccttgtcaacctaattgttagggttcatattagttttttacgttgtagcttaacaagtttcccaatccttgctaccaaaccaaatcttatagaacaagttgttagagacttggtagagtgttaggtgaaatcaaatgagtttagcttgtaatgttgcatttcaaaatacacgcttcacttagttgattaagcaaaaattctggtaataaacatagtatgtgagtgagataactatgcgtatatgtatatagacagtgaaagcagccttgaaacactgactgcataatgttcatatttagcctacaaattcac

SEQ ID NO: 255777 - DNA, 378 bp, Gossypium hirsutum
tatttttcgcccttttccccttccggatattaatttacaatccaaacatcagataagctaagcgaagcttaacatccaacgctagacctagaattcagattcttcgaactcaagggagggagaaatggcggtctctatctccgcatcagcaactgttccttcgctgagtcgacgaagctcaactcagttatccccttattattgttcgtccaagctatctttctcatcttctcttcgatttcaacccattcgaatcgttaatagaatccgtttcctctcgctatcgtcctctgcaagttgaagcaaagaagcaaacatttaactcctttgatgatttgttggcaaattccgacaagcctgtactggttgacttttatg

SEQ ID NO: 255778 - DNA, 511 bp, Gossypium hirsutum
tttcaagtttaatgcaccacgagtcccaccaaccgtaaagctgaattatagttcagtattgggtcagtgcttgagatttgtcaacagtgaggagataccagacgctgttcttcaagtgttggctcgatgcactgctttctatttagatcatcaactcaacatcaccagtctatcagagtttgggaatggcacgattaacaagttgaaatattgtataataagtgaatgcccacggcttggaactgttgtagaaagcgaggagggaactgaggctgtatttccatgcctggagcacttgagtattcattattgctggagattagcatgcatttggaggggtgttgtccccaaaggaagctttgcagctctaagaagtctgtccttgtgtacatgcccagagttgacatatgttttcaaaagctcaatgctgctgttcttttctaacttggaagagttgaaggttgatgactgtgaagcaattgaaaaaataatttctgatgatgagattagt

SEQ ID NO: 255779 - DNA, 318 bp, Gossypium hirsutum
tgcttctcatcacctccctccccacctgttagaaaagagttgccactattgagcttgactcccactcccacaaggtgtgagaaagaagaggaggagcatgatgacggtgttgaagaccaatatcaggatctgtatatttgcaatgggatgagcaaagggaaagagggaggggggctggttttgagtagtggtgcagcggaggatgaggatgaagatgaaactgctacggttgcactgcatatagggttaccaagccctaccgcttcagagttggcttcagttttatcatcatcatcatcattctcggagatgagagac

SEQ ID NO: 255780 - DNA, 324 bp, Gossypium hirsutum
tggccgccctttttttttttttttgattaaaatgtttgttacaattcaattcatggagacaatggcaataaacattaatttaaagccagagttaaatctggtcaatgaagcctttaaaatttttgaaagaagacccaccttcagccacactttttctagcaactcccttgagttgaaatgaatttgcttttatttcatcagaagagagcagtgtattgatcttggaactcagttcattccttgtatcattaccactagattgtagtggcatttttatttatgagatgtttccgtaattttcaattccagtgaataagttaatta

SEQ ID NO: 255781 - DNA, 489 bp, Gossypium hirsutum
aaaatattttcctttttcccaacactgaatgggcaaagctccaaatttccatggcaggtcttcactataatttcttccctactgatttctactatcctcgtccggcacaatctacgccgtctccggccgtcgattctactcctccggcagctctgactacgccgatcgaggagaaaaacatcgtcgacgatgataataagaagcctgtgatcgtggtttaccgtggcaataagacgagtgtttccattaggaaacaaggcgaacagcatggtaggagttatgtgcgtaatcgagttgagcaaattaagttatcgcgaaactagatttgttttccttcgttgattttttattgccgaagagaattcgaaccgtttttgaatgtttaatttagtctttgaggatctattttatgtaattaattcgattttgtgttgtttttaactatttttccagttatggtttaaattctcaacgaatgatgttggattc

SEQ ID NO: 255782 - DNA, 483 bp, Gossypium hirsutum
gtttaaattacctgcaaaaactatgggaatgggttgggttcccatcgttagagtcccaaactgagagcagccttaacatcgagcctccatgcaaatccgccaaagctcatcttccacacatcgcaaggaaccattttcgattgctttttctttccctttccatctccgtaccgtaaccctacccggcacgagaatgcaccctgtgggaatttaaacccttctttcaccaccaaccccaccgcggtttcagccccttctccgcccaccatgctcttgaacgcctcgttcacccacaaaacacggtgccaaccgtccgatatgaaccctggatacgtgtccttatccagattcctcattctatccacgtccgtacagctccccatgtctccttcatccatgcagctgtctgttatgctctccaccgtcacccatgactccacaacactcactttcctccccgtcgcctgatccgacaaccccatc

SEQ ID NO: 255783 - DNA, 562 bp, Gossypium hirsutum
gtccaatattcccacactagatgttgttaaagatataaacggagatgggagaatcacacaagtgaaaatcgatacaaagaggtccatacgctggtttcttgcaatcaatactgaggaaatagaagatttcacgtttaatgtgggtttggaggagttagttgcagcagatggtaagcgtagcatagacggatggcatactattcaagcttcaggagggaagaatgcaccaacaaagtttgaactcacactcttctggctgcaaaattcaacacgccgttcagacaagatggtgcaatcggagcagcgaccactcttgaggatcagaactgatcttcctggagtggtgacaccgaaggttgaaacagtccttgagaagcttccaccatggtattcattatttgggaagtccacatctcctcacactttatcatttttgagtagtcttcctattgatttctagataagatttggaactctttgttagcgtttttggtactggaaaaggttgtacattagtcccactaccaccgagctacacaaacaaaacaccctaacatttatt

SEQ ID NO: 255784 - DNA, 485 bp, Gossypium hirsutum
gttgctaccaaggacagtctttctcgacattggaataagtttggagacgtgctaaaagttattatagttacagatgcggcgacagggcaaccgaaagggtcagcttatgtggagttcatgcggaaggaagcagcagacaatgctttgtctctggatggtacctcattcatgtcacggattcttaaggtcgtgaagaaaagttcagctcctcaagaagccgctgctcctgtcatgacatggcctcgtgtagctcggggctctccatttgttgcagcaaggtttggtagagcttcatttgccagaggcatgccaggtgcttttaggcctcaccttccaattaaacccggtgccagaagctttcaatggaagcgtgatgctcagacgaccaccacccgaaccgacgccgtcactgggacaaacgtttcttctcccactttccgcagtctcacctatgtccgaacagaacctaagtcagcagggaatac

SEQ ID NO: 255785 - DNA, 430 bp, Gossypium hirsutum
ttctaatgcagaaggggctgatggaggacgcagttgaatatttagagcgtgccatttcaaagctgtctcttgctggccatccaacagaggttgaaaatgttgatcttttaattctatcgtctcaatgggccggtgttgtctatatgaaacaggggaagaaggcagaagggcttgcacacctggaaacaattgcaagtttgaaagagccagaagatccaaagagcaaagctcattactttgatggattgttgttgcttgccagtgcattatttgactttgggcgcaaggctgaagctttaaagtttttgaagttggttgttgcttataatcctaagtataactatttactcgaagaattaaagaacgaagaagatgattttgcgagtaatcttgcaagcagtaggagacgaggttactaatttgcctgcat

SEQ ID NO: 255786 - DNA, 493 bp, Gossypium hirsutum
ctttctcttgccaattactttccattctccctccctttcattgctggtttttttttccgttgcttcaatgggtttctttgtagaagatccagggctaattgtaacccatcttctttacaaaacagctgttgttttagcagttttaagatgggtctggtcttgggctcttaggtttaaagacacgagtttatttagtttcattttttcatctgactcccaaaacaacacttcttcttctttggtttcttcacaaatgattagagacagcctggtgttgacaaccttcgaagatgctaaggaaagggtgccttgggtttctgacacctgtgcagtctgcttgaatcagctgaaggaaggtgacgaggtcagagaattgaggaactgttgtcacgtgttccacaaagattgcattgacagatgggttgactatgatgaagatcaagatcacgaccatcatgattatgatcatgatcaagatgatagtaacaatcac

SEQ ID NO: 255787 - DNA, 412 bp, Gossypium hirsutum
ctcacgcgtccgcatttccttctttcctctgggggtctctcaatttttcctctggttggatagagagaaagcttttaagtaccgaagaagcggagaaaactgcaatggcggcttccaagaaatggtttttagcttctttagctgttctgtttttgtttcttgttggagcaatggccacagtacagaccaacaacgattccagcactgtggagatagagaagctgcagaactcaaaaaactcaacaatggcaactaggtcagaagaggttaaggtcttgaatgaacatgctgtggctgatccagaggccgtagcagccgaggttgagaccatcattgacatgaatattcgaaatgtgacggaaaggaggaagttggggttcttctcgtgcggaactggtaatcccattgatga

SEQ ID NO: 255788 - DNA, 378 bp, Gossypium hirsutum
tcctacgcgtccgggccggtgcgggtgtgatgggggtgcaagctcatcaagaggaatttgtggggtctaatgatcatcaagccttggtcatcaaaggcaaacgtacgaagcgccaaaggccgtcgtccccgttcggtgtcacggtgacttgtaactcctcaagtgcttctattggtggtggaggagtggcggaggactacaactccatttcctctccgacgacctctggtgagattcatgagagcactgaggaggaagaagatatggccaattgcttaatcatgttggcccaaagtgatggtcccaggaagaggatggatgaagggaaattcaaggttggtagcctaaagttgtctgagattgctaccaccactaata

SEQ ID NO: 255789 - DNA, 485 bp, Gossypium hirsutum
ttactcgatagaactcagggtaactggaaacttataaactattttaaagggaaggccctcacctatgatatacgccttgtgtgacagatgtggggttagagttagtacgtgggacttatcgtaatcggtacatatgcttatttaattatgtgatgggaaagtattgatgtgggatctaagaacagcggtatcattttgtattttctgcatgcttataatttaactatatattgtttttgtggatatcgatttgatgattactctgtgcgtggcaatagctcttttatgttgtgagtggtggcaaatggaataggaaaaatcaactacactagattgctgtccaagaacaatttgcagaaggcacataatgactagctcctacctctacgaatgcttgtgggaggcattgcagcagcgaataaggatgatattgatcaacatgcagttgagaccgtatgtgctctgaatttgaattcagatgtgac

SEQ ID NO: 255790 - DNA, 441 bp, Gossypium hirsutum
ttttcatgtggataacatgcttgagtctgatgggctgctattccatgatgaacggcggaatgcaagagagcattcaaatgaccagcaaacgaatagcaatgccacaaagttaggtggcagccgatttgacagggcctctgcttctcatacatatgaaggcaatagcgaaaggaaccatcaccagccaactaggtggagataatgctatcaatgactaggtaactagcagatttaagcctctcatgaagcattttctttctttctttatttatctgtgtattagttccccagtgttttgattgtatatgctccatttaagcaaacaataatcagcatttatctatgccttctatacaatatgcatttgtaaataaaaaaaaaattggatgaactcataattgttataccatttgtaattgattgtcttcatttatttataag

SEQ ID NO: 255791 - DNA, 403 bp, Gossypium hirsutum
tttaccgctggccttgaaggctatgctagacggggtgttgacagaattgatgctgaaaaccggtttagtcttcgactctataggccttctacagttagcacggagtaccgggagcatgtgaaagacctcacctgcatatctaaggatttatgccgaactgttattgtcgacaacaatcctttcagtttcctgttgcaaccggtaaatgggattccatgcattccgttttctgctgggcggccacatgatacacagcttctcggtgttctccttccacttctcaagcacctttctcaggaaaaagatgtgagaccagttctttatgataggttccgcatgcctgaatggtttcagaaacagggtatcccctcttcttgttgggcactgtaggaaaaagatagta

SEQ ID NO: 255792 - DNA, 279 bp, Gossypium hirsutum
ttttagcacatgccagatataaaaatcacaatcatcatttccccatatcataaacacaagacttcagtgaattggaaggtgaagcatcatagtttaaaactcttcgaatatggtgtgatgcattgctctctacaataggattttaggtttttctttttaaagttgggatcatgcaggtgtacatggtaagatatggaaaacgggtaccaaaatatatatactattttccattcccacatgctgaaatataatgattcaccctggttagttgctgatacc

SEQ ID NO: 255793 - DNA, 304 bp, Gossypium hirsutum
tttatgtcaaaattctctatctgagcttcaaatgcaaccgtctaataaaagtaacaaatctatgttactaaaatttgggtgttagtgtattgatatatgttagagacggatgtgtttagtttatgtttttctaagatttatatgtatttggagggtcacgtcaattccagatatgtaatgacggtgactgaaaaaatgacattcagtaagtataagcctgaagtttgaaaatcagtagtgtatacgcaagaaacggtcgcatgagaaaggggttcattaagcaattcattaaaagatgtatact

SEQ ID NO: 255794 - DNA, 332 bp, Gossypium hirsutum
ttcacgcgtacgtgacagcagtctagccggggtaactctcgacgacgttttgggacacgctaaacggtctgaaccgccgcccagtcataaccatacgcctccggagactgtacgagatgatccagctaacaaggacaagaagagttggaaattgtttcgtgagaagcttaagctcaggaaaaccggttcgggttggacctcctcgatttcgatcccggcatctgatgttaacattcaagctaagaaaccccaaaacccgcggagtgtttgctttgctgaaaccaaccgcattgccgaaataggtgatcgtgctccggtcaggaacctcaggg

SEQ ID NO: 255795 - DNA, 155 bp, Gossypium hirsutum
gttcaagtcactttctaggtggcttacaaaatgatttatttatcctctgttttcatcaagttgtttattgttgatgaaaccaggaaaaaaccatcagtcttagaaatgtaaaaagttattgttgttgattcaatatataggctacttaattcttc

SEQ ID NO: 255796 - DNA, 485 bp, Gossypium hirsutum
ttttgacttctttttattctaaaatgcaaaagggtgaaggtaattgcaaggaaaaaaagaaataaaaaaaataagggaacaaattgaaaaaaacccgaaaaatcacccttcaagaaattcgtttcgaaaatttttgtactcttctctgcgtatagtgtgcttgcgtaagtatctgttttgtgtgcgtaaaaaattatggattacatcactggcttttatatccatatttccaaaataaataaaatctaaaaaatcctattttcctactgtcatttgctgtgaaatctgttattgactccttctaatgtcttcttttgcagtctcagttgtacggagaagatgatccggggatctcgcgtggaaaaccatccctttggtattcttccagtatattctaggagctactgctgaaattctccttcttttgggttcttttgggtttaggctaggatatggatttattagagttgggttttaggacatgg

SEQ ID NO: 255797 - DNA, 374 bp, Gossypium hirsutum
ttgaagcagaggtccaatgcgttcgaacaactaacaatcagtatgtcgaagagaatgaaagactgagagctattctaggagaatggagcactcgagctgcaaagctcgagcgagcattggaagttgagcggatgtcgaacctcgaattacaaaagaagatttcaacatttagaaaccaaacatgtacatcttcaactgaatcaagcgagcagcgtggagcctaaatttactccttccacaccaatatgtatagacaaatcccaacacttttggagtggaattagttttttttttcttttttgttctatgcttaaatgaagaattcaagacgtttttagaaaaagaccaatcttatatcagtaaattacaccatt

SEQ ID NO: 255798 - DNA, 404 bp, Gossypium hirsutum
ctcctggataaagtctgctgatggaaaacatcgggccattgataaagtagatgagagatcaaaacgtcatgacaaaaagcatttagcatctggtgaagctcagcctcctagaggaggcaggtcttcaccaagaagttctgaagacaatgattcgaggcacagaaggcattcaaggtcaaagtcagctgaaggggatgatggaatgctggtttcaaaagaggaggcttatgacttgaaagtttcagtgaatgatgatcaggagctgagaagcaaatatttaccaaaatttgacagtgatgaagggcactcaccaaatagcaaattgaatgcagatgaaccagacagacttgaaagatcaagtagtaagcagtggcttggtagtaatgggtcaggagatcaatcca

SEQ ID NO: 255799 - DNA, 225 bp, Gossypium hirsutum
cggacgcgtgggtttatgttttgtatgagctcctagagcatgcatatgtgatatcattgctgtcttggttgtatgaaaacagtttattggtacccatacaattttgcttaagcgactccagctgcgtgtattttgtgttcgttagtttcagtcaatacattctacctcatcaggacttagggtgggtttggatgggagattggtgaggtgcggtgcgtttagctt

SEQ ID NO: 255800 - DNA, 198 bp, Gossypium hirsutum
ccgcgaaaatatatccaaagccaaaggaaaaagaagaggttgaatgttcgtcaatgtccggtttatggttcatcaaaactagtcgtccctcctaagttttggatatacttaagagcatgctcttgttgttgaagaactcactgttgctgagtatcttcgtttcaaggaagagcttgttgatggaagttcaaatgcaaa

SEQ ID NO: 255801 - DNA, 429 bp, Gossypium hirsutum
ttcacgcgtccgcacacttcaaacatcggcgtcagtgtctaatcgcgttggcaccggtgtgctgtcgaaaaagacgagtccaatcaacggagcttttaacttttaaggtactccacacaaggaaatcatccaggagaccaattttacatttttacccctctgcacaatcaattttagggtataggttaaattgttagaagaaaaacacatgcctggtttcatattaccaaacttgaatctctaaactcgactttagttgttcttttgaatgtgttgatttgagaattggggatgggatagtaacagttcagttatttttttccttcctctctgttagtgttaaggtagggtccggttggcaaaagattggttcttgttcaaccttgtattttattacattttaggcgttcctgtctgctatcatcatag

SEQ ID NO: 255802 - DNA, 401 bp, Gossypium hirsutum
ttaaacactgctcagtaaaccctaatcttttggcaatggctttcttttcaaccagtttcttcacttgtttcttctctggttctaataagctagcttcccaaggagaagacactcaaccatcatcatcgaccattattaaagcaggtagtgatgctaaactgaaggaaggcaaggctaagaacaaccctcctattccctatcggatcaaaactttccctgttatgaaagctgttggttgaagtagtataagttggaatccctactttaaacgctcatgtcccgagacagattggtctcaagtccgatgttggagttgaaacatatgctaacatgcatgtcagcttctttaagagcacgttttctctgtatttaatcaactctttgttttttattttgagaat

SEQ ID NO: 255803 - DNA, 441 bp, Gossypium hirsutum
ttcacgcgtccgcacaaatgttgcctatgaagggctgcccttggaagaggatggccaactgcaggtgcaaagtggcggtgctgggaataacatgtttgctgattcgggagctggtccagggggtttgcctttcttaaacttgccacttaatatgcagcctaatgtccagttaccgttttgagaaatttgggtcaaaatcttgatgaggaaattcaagctctgttgagaaacatgattcttgcatataaaggtcaggaaaattcatggaatcgtcatgcttcttcttcctcctcctctgatattaatgttaatttaggtttttcctcctccttttaatctttgttttagtagttattatcttcttcttaattttcggatgtatgggatctaagatttctggaaatagttcttcattgttcatggtggtacaagtaatttctt

SEQ ID NO: 255804 - DNA, 427 bp, Gossypium hirsutum
tctcacgcgtccgcccacgcgtccgatctcgaggggcaacacaaaatacacaggtgaatttcgaattctcaaaatcaaaattatttaccatttccgatcccatcatttcccttcctttccacttctcagttcggtctgaatcaaatcccaaacgaagatggaacttgacatggtgactatggcggcatcgatcggggtatcggtgccagtgattcggttccttttatgcttcgtgacgactataccggtgagttttctatggcgacttgttccgggtccactagctaaacatctttactcagcctttacagggagcgccgctttcctatctgtcatttggattttcttcaaatctgcactttttggtgcccatgttgatggattatgctgcactggctctttatcggcccaagtgtgggattatcac

SEQ ID NO: 255805 - DNA, 498 bp, Gossypium hirsutum
tcgttctcgcgttcgcccacgcgtccgaaaaacccgtcaaattttcaccacaaattgaagaacccttgtttatcttctattaaaacccaccaaatacaatccaaatcaggtctatttccaattttctgcacatcgaaacccagcaccaagaacctgaaaacatgcaagaattgcaaaacccaattcgacccattgctcaatcaccctcgagcatgccattttcacactgcccatttcggaggggaaacaaagaggaaatttgagagtgtatatgcagggggcaccatggatacacctgaatctggtaaagtatttcaatactggcattgttgtggctctgaagatccatttgatcctggatgtactgctgctcctcatgcttcttacgacgactaatgccggttcgccgctgtcttcaaagactgatgccgggtcggtttctttataaacatttaactttgtatgtatttattattggaagtacatttcattcacatt

SEQ ID NO: 255806 - DNA, 257 bp, Gossypium hirsutum
tcacgcgtccgttctacgatcaaaagccaaaaatgatgcatatgacgttttactggagccgacaggtgactctgttgttcacctactggcgaaccgattcatggccgagttacgcgttgactctcctagcatgttttttggcttctgctttttacccgtacttggagtacgtaaggtatcgcgtcaggcgtggcgggaagccgacggactggacgactgaagagcctttcttgttgcggccgaggggagccgggatg

SEQ ID NO: 255807 - DNA, 342 bp, Gossypium hirsutum
aacaatgagttatttgttcgggaacttgttcaaagcacgtacttttcagaatttcaagctaatcagatcttactcatgatttctatccctgtatagtcttcctctattggatgaagatatgaagtcaaaagatatagatggggagcaagaacaagtctcccttgcatagttaccaatatactgatacactgaaagtttctggtggtggttgtgtatctttcattatatcacttgtaagtaacatctgtacaaaatgaatgtttgcatggattgttcataagatgcaagtttgtatagaaagtcgactaggtgaataagaaaatcaaaataaatttcttctgg

SEQ ID NO: 255808 - DNA, 431 bp, Gossypium hirsutum
tttcacgccaccaactgaatccacacttgtaattactgggcaacccggatacatggagatctatctggcagatgtcaccatatactgaccgattactaggcgaagtttgaacacatgttcatccattggacatcgatctaattgacagaatgaaaccatttgatcctaccagaaggataactggaaagtgctacattaacaattaggctgttattaatgactaaatggcatttattcaatacaattatctgacctatggtatagaagaaaatgaactttggaagataatcactatgaaaccgctagctattgtgtacgatgtgagcgtattgccgcgacgaattacacaattcttatacttggtttatacacagatgaagaagcattggcacattcttacctcgaaagattacacgacatatcttatgaac

SEQ ID NO: 255809 - DNA, 293 bp, Gossypium hirsutum
tgcttttggtcgcgtacagtctcagtcctaatcacaccgctgcttcctagtctaaactaatctcaggatgggtgaaatgtaatgttgatactgcaacgtttgaggctaatcaggccaccaatttttgctactatattacgtgatgatcgtggcaattttatacgtgctttatcaggtcatttactcgctatattggaaccacatattgttgattcgagagacactctcttagtttatggacgatggcatcaataatgttatggtagagacatcattaatgctcttgcttcttc

SEQ ID NO: 255810 - DNA, 305 bp, Gossypium hirsutum
ttggattctcttctctgtcgcattttcaaagccagatattttcccgagtgcaggttccttgaatctgtagatggtaataacccattgtttgtttggaggagcatacatgcggccaggctactgttgttgaaagggatttggtgaaggttttggtacgggtcatagcattagagttttctcgaaccctttgcttccgaatgaaacaaatttttatgtcgagttgattcgattctgtttgatggcatggatgatctttgggtgagtgatcttttaaacactaggggtgacagttggatgttaagctg

SEQ ID NO: 255811 - DNA, 252 bp, Gossypium hirsutum
tccacgcgtccgcaacagagaagaagaagaaagccaacccagcaagtcattcaaattcaaccctccccaaactcctaacttatatccctttcccttcccttcacttataactttccctattttgtaacatttcacatgcaatccattcatttttttttcatcaatcatcaatcatttctgcgattaaaaatcatatcttgctattcaaagtcttcatcttttttttcttttgatatataaaaaagaaagctc

SEQ ID NO: 255812 - DNA, 444 bp, Gossypium hirsutum
tccacgcgtccggcgtcatcttcttcagctgccaacattgccaccgttgccatcgattccaaatctcccacagccaacgatgcccaccctgccgcaaccatctatacccaaccccgtcgctcttcctccactgcctaccattcctaccctgccacccttgcccagcttgccttcaatccccactttgccaactaccattccatccttctccccaccacctgctagaactaccccttgaagttttccacttccaccaaagtgtttggactgtgcacctttgctctaccgtgcctcttcgctttttgcatattgggcatatattgtgctcctcttttcttttctttttttcattttttccaccacacttgtttgctgcattttcctttttatagagtttcctatatggggtttattgtacgaccagcaatcagtttatgttaatgt

SEQ ID NO: 255813 - DNA, 402 bp, Gossypium hirsutum
tcccacgcgtccgtgagaaggttgagaatgaacctgaaatgattgaagattggccaccagtgcctggatcaaaaagaaggcttgttttgacaacacagcttttgcagcaactaatttgtgctcctccaagagtagttctttctgcagatgccagcaaaaactatgagactctggcctattttgttgccagatcagtcttaggagatgcatgcagcacagcatatatacctgaaagtgacacagctgtacctcctcacagtggaagcatcctccctgaaaagcttagggagcagcgaaaccaatccatcttaaaggctgcagaagagtttatcgtcagggcaaagatgttggaaaatggtttacaaagtctggtcaacagagcctcaatcttggacttaagac

SEQ ID NO: 255814 - DNA, 258 bp, Gossypium hirsutum
cttcgttagacgcagctgaggtgtttgaggacattggtcctaagtaatttgagattttattttcggactttaattgcaattatagattacacgctttttattcttttcaagaactttaatagctttgcgtcttggaatttgggtgttttttttttttatatatatctggatacgagaaacacaccatggctgctattctaacgctgtgatatgagtctctgcttgtactacaagaagacaaaaccaaaccagtatcct

SEQ ID NO: 255815 - DNA, 414 bp, Gossypium hirsutum
gttcctgctcgttcaccaaaaatcaatgatttaagttgggcttttacaccatcatcaccagctggaccatttcgagatgaaataactcccacacctactccaactcccacatccacttccacacctactccggatcctgctgttacaccaactcttactcccactccaacgccaacgccaacgccaacttccacatccacacctactccaacgccaactcctacacccacacccactccaacgccttcatcatcatccaactcttcatccaactcctcctcctcctcaacaggtggcactcctactggtgttaatactgcttcctccttctttttctccttctccactttctctgcagctggcgtggtgactatgttgctggtggtattggcttttgtcgctcctcaataaatt

SEQ ID NO: 255816 - DNA, 378 bp, Gossypium hirsutum
ttttcaccagaccaccagggttagtgagagtacaaagaggtatcagctacaacatctttgtcgacaataaagcatgccgagagttcttgaactccaagttcaatgcaacagcaatcgacatggagacagctgcgatagcccttgtttgccaccaacaaaacatgccttttattgcatttaggtccctgtctgatttagctggtgggggttctgccttgtctaatgaagctgcttcatttgccactttggctgctcaaaatgctgttgatgttctacttaggttcatttccctattatcttcataaaacatataaaaacaagtttctttcaaggcataatctctcttggaatttaaaaattataaaatttgattggtaa

SEQ ID NO: 255817 - DNA, 491 bp, Gossypium hirsutum
ctgcgtcctaaatatttccaagctcaagaagccatagactatggccttgctgacaagataatcgattcaagagatgctgcattcgagaaacggaattatgatgagatgcttgctcaatcaaaagcaatgaggagaggagctgcaggtggtccacaagcgactccttccgggttcaggtgatttagaaggggaaaactgattcattcattcaagcatcaattgctgttaatgaaatgacaaaaccattgctgttctttcaacatgcttcaaaaggacctcatatattttgttcctcacccttccatatgctacgaattcgggactttctggtgttgatttgccgttacttccctccatcatatctaaaaagtcgttcaatctcttgatccgacacatagattcagctacctggccatgaggtacctttgaaaggcgttcattatcgaacccgtctaaataattctcgatataacctaaaaaccatgttttac

SEQ ID NO: 255818 - DNA, 175 bp, Gossypium hirsutum
ctacgcgtccgcccacgcgtccgcttaaactcaatttttatggtgactatggctgtgcttactgttttcccattagaacctagcgttagaagagcacattggatgcttctttaacttgttgagacatgaaagattcaaaacctagttatctggaatgttccgagttttctgattt

SEQ ID NO: 255819 - DNA, 399 bp, Gossypium hirsutum
  unsure (1)..(399): unsure at all n locations
ngtcacgcgtccgattttatctaatatatattgtccaaaatgaaagcaatattcctcatattatgcattctcttggcttccattctcgcgtttcccacttccacaatggctcgagaactggctgagaaggaggcaatcccatctccaactcactgtgcactagatcctaatcggagctgtattccaaagagtactccagctcctaagtgcccaacttacagtcgaaactgccattgatattatgttctggaatattatgtttaataaatttgccaacttttgtgttttattggtaaaggaaattagaatctaaagtttcatgtatggtttgtgtgtttgattgatgtgattgtgatgttatttctactgcttgagatatgaaaataataaagaaaagct

SEQ ID NO: 255820 - DNA, 188 bp, Gossypium hirsutum
attggatcaagccgaaaattgctatcactatcacaaaactttgcaacattgctgatcgtcctgttggctaccagtgtggagaatacactttgacttgagcacgaaagctgaactcatggttcccagttttgtcgttggctgaagtctgagctttacgttagctagttcatctagctgatgaattaacc

SEQ ID NO: 255821 - DNA, 406 bp, Gossypium hirsutum
gtagttgcaagcaaaaattaaagagctgaaggaagagaagaacgagcttcgcgacgagaagcagaggctgaaagcagacaaggagcaattggagcagcaagtcaaagccatgagtgcacagccaggcttcttgacgcaccccccttcaatatctgatgcattagctgctcaaaggcaagctgctggaaacaagtagatgcctgatatcggatttccaagtctcgccatgcggcagttcatgacacctgctgcagtcgatacatcacaggatcacgttcttcgccctccagtcgcataatatgaagcttgttgattgatgatttgattcttgtcaccagtctctttatgattgctgcttgttttacttattgctgtcatgatctttggtatattgatataatgttat

SEQ ID NO: 255822 - DNA, 251 bp, Gossypium hirsutum
tcagccctaatcgggcggtaaattccgtccaaggctatatacggtcgagagaccgatagctaacaagtaccgagagggaaagatgaaaaggatctacgggaaaagagagtatggatgctgccgagttgttacatgaaggtgaagagggcaatttttggaggggaggatcggattcagatgcgaaaaagaggaagaaaaaggagaagaagctcaaggagaaacattatggtggtgctgatgagaaaggaact

SEQ ID NO: 255823 - DNA, 365 bp, Gossypium hirsutum
ttctagtgtcctggaggaattggcaaaggcaataaatttggtccatattcgacaggatcttgttgaaagtggtcatgcactattgaaccatgcttaccgtgctcaacaagaatatgcaaggacaacaaattattgtttgaatttggcagctgagcaagataagattgtcatagagaaatggctacctgaacttaaaactgcaattttgaatgctcagaagtgcttggaggactgcaaatatgtcaggggtttgctggacgagtggtgggagcaaccggcatcaactgttgtagattgggtcacagttgacagacaaaatgttggagcctggcattctcacgtgaagcaacttcttgcattttatg

SEQ ID NO: 255824 - DNA, 422 bp, Gossypium hirsutum
tttaacctcccctctttgtgctccttagccgaatcccaagagttcctcttgactccggtctaccaccatgaatggagactaagccgttcgaactttggagtccctgtttcagtcttaagaccccctctacagttcgattccggcgaagaggaagggatctcgtggcgcgttttctagggaaggcgttacccttctttttttttgatgtaaaatgaaaacgaatcaactgaaataggtataagaacaggggattaaaagaagagggaaaaccaccttctctgcttttcgattgattgtgttctatgcgtgttcttacaatatgtctttgtatttttgttttttttttttggttgcttcaaaaaaaatacctaggctattacatggcttttatagccgaaacagaatcaaaaagatcccaaaaa

SEQ ID NO: 255825 - DNA, 278 bp, Gossypium hirsutum
gtttcacctcatgcgatgctcaaatagaaggaaagaagaaaaagagaggaggaggaagaagaagaagaagaagaagaagcaataggtttcattgttgatggatttaactgaaggagttggagagagttcatcgccgccgagaagcttcggtaactttaacaactacgatatcagaactgacgttttcaatcgcttagttgaaatcggctacgaagaagctatttcgaactctgactttcgcaacaaagaaacaacaagtttcacctcatgcgatgctc

SEQ ID NO: 255826 - DNA, 477 bp, Gossypium hirsutum
acgcgtccggagaggagctaaaatagaatactcccaatcaccaacgcaacagccacagtcagctggctgcagaggattatctcattaactacctagctcggacttcaattatttgaagtacccattcccagcatatgtattaactggccacttcaaggttgcatcgtacaaaccttttttatttttagcaaccgaatcgaattatttacttgcgatgcctttgtataagtagcagtcattgaaggaagttgttgctttctgcaaattcctttggctccgcacattcaccatgtccgtgacgcctagatggagtagaaagaaatcccatttccctttacttgctgttcttctcttggccttcataacttgttccattctttacaatgaattcagcattcaacaaatccatgaaagtccggatcatggttctactcctaccactccacaaacttcctttacttatgtgaaacctaatct

SEQ ID NO: 255827 - DNA, 421 bp, Gossypium hirsutum
acgcgtccgcccacgcgtccggcctattcttcttcttccttcttaggttcctgctttgccaccccacaaccatatctctcgctatctttaaaagaaaatcgaaaaagggggttaaatttagcatttagtccttgaatttccattttcctttttgaaacagccctttgtttcacttcaagaggaactgagaactcagaattctgaagaacccattttggagatataattttcttttttctttttgctctttttgtcgggtgaaaatagtatcttcttcaacggaacagacaagaaactaataccccatttatctattttgtcagtatggataagcttgatttgctttaagaagcagcatcggtttcttcaacggatcctcctcccaaaggggagaacattgtactgaagaattaggattttt

SEQ ID NO: 255828 - DNA, 315 bp, Gossypium hirsutum
acgcgtccgcccacgcgtccgctttttcaactctcttacatccttcgccttcctttcattacccccttcttctttccatcatttctccgaacactgagtgaaaaatcccatcctcttctttgtaattaccctcgatttggatttgggaaatatcccagtcaaactctcttttttctttttcctatcaattcatgattttgtgtgattttaatccaaaacccatcaaatcaatattggatttttcttggcttaatttctcgtgaggtttttttttttgatcaggtgattcaagggatcaactttctcgattggggg

SEQ ID NO: 255829 - DNA, 232 bp, Gossypium hirsutum
gattggctctgctcagcctcgttagacagcattcgaagttagttttattattgtcctcaattgtgccagctggggcagtccacttcatctgccttttatctttatctttcattttgatgtatgatgatatggttcagattgaaattatagattttgttgtaactgaataccagtggaaactgaattttggggatgaaccccacacccaacactcataatttagtctaattcc

SEQ ID NO: 255830 - DNA, 174 bp, Gossypium hirsutum
gttggtgcttgatgtggtgctgagagggtatagtgggtacaatacaaggtgggcgctgaaggtacttgatagggtttttcccacggtgggtcacgacggtgcggcatgctgcgtcgacagtttgctggaaccgtgtttttcgtagctaatgatgcttgcctccctgatagattc

SEQ ID NO: 255831 - DNA, 196 bp, Gossypium hirsutum
tgaatctgctagttccacgaaagcccctttgttgggaaaatcaatcaagcaagagaagaaaaataaggatcacatagttgcagtgagagatatcgagttggaggaacatcggaaatcaacagatagagtaaaaactgattcaaccacattagatccaagtaaccaaaacggagcaagttcatcaatcacattacag

SEQ ID NO: 255832 - DNA, 491 bp, Gossypium hirsutum
taacctccccacaaaaaacctcctttcaagaaggttttcaaccagtgattttctttgtcctctttgtaaggaaaatagagaaacccttgaccctattttcttcaattgcaactttgtgagagcagtttgatttggctctcctcttgctcttcgcattgactccgtaaacgaaaattctatatccaattggattcttcaatggcttcaatgaaataatctctcgcttgagtactcaagaaatttctaccctgctatgtcttgcactctctgaataatctggaagtcaagaaataaactcatatttcgaataaccatcccttgccccattggtgcgattaaaagaatctttgacatgtttcaatcgtcctcaattccttcccggacacctcctgccagaacacattcggcttctatttcggatgctcgcacctcacaatggtctctctctctgaacatggttcaaaatagacaaaataacatgattagaggat

SEQ ID NO: 255833 - DNA, 369 bp, Gossypium hirsutum
cgtccgtgagatcctaattagattcttttaggcttcgttcaccaaccagttacattacaattgacacaaataggtaattatctttactttttattttgcagggttcctacaaacttaagatgacattatcaggtgcgggaattaaactgctaacttgcatttccttcgatttcaaaatcagttctggtgcttctgaatcttcagtctctgatagctgatcagcccaccaagtatatatatgaaatatggactgcagtaggatgttatatcttatttattgcgaacagatctcacattctacaatatattgtacttgtattccgtattatcgttcttgtgaagatgtcatgagacaaactacgattacat

SEQ ID NO: 255834 - DNA, 298 bp, Gossypium hirsutum
gtcataattctgagtcctagagaatttggatttatcaattcttgtgccgaatgtagttttagtgatgattcttcaaggaacaccaagcttattttttttgcataaatttttatgccatcagttggcatgattgtttccgtctttgaagcttttgtttatttcttccctgcaccttgtgtttttacctttctaacttccttgtgcagaaggcatgtcgtatactaaatgctgactttgtgctgctcatcaaatttattggttggagtttccccaatccatatttttccaagtttcggtt

SEQ ID NO: 255835 - DNA, 182 bp, Gossypium hirsutum
attaaacgtttgttggagctctgtgtttttagatgaaatacatgaaaacgtctctgctaagcctattttaaatgacgacttgctgcctgcttgctcgggtgtcattcaaaaaaaataaaaaaaaaaaccaacaaaaaaaaaaaaaaaaaaaaaaaaaaaaaaaaaaaaaaaaaaaataaaaa

SEQ ID NO: 255836 - DNA, 197 bp, Gossypium hirsutum
tgttagcacatttgtgagcaagtaaaaatactgccttgttctgtcctgtatttcttcctctgctccgttcctctgctgtcaaaaatccccaacaatagctaaaagcttgaacttcaagcatttttccttcatattttatccgggtataatacgttgctgctggtgctctgtttgaaattcttactttacccggataa

SEQ ID NO: 255837 - DNA, 442 bp, Gossypium hirsutum
ctcacgcgtccgctcaaaataactctttattctttcttctttattttttttgttccgttctgggctgcctttttttcttttttccctatcttttctttgctatgcgccagtgttggtgcaatttcatttcaaggtgacataaaactgcaaagaatttcaatatatttgttttcctcattgatccaaagtttttccaagtctactcgatttgatatggaaatggaaaactttttgcagtgaattatcagtgggggtctagctatcttcttttagggtttctattcctttacactgcttttctttagggtttctttgagtcttttgatttgtagcttgaataaagttttatccttctgctttgtttggctcagctgaatttgttggcaaaaaaataatggaagaatataatcagcttaacgagaatagtacacccaggggaaat

SEQ ID NO: 255838 - DNA, 268 bp, Gossypium hirsutum
atactctcttacatggaagcatggtgacatattccttatgtgtctctcttcttcgcaaattttgtcctcttaccttttgaagccagagagttttcccccttcgtataggtcatttctcaataaacatgttggaaaggatcaggtcatcctgcaaggcgttaaagagcatgcaagtggccttccatacactaatttggaagcaatagagaaattttataaggcaaaaggagcagacgttaaattagatccaaatatgaaaatcccatgt

SEQ ID NO: 255839 - DNA, 370 bp, Gossypium hirsutum
atttttgctcaactcacaggtcatgaagatgtgggggagaactggacgtgggctgtgctacacgcgagttggccggtcgtgggaggtgcgccgacgcgcgtggtggaagggagcagcggctgttttccttttttgttgaaaagttagtttagttttgggtcgtttgggatctagggttaggtttattttgggcttaattgggtttattgcttttgtaattttggactcttcttttttggatttttttatgtggattatttgggttttatttattgggctagaattaagtatcccgggctaaaattgggtcttacaaaaatcacaagttcaaaagtcttaagactctacggtcaaaaacctagaaatcaag

SEQ ID NO: 255840 - DNA, 232 bp, Gossypium hirsutum
ctcacgcgtccgtgccctgggggttggaaggagtcttttatctcacggaaatatgcccccatcttttatggtgatgagcaatggggattcacgagacgagatctccgacactaatccttcacttgctctttcccttgcattgccttatcctaaggcaggtggtagcggcagcggcaccacattaaaacttgcttcagacatgaagttacccaagtgccaatgaggtgaacac

SEQ ID NO: 255841 - DNA, 202 bp, Gossypium hirsutum
ctcacgcgtccgcccacgcgtccgattttaataaactcaattcataccaggtgtttgtggaattttcttaattgactgaataacctggcgttttattcttgcttgtatgctctgaagtgtatacaaacaaattgattgtctcaaacttctatgtgcatggcaagacataacaaattgattgaatatatcaaacaggttgttt

SEQ ID NO: 255842 - DNA, 306 bp, Gossypium hirsutum
gttatagctatgggaagcgggctcattctcactctggctattctgagaatggatcaaataagaggagaaatgcaggtgatgaacttgtacagatatctggggaagctgcagttgtgaagaaggctctgcatcaaattgcatctcgccttcatgagaacccttcacgatctcagcacttgcttgcttctgctgtgtcaaatgcatatcctgctgctggtgcaatgcttggtccagctgctggtgcccagatcgtagggataacttcattggttggaccttatggacgatacaaaggtgacactggag

SEQ ID NO: 255843 - DNA, 153 bp, Gossypium hirsutum
cttgcgaaagccttcagagcatttaccattgacctgtgccggaaaggaaataagaagattttgcttgaccatggctgacaaggcagtgactattaggaccaggaagttcatgaccaacaggcttctttccaggaagcaatttatcattgacgt

SEQ ID NO: 255844 - DNA, 177 bp, Gossypium hirsutum
ggtaatgtgagcactgcactatccgaagaagcaatgtcaaaatgccttaaaaaaagcatctacgaggcaatatctatggaggatgttgcaaaggtcagctgtgaggttgaaaaggatgatgtgaaatgcagtatatgccaggaagagtatgttgttggagatgaagtagggaggttg

SEQ ID NO: 255845 - DNA, 328 bp, Gossypium hirsutum
agcgaagaaggacgtggcttgtctgcgataagcctcggggagccgacaagtaggctttgatccggggatgtccgaatcgggaaaccgggcagaagaaattctgtcatctctcagtgaattcatagctgagtagaagcgaacctggggaagtgaaacatcttagtacccaaaatgctgcctaaactttagcataagacatccagatatgtattgctgcagtagttttttctaaagattagctggagttgtttatttatgaagttgtgaccaaaattttgagaactatttacttcttgcaatttatctttttttctgggtgatgtttcct

SEQ ID NO: 255846 - DNA, 412 bp, Gossypium hirsutum
aaaccagaaacttcaatttaatggttaagaataaggatgcataggctttaacaggttatagtgtttacaattagcaacttggtttgcgctgcccttgtgtgcccaaatataatcccaatctgaagtgtaaaatatttgccggtttgaagtcagtttttgagttctgcccatatccccataaaatgattcctgatggcaggaatagctgtaattgaagggtaatatatggcaatgggggctatatgtgaacacattggctgagaaagaaaaaggataaccccagatacctgcttgaagttttgaattgttttggagaatgattattgattcaagagagaaccattacatgataaggtttttctcgaaagtgtttgatgataaaagactccaggccataatggccattgatttt

SEQ ID NO: 255847 - DNA, 126 bp, Gossypium hirsutum
gctggcttctgcgaggaaaaggcttcaagaaagttacaaggaagctgaaaatgccaaaaagcaaagaacggtacaagtgatggacattcatgagctaccaaaacccaagaatgccttctttgccaa

SEQ ID NO: 255848 - DNA, 147 bp, Gossypium hirsutum
tcagtcttatctaccgacaaccatcaaaagctacgcatcgcccaaaatttgataaagaaagtcccactccctctgtcatcagtctccagcaccataactttcgtactcaccctttagccaacagagcagtttgtccccggtcctagc

SEQ ID NO: 255849 - DNA, 440 bp, Gossypium hirsutum
cagatctcaaaaagtgtgagatggcagcaccatccacagctaccttcttgtcgttccgaagccagtgcatctaggaatgacttgaacttgaatcctgatggatctgccgtgaatcctgcagctttccaacaacagattcgacaggattctaatctaattggacaattatttcagaccgatcctgagcttgctcaagccgttgtcggaaacgatctcaacaaactgcaggagattctccgagctcgtcatcaacgaagatctgacttgcgacggcaagaggaggaggagcttgctcttcttcaagctgatccttttgatgttgaagcacaaaagaaaattgaggctgccattcggcagaaagggattgatgagaactgggctgctgccttagaatataatcctgaaggctttgcaagggtggttatgctgtacgtggacat

SEQ ID NO: 255850 - DNA, 238 bp, Gossypium hirsutum
ttttagttggaattgtcatcaagacagactacaatgagcaccctgacgatgactttgaccgaaaagccctcccaataataagggacataagcttaccgagatacatggcacggagttcgtgtacctgtagaatacacggagcgaagatttcatcaaacggcgtagagaatatcatggataacatataagagagcttattcagggcttgtaaggccggtaatagggaccatcttccctg

SEQ ID NO: 255851 - DNA, 248 bp, Gossypium hirsutum
tttgaaaatgaattttacaagggaaaacaagattttatcatctgctgtgcctctttcaattgtcagagaacagcctagcagaatacctaatgattctgatccttctacatcttctaaagaatctttaccagaaccaactgtaaatactgaaagaaaacgacagtgttcaagtggctctgatgggcacggcgatgtgcaaataagaaagagtttgaggagcgaccaaaaaaggaggaagaaaggtgatg

SEQ ID NO: 255852 - DNA, 225 bp, Gossypium hirsutum
ttttgggtttttctctctgggtttcaacccagaacctggccaagcaccggtgcacaccagccgtggctccgccatacgcggcggctggaggtgcccaaaatcgggtcttttaatctccttctattcccctttttttttcttttaaaagaccccaaaaaatacttttaaaaaatgttctggttgagaaaatagatgagaaatagcatgcaagagcacggtggcctc

SEQ ID NO: 255853 - DNA, 113 bp, Gossypium hirsutum
aaacatcatccctttcgtgataatgaagacagtcttcactattttctcggtacttgtatccaccgtaatctccaccgtcaacggctgccctacgacggaccgcgctgcgctgc

SEQ ID NO: 255854 - DNA, 212 bp, Gossypium hirsutum
tccacgcgtccgcatgttacactctaacaccatttgttcaagcaaatccagtatgcagatccgagaattttagtactgttcatgtgaaacatcttaaaattgggagtcagcatcgcaatgcggtgaaggtttgtgcaacccggaggagaagggcagcatattcaaggactgaaacctatgttctattagaacccggagaagatgagaagttt

SEQ ID NO: 255855 - DNA, 191 bp, Gossypium hirsutum
tccacgcgtccggctaattggaagagtcttgaaggttaaaaccgaagaaacaaaggctctctctctttgtgaatccaatcaaatcgaagatgttgagagtggcaacgaggcggctcacttcttattcgtctgcgtggaggccgcaccaggccacctccgctatcgcctctcgtcctttcatcgacggcgcc

SEQ ID NO: 255856 - DNA, 144 bp, Gossypium hirsutum
tcgtcacgcgttcgctagccgccattggaatgataacgtcggtaatcatatatgaaaagatcctcgtaccaatactaaggaatgcaactggaaacgaacgaggcatcaaaatcctccagaggattggcattgggatgcttttct

SEQ ID NO: 255857 - DNA, 358 bp, Gossypium hirsutum
gttttgtgttaggtacaaatccatagaatttgatttgttggaatcgcaaatccttagtggcgattgggatgattgtattgataccttgaataaaattaaggatgtgaaggatgatacacgatcttcagttttgtttcttgtgttcaagcagcgttttttggagtatttgaatcgaggtgatgattctttggctttgtcagttttgcaaaaacgggttcccactttacatatgagcaacgaaacagttcataaattagcttatagtatacttgcattgaaagagatggagttgggtaagctagatgaagatgttattagtgaactgcgaaaaaggttagtgatggagctaggcaaacag

SEQ ID NO: 255858 - DNA, 248 bp, Gossypium hirsutum
tgtcacgcgtccggtgaaaaggtgcgcagcagtcagcttgctagtaaattgtggagtccaatatggtatccagattgcagtaactaaattaaggatctattctgaagctgttgcgtaaaagtaattagtttttaggaatcttcgggtgtatttgtaaattatatgcccactgagatctgtttatccatttgtatcccattcttgttttaagtaaaagaacacgcctcttgtgtattggtagtttgatg

SEQ ID NO: 255859 - DNA, 291 bp, Gossypium hirsutum
tccacgcgtccgcccacgcgtccgggagaagtgacttccggagataagcgctgtgattcttgagaagatctgtcaatatttttattgggctcttcaatattcaaggggtaaagagactgagtttcacattgaacccgaactgactttggagctgatgatggctgctaattatctccatacatagctgattgctttttctttgattcttacgtaagatgttctgtagcaattaaccaataactttgttattttcttacaagtgtcattgacaggtaattgtcttttctcatt

SEQ ID NO: 255860 - DNA, 483 bp, Gossypium hirsutum
cccacgcgtccggtggctctatgatttttctgtttttatgtgcatttcttgataattcattatagatgctcattatgtatttgaatctgtgtgatatcaaattaatgaagtttacaaataattaataggatttcccaagctggttggcttcctttcacacgacattggtgcttagatagtattttaaaagacttgtctggtttttcaaagtagagcttgacctgctgagcaattcctgattctcatagtcatatgagaaacagatggattggcatctagttatttatgaattattaaactacagagtaagaatgtctaggcttttctattaggggcaagttctgctaatgtttttgagagaaatggtatcttgtgcaagtaatctttaatcttcatgcacgtggaaagtcagcttctcctggcctatctatctcatggtttgtttctcttatttaggctcgtgtcgaacaaaactagtccggc

SEQ ID NO: 255861 - DNA, 537 bp, Gossypium hirsutum
  unsure (1)..(537): unsure at all n locations
ttcttctcctcttttctccactgagttcgtttttaaaaccagctcaactcggttctgcatatcgaacgcactctccccttctctttctatcctattccatggggcagaatccatcgcgtcatctctggaacctcaatcacctatcctttattctgtagaaaaaataataattcaagacattttttttatctgttgactttttttcccctttctttttggccatgaatcaaatagctcgaagccatttgattatgtttctttttgctctttcctttcttgttccttcaattgaagccagcgaaggtgatgctgatccgatttacaagacttgtttagaagactgtgaaaaaagtgggtgtgtaggggaaatgtgttttcaacactggaaattctcttccgatgggaaaccaattgatggaccatggtatttgcaagaacccctntatcagaaatggaaacaatgggattgtcggtccgattgtcggtaccattgtatgactgctagagaggaacagagatggaaactcggtgggaaac

SEQ ID NO: 255862 - DNA, 392 bp, Gossypium hirsutum
tttctcgtccgcccacgcgtccgatttttttccttttctttttggggtgcggctccattaactcggtcatttgtttttcttgtaaactttttcttcaacatttgatctgataggggatgggaacatcaaaaaaaaagttttttttggggggggggggtgccattgttgatgattttaatgggggactgaggtgggagcccaagaatgccaaaattttcgtttacttagcaaacacatggcctaattgccaatgaacaaaatttgtataatgcatatgttggaaacttccaaaaaaaagaaaaaggaaataaaggtttatatcaaatatgaattaaaaaaaaaaaaaaaaaaaaaaaaaaaaaaaaaaaaaactaaaccccccccaacaaaaa

SEQ ID NO: 255863 - DNA, 401 bp, Gossypium hirsutum
ttttaaaatatggtatggtgggatctattgattgccgtgttaacctcgactgaagcatttgccagggtgttcttcctatatacaccctgcagttacctgctttacttcacttcattgtttctttacacgaatttcgcacgttttggtttgctgaagaaaacaataaatgcccagtgcatcgattttctccattgatgtgtggataacttgaaaaactttctctttttttgaaacctttgaagttgtagaagcaaaccggttgagctacttgtttttcatgcacaaaataggactctgggaataggatttccagggtccagctaaatcatctctttcgtttttatattcatgggtttgctataatcactctcctcttgcttcttcagtagttcgtcggtctt

SEQ ID NO: 255864 - DNA, 205 bp, Gossypium hirsutum
ctgccctgttgttggaattatgtgctaggggagaggcagtgctattgtttattggcttatttgctttcgttttcgtcaatattcggtgtgattttattctattcctcctttatgaaccagagatggagagctatgtttttatgatcttcgaaataatttgccttaaattatgattaaaaaacaggtcttttatcctaccctattt

SEQ ID NO: 255865 - DNA, 399 bp, Gossypium hirsutum
tttcacgcgtctctctcgcaatgaaatcattccatatccctattttaaacctcgcctcagaaggtcagattttttagcctcgaaaacctatctcaagcttcgatttcaacgaagaagatatggcctccgatggctcgtttgaagatatgctttccttcttttaattccttatacagaaaaccacatgcaaactctaaaaaaaggcaaaaatagattcaaaaggaaaagaaacagaaaaaaaaactcgagatcaccttttggaaaaattgctttcgaattttctatttaatctgcgtattagtgtgtgtaaaaaaaattacattaatcactacatggcttttatagccgaaacaaaaaaatgaaaagaaaaatacactttcctttttttgtttttccctc

SEQ ID NO: 255866 - DNA, 312 bp, Gossypium hirsutum
tttcacgcgtccgttctcacttcccatttttcattttccaccggtaatgagttctctctgttttgttacttaaaaaagccatgcagaaaaagggaaaggatttgcagagagttgggatttgccagggaatcttcaatttcatcatcagcagccttgttggttttagcctgaaacgcatcacgttggggcaccctatgccccgtggctcaaccaatgaagctcaagaaccactcataagccaagccaagctcgatgaaaacccaaggatagatgatttcggttctgcagttcggattcacttcaagcaaacag

SEQ ID NO: 255867 - DNA, 379 bp, Gossypium hirsutum
ttatgcttgctgttcaagacaaagctatataccagaagcaaaaagagatttataaaggaatttttggaccaagacctgaacctaaacccaagagaggtaattggctaatccgattaaggcactagcaacgggtgcgggatttcaaggcttccaaatcaaatgctccgcttttggcaccaacatcatggagtttctcaaaagtgtttgaatcttacatgcttttggattctgaagcttggtgattgttgtctcaaaggtggattttctggaattacatactttttgtttgacagaaaacaataaagaacgaaatttcatggtttttacgtagaagaaataccatactatatccactaccttactgtaactattaaacaaa

SEQ ID NO: 255868 - DNA, 216 bp, Gossypium hirsutum
tcaaaggccggggaacgcccaccggcactggctgagcggggaggtgcaggtgaagttcgcatcggtagtgggcggaggaggaattggggcagcgacagaattggtgcagtgcggggtggtggtcacgtgcgggggatcggcgacgggggagatgcacgtgagagaggtgagtttgcagtcggaggacatggatggaatgtatctgaatgggaggga

SEQ ID NO: 255869 - DNA, 279 bp, Gossypium hirsutum
ccccccgcatgattttatttttagaaaaatagatattgaaaaaaggaaatcaatttcgagaagcagtggaggcatattatgtaagaatcaatcagcctcagcacataaaggctaagggtatatgtcctgcttgtataggcttctttttccttttttttcttcataaatttgacttttaaggtgggttattaaatttttcattgctctgtaacatcctcaaaatcctctttgtagtaaataatacgagataaaatcttattgaaaaaataattataagat

SEQ ID NO: 255870 - DNA, 397 bp, Gossypium hirsutum
tgtccacgcgtccggttttggcagtcatctatctaaccttccgaaaagatacagtcgtgacatatatcgaacccgaaaagaatgtcgacccagcagcgcaaagccggatggaaagtgggcttgccaaacccgacgtgtccttccaagttgacgttgctccttacagacaggatttggctgacatcccgtttccggagtagctatttttttatctctgagatcagctttgattacttaagctgtattagaaagtataaagatagagatgatgaagatgtttagaagcttttttttttctttttgcaggtttcgatgtcaccggttgtttttaacctgcgtctgttgtcggaaaatgtaaaaatggttttatagtgagatagataaatatttttagtgt

SEQ ID NO: 255871 - DNA, 483 bp, Gossypium hirsutum
tgtctcacgcgtcttttcacgcgtccggctttatccaacatccagtctggtgaattttatcagcaacccttactttcttgttataatgtttcccctggtaaggcgaatcaggtaaaaagatcagttaaggttgctgctacacccttgagcatgacacctcaggaaaaaatagaaaagctgaggcggcgtcaacaaatgcaagcactgtttgccattcagaaacaacagcagcagtttaccaatcaagttccatgtatcaatcactctatcattcaaaaatctactcaagaaaatcaatttcctcacattggaggagccgatattgaagatcatagtgttcctgcctcttttgacccagcctcgcctcgagagcaagatgattctaacacagtctctgttgtaattgatgactgttcactggaggaaacagtactttatcagctacaagatataatcacaaagttggatgtgagaattagactt

SEQ ID NO: 255872 - DNA, 317 bp, Gossypium hirsutum
tcagtttcaattttctcacaacaaaactgaaaatgtcttgctgttcaggaaaatgtggctgcggcgctgattgcaagtgtggcagtggctgtaacgggcactttgagggatctgagatgggagttggggttgagggtggatgcccgtgtggagacaactgcaaatgcaacccttgcactggcggcatgtgaacatcaaagagaagcagagtggcctttgacattttaactaaataaattctataactttagtatgtatcagcaaattttcatgaggatttggttcttaattatgtgcaatgtggcttttctgctatg

SEQ ID NO: 255873 - DNA, 429 bp, Gossypium hirsutum
tataaacgccactgtagggaggttttagcggggctattatataaaacgccgcaaattttccgccgattttagagaaacgctgtcgttttacatgacaccttaagggcattggtggcgctatattagaaacgccacaaatgttcagtttggtaagacgctgtcgttttatagtgtctgtatttcatcccaaatagtccaatcccttacccgacaaatcagttttctccccaaaaattccccccaaattttccccaaaaatcccccaaatttagaaccctagtctgctgtgccccaaccatcactgctacattgccgtttactgacccttctgttgttgctcgtcgaccgtcgaccgtgacagtcgtgtacctccgcactcctctgccgtcgcttgggtaaaacgatcgattgaagaaatataatcagcgg

SEQ ID NO: 255874 - DNA, 189 bp, Gossypium hirsutum
tccatagatacgcccacgcgtccgcccacgcgtcctttcgaaataccgtctctgtgtgcctcttgagcttcagagacttcagtatcgacactccggctaagctcttcagctgttctttcacaagcacttaccgttacatcagttgttgccccaaaatccacttgctacgcgtttgataattctagtcat

SEQ ID NO: 255875 - DNA, 323 bp, Gossypium hirsutum
tcctacgcgtccgcccacgcgtccgcccacgcgtccgattttccaaacctgaagcctcttccctttccccttccccctcccccatccttgccatactaatctactacttgtcgtcagccagcagcggtttcacaaatacaaagtcccaaaacaaaaaagagtgaagaaagaaactgaacgaccccttttctcagtcgctatctccgactctgcgataaccgagtgatcacaccaacccctgcccagaatgttgtgccgagcatcaaggctagtggcccgtcgaccctttttggcagcaagggctagacccttctcactgatct

SEQ ID NO: 255876 - DNA, 302 bp, Gossypium hirsutum
ctttatgttgggaacatcgattcgtgtcttaaaatcgagatattcatgatgagtagagtgaagaattatcttgaagatcagttattggggtttgcattgataccactgtctgaagtaatactcaagaatgggaaattggagaaagagttcttcctttcttcgacggatttgattcattcgccggctggtttcgttcaattgtcgctcgagtatatcggatcatctcccgatgtaatgactattcctaatgtttgatgctgatgaaaccgataaggattcggaaacggaggagctcgaaaaga

SEQ ID NO: 255877 - DNA, 127 bp, Gossypium hirsutum
attccctcgatcagcaagtagtggaaatcttctgatttgctagagtctgaaaaactttcaaacgaaataaaagatcgagcgatgaagattgttaagaaaagagaagacgaagctgtcaatggagaag

SEQ ID NO: 255878 - DNA, 258 bp, Gossypium hirsutum
tctcctacgcgtccgtgtgattttggggtattaagtggtcaacaaagctgttgcttattttatacattcggtgtttgatgctactgctattgagggtttgatctttgattcaaatcatgaattagaaccttttgactaattatggatcctaattaataagggatgacaaactccggtcggctgcatacggtataagggcgagattgatggttggagtgcggatgttagtttctaagttctgagatttatgaggaaatt

SEQ ID NO: 255879 - DNA, 512 bp, Gossypium hirsutum
  unsure (1)..(512): unsure at all n locations
aataaaagtaaaggagaaaatgaagggtctgcaggcacttatattggcaatggtaacggttatggcgatcgctacaactgatgctcaaagcatttgcagcatgccagcttcaggtttgatggcatgcaaaccagcagtgacccctcccaaccctccgccgcccacgtcaacttgctgctccgccctctcccacgctgacatgcgttgcctttgctcatataagaactccaagctgttgccttcccttggtattgacccaaaccttgccatgaaattgcctagcttgtgcaagcttcctcatcctgcaaattgttagttcctggctctccatatttgatctcaaatgtgagggaaaatcatgcttattataagcctctacttcacattattgtactgagcttcgggttttctttttcctttatttctttntaatgtgttgggtntcgattggtatcttatagtcgtgtaatatcacatacgtgtgatttctcaccaataatcatatattagta

SEQ ID NO: 255880 - DNA, 434 bp, Gossypium hirsutum
tgcctacgcgtccgcccacgcgtccgcccacgcgtccgggaaggtagcttggttatacctgcagcaggtgactataagccaaatggagtccatacttctgtggctaaatctacagatagttctatgggagttacaagtggtgaaaccaaggctggttctttgatgggtctggaaactttaatcaaacccaatcacagttccactgctgctgatgaacaggctaaagctgcagaagaattcaagaaaacaatgtatggcacagctgatagtggtagcagcagtgatgaggaaggagtgtcaaaaacgaagaagttacagatcagaatacgagaaaagccgacgtcaggaacgggggatgttaataagattaaagaagcgacaaagcgacttggtgatggcttgggcctacctatagccaggacataatcatggac

SEQ ID NO: 255881 - DNA, 219 bp, Gossypium hirsutum
cttactcgtccgtttttctttttcttcttagaaatgctttgtacgccattgacagttttacttttacagacagcgctacatgataatgttgctgtagaattatgtaaaaactgtactgatatatatagtgtactcagtggtaaaagtttgtcttttttgatattgcttccttctgctgctgatgttttattttacataaaaaaaatcagattggaagtt

SEQ ID NO: 255882 - DNA, 212 bp, Gossypium hirsutum
ctcacgcgtccgcaagaatagaagtaggtggactgccttcttgagtgaaaaatgatggtatgaaattattctatccgattttttttgtgaatgtggatactaactctacttttgaataggaatcctcgaatgtttgagttcaaaaaaaaattttttgaaaaagaaaacataagaaaaaaaaaaaatattttaactaaaaaaaaatccaaatt

SEQ ID NO: 255883 - DNA, 251 bp, Gossypium hirsutum
aactagttgattgaaaatgtatatatatatatatatcaaatatgaagaataagctacaagatatgtatagaacttatattttatgatgtatacctttgttaataaatcaaatgatgctattttactagaaataagtaatttgaatttttttttaactctgaataatataataagttattaaaatgatgtatcggtatctcaaagtttaggtttgagtttggtattaatatttgatcgggttgattgcaatg

SEQ ID NO: 255884 - DNA, 513 bp, Gossypium hirsutum
tactttggaattattacaattattatttttttaataattataatttatagaattttatatgatcttaaaaaatatggagaatataaatatattttaaaagatgataaaaaagcaaaagattattatttttattcatttattggatgtattatttatggtcatggaaatttattaaatgtaaatcaattaattgtaacaattatttcattattatcagattctttatttttaggaatttgtgaaaaatttattgcagtattatcttgtcattatgatgataataacaataataatgataaatgttggcatcatgaacattttgaatatgtttgttgtaatttaatattattatcattttatattccattatgtattatgattgcaccaatgtttaatgatacaagttcaaatgatgaaaaaaataaaaaaaatgaaataaaagaaaaaaaagaaaataatttttgttcatttgataatacaatagaatttattaatccatattaagtttattaa

SEQ ID NO: 255885 - DNA, 424 bp, Gossypium hirsutum
ggcacaagtataggcgtgtcacatcaaacacagtatctaacatccctgctttgcctgcattctctggcagtgacagttctcccttgtctaatgcacaagggtttcacaccgtcaatgaaactcaggagcagactccttccaagcatcatataccaacaatgtcacatcagcctcaatttcatcctattcatcagaaccatcatcaaccagttcacccaaaccaacatggagctcattttccccagaatcatcaatgtgggccaccatcccacttacctgaaattagtcatgctcaccagtcaccaaccatgtctcaacacatagcttgcttacaacccttaacaggaggtcacgttggtgcacgcttgcatgttatgcctacaaatccagcgaaatactgcgatgaatgtggtgcaccttacct

SEQ ID NO: 255886 - DNA, 137 bp, Gossypium hirsutum
tgggaatggctgccttctatcgatccatatatgtcaatgatgactctcttgctcttgcattctatgagtctactatttgtcaaaatgctttttttgtttagttgtgtacatgcaacacgtgagatactaaaaagcaa

SEQ ID NO: 255887 - DNA, 219 bp, Gossypium hirsutum
agcggccgcccttttttttttttgtttttttttaatattttggacctaccaccacgtacagttttaccaaataaaatttatgtagttgacgttgagaactgaatttaccttgtgcgattcctgccactgaaaagatccctcgatcgaaaatatgtaacatggcaattccatgtaaaagtatgttgttgtgggccgttcgcccttaagatacaatacatt

SEQ ID NO: 255888 - DNA, 414 bp, Gossypium hirsutum
cccacgcgtccggaaaattaaaaatctccattattttaaatccttctttggatcacgcgtaacggcctggcatccactagttgtgtcgcgacaccaaaggcagtcttggaattttgaaactctgtttactatgtagccacattgtactccttggttgcaacatggagaccagcctcaagctctcataccttcgaatattatcctgcgcacttactaagtatgttagtcctccattaagccccttttcattataaggttataaaacgactcaaattacacttttaatttaattaaaagtaaaatggaaaactagataaaacatagaaagattacttaaattcaatctggttaaatatgaaaactagtttaatatgctacaatgaattgcaacatatcatcgtgacatggggaaac

SEQ ID NO: 255889 - DNA, 355 bp, Gossypium hirsutum
cttttagatgagcaacatcctcggattttcaaggacttagatttcatggaattctactctcttgctttttccgacccaacaaagagcagagatagtggccagctgctccataaatttgctgctctctcaccaccagtttccaattaaaatcttgcccatttcgacaagtacaatcccagttacaaataataaattgagtcctatattcaagatctgcattctcgtgttgtattattatgttgtggttagttataattgtgtgattgtatggtgctaaggtcactaaatctatcgtgtaatttagttcacttatgtgttcttttatcttttaaataaataaataataaataaagtg

SEQ ID NO: 255890 - DNA, 277 bp, Gossypium hirsutum
gaagtcttcaaaatggatccgtaacctcgggaaaaggatcagctcagagcagtgccctgtctctcttctcctccaagaattccctggcatggagtcttgtcgcggttggcggcgtcttcggttttgccttctacttctaggctggcgctccttacaattgtggttgtgtttggggctatattgtgatggcatcatcatatttaggtcatatggtattaatgtattatgtttgttaatcaattcaaaaaaaattatataacttttactttttcacctt

SEQ ID NO: 255891 - DNA, 469 bp, Gossypium hirsutum
ggtgcatcctgtcattagacaaagtgatgaattgaaggtgtttttgcaggtggaagggagacttcctttgtcgatgagcactgatgtggcttctcggatgctcgatggagccgtgaaattgcccaagcagttatttggggaaagtactgcagtggtggcgccacacgaggtggtgcagcccgcgaaaggtgggagggatttgttgcgtttgtttaaggaattgagacagtctgttgcaaacgattggggtggttctaaaccacctgtagtggaggaggataaggtttttttggagaagaaagagtggattcatgatcttgagcagcaaataagcaatgcttctcagcaggctgagtctcttgttaaagcacagcaagatatgggagagacaatgggagaactaggattggcgtttattaagctgactaagtttgagaatgaggaggctatgtacaattctcagagagta

SEQ ID NO: 255892 - DNA, 185 bp, Gossypium hirsutum
ccctctcttccgcccacgcgtccgacattttttttttgattttttttttttttttaaggaatagggcgtttattggcatagataggtttgaatttggatctagtgtttcaagcattttgaattttaaggacggattttgaatctgttccgatgagatatttttatgtgctcttttggtggtatct

SEQ ID NO: 255893 - DNA, 395 bp, Gossypium hirsutum
cccacgcgtccgggaaactggcacaaactctatagatagatccatagcacacttgttatttcacaggccttcaggtccatctctaaaccatactaccgataatgcgtttaagcctcacggcttgattcatggctccatcatgtgatatgctacggatcgtggacaacaacaaaagcaggtaaccacgaatttgttaatatcagtgttaactccttttagagtatatagttttttttttttttttaatttatggtggtgtaaaatggtcttagtatggccttcaacataaaatgcagtttggtttaacatggacgtagtttgtggtgttgtaaatggttgtaaatggtaatggtttgtgaccctttttatccgtcactaatacgtcagtttgcttt

SEQ ID NO: 255894 - DNA, 489 bp, Gossypium hirsutum
tctactcgtccggggaaattggctgaaaagttatctggattggccctcaacgacaaccacagcaacaacaacgacgatagcttgtctcgggccgtgaaagccattgaggccgccgaagccgtcatccaacaacaggaagaagagaatagtcgattgaggtccgaactccagaagaaacttgagctactcgaaaaatataaagtagaaagtattagcaatccatatgcttctgcaaaggaagctaccaataccatttcaaatggtactctgaatgcattttctgctgctgctgctgcttctgataataacacacgccctgctctttctcatttctcttcaccctccacggctacctctttttcgcccaccaggtatcagttagaaggagaatacagttctcgattgccacagggtcttatgccagtgcctcaagtaaataattccaattccatttggaaacaggatgttcccatcaagattcgggaacat

SEQ ID NO: 255895 - DNA, 444 bp, Gossypium hirsutum
gcattttctgttatggtcattgcagcaactttttccaacgcaacttatgaaagactgcctttagaagatgaagaagaagttgtaagcgccggtcacggtggaccgatgcaaggcggagcaaacgattcaccgccggaaattgggagtagcggaggcggcggttcacacacaggtctgcctgatccatcttcacttccaatatacaatttgcctcctaatttactctcaaatggagggcaactagggcatgaaccctatggttggacacatgggagaccaccctattaataaaatggagagactatctttcatatataattagagagtgcgacaacttaatttaggtcttacaaaagatgtttgtgtaatctgtattgaaaaatagagagattgggagacaatttagcaaaaaaaagacaagtgaaacaagataaacaatcttgg

SEQ ID NO: 255896 - DNA, 211 bp, Gossypium hirsutum
cttttctctcgatgtgcgaccagaggtttcacgtattatgaaggtgctcatagttttggtgataagtttcgtttttatagcaccaatgatgttactttgggacagcttcccgtaactgataagcttgtgtattggtttttgactcgagtcttaacatctcaagatttgagtgatgcaaagaaggatccaacctacataacaaaagcatcac

SEQ ID NO: 255897 - DNA, 209 bp, Gossypium hirsutum
ttttctcgtccgcccacgcgtccgggacattaagcaaggcaagaagaacctggaacctctcatcaccaatgattacagttgggttgatgggttgatgtattaaaatggcctatatatatatataatagtttgtgtttgcctgatacatttgtgtattttaaaccctaggaacaatgacagatttttatgtaaaatttcagcaacacccc

SEQ ID NO: 255898 - DNA, 444 bp, Gossypium hirsutum
tttcttcgcgtccggaaacacacacacacacaaaaagaaaaaaaccccatagaaacaggtccatgttgttctcaaacatgtctaaaacaaatatggtaaggagacatgtattagagaagaagagatcatgttccaaagagaaagaaagtggctgtttatctaaacatctgaagaaaatctacccgattgggcttcaaagaacctcttcatctttatcgttatcatccttgtccttgtctttgtcacaaaactccaatgattcatctcttacagaccattccagcactcccttggaacaaaagatttcattggcacttagcttgattgctcctcaccgtgagcgaagagagttccccatggttgtcaaaactcatgtccatcatcaccagcagcagcagcaggatcctcctggcaatggtgaagtgaggaggtgccattgggtta

SEQ ID NO: 255899 - DNA, 179 bp, Gossypium hirsutum
tcatgagttcatatttgaagtaactcgtgttttgaagaaagggcaatggagtatggaacgacctgggggggggtgaacaaaggaaacagagccttgtatggaatgaacaggttctgttgtagataagaaagtagtgtatagttaatgtggtgggactagggaggtgtagatagatataa

SEQ ID NO: 255900 - DNA, 461 bp, Gossypium hirsutum
ttatcaccaaaagaacacaagttttgcactctcttgctcgtgcagtccagcttcttgataaagtcaagtcaatccctaaaacattccaacacttttttgtcacaatatggatgatcactacacaaggaatcatgttccggcttttgggagctgggattggaacaacgacctccctttcactcagtgttttgaatcagctagacaagcggggttgcttcgttacagttactctgaggatcgtgatttgtatgttgccggtgatctttatgataaggatgttgttactcctgccatgatcgttgttcctcgcagaaggaagaaaggacgaaagtcaaatgacaaagaagggaaaaggcaaaactgggagatcaatgacgtgaaggaatcaccaagccccactcctctgcaccgtccaacacccaaacccgttgatgaagacctctataaaatctccccacacc

SEQ ID NO: 255901 - DNA, 159 bp, Gossypium hirsutum
gatgttcacgggaaagcacacgagatttatataagattcttgctgatgacattgtgtactcagctcttaaagtaagtgcagccatgggttacctagcaccagaataataatattaaagtgattaaaataaaagtaataatgaatttatcatcagttggt

SEQ ID NO: 255902 - DNA, 441 bp, Gossypium hirsutum
cttttgtacgttatcagaagattcaataactattgctgcccatggtgtgaataagagtggctatcttgcaataggtttcggtaatgggatggtgaatagctatgcatatgtgggctggattggcgatactggaaaagggcatttaaatacatattggattgatggaaagcatcccttgaacatccatccaacaaatgagaatctgacacatgtcaggtgcaggtcagaagatggcatcattactttggaattcaggcgtccattaaaaccatcatgcaatcaaaatgataagccagagtgcaagaacattgttgatcctacaactcctcttaaagtcatatgggcaatgggttcaaagtggactgatgaacatctcagtgagaaatacatgcatactgtcacgagtcaaaggcctgtgtaagtgctgcttatccgtggttc

SEQ ID NO: 255903 - DNA, 396 bp, Gossypium hirsutum
ttgggactcaccggcgatccatttctcgacaaagaaaactcataaaccccaaaaatacaaaacccccaaaccccccaaaaaaagcttaaaatccgccatggaaatgcttaaccgctaaagcaaaaggttttgagggtgttataataaagctttgattgtctatgaagacatttcaatcatggaatgcactggtcaagaaaagaaatgctttagctgaagggggaaattgcggatttaaaatgaggcagcttccatttatgggagttatttgtacagttatgttgctcattgtgtatagaactacggattatcaataccacaagacagagatggaaacaagatttcacccttttgcaacagttaaggattatcatttgcatcttgggaaattaagag

SEQ ID NO: 255904 - DNA, 361 bp, Gossypium hirsutum
ccctcttttccgcccacgcgtccgcccacgcgtccgcaaatatgtattttgattttctccgggatgttaatagaccacaaagacttgtagaaaatcttgtatctatcatcagtaaagttgatgaaattggtgtcctgtaaataggcagtagtaagaactctgtatccacttttaaccgtatactcgcccgaaccttcatacttctacaccagcaaatcctcctttgatgactcaacaatcggaatggacagaatacgttgcgcctgatcttcatctacaagactggaaataagtcctttattccaggtatttgtctccgaatcaattaattgattaacaatcgtccatcgaggattaatac

SEQ ID NO: 255905 - DNA, 292 bp, Gossypium hirsutum
ttatgattacggtctcagttgttgtctatggactcatctaaacttgctaccaatgaggatataaagctttttaatttgtgctgaatgtctggattgccatggttgaagacgacttgacgacctctggacctgccaatattatctctattaacaggttacaggacccaaaatgaaataaaaacaaaattcaaatcggtcaaaaaaaaaaaaaaaaaaaaaaaaaaaaaaaaaaaaaaaaaaaaaaaaaaaaaaataaaaaaaaaaaagaaaataaaaaataaaaaaggggggg

SEQ ID NO: 255906 - DNA, 305 bp, Gossypium hirsutum
gcttaattaaggaaaggaccaattgggataatatgtaaaagatgagttgtagtatatataggtaccatatagcaatggaaatgaaaatatgaggtccttatatgattatagaccatatgagaacatttaggagatattcttgatgaatcatgcatggaaaaatttaaaaatgatgaggactaaattggaattgaaataaattaaagatgataaataaaagacatatgacataacatcattgtatatcatcttcttgcccaaaatttacatggataccctatgaaagagaaagcaagctttcttgg

SEQ ID NO: 255907 - DNA, 147 bp, Gossypium hirsutum
ttctctgtagcacatctgtggaattattttaatatgtacatatattaggtatatgcttcacctcaatttagtgttcgatcatttaataataaatcaaatgtgtatgtatatatattcccttttcttacataagaaaatacaagtttt

SEQ ID NO: 255908 - DNA, 428 bp, Gossypium hirsutum
ttttaaatatggagttcatggataggcctagatctggtggtactgtagatgggtggacaagacctgctgatgaccgaagaggatttcagggaggatttcaaggtggcagggatagaggatttcctggaaacagagatgtggacaggccaaggtcgagggagagatggtgagccctggaattggcattgttttgttaaattctgtcttcaacttttgactacttgaaccaataatattttgtcgcctcacatcttttcttaagttgttctcttcttttctgctctggtaaagtggagcaatgattcttcagtgtcggaatgccgaactctgcgttaatctattgttaaatctttgaaactatgtatggcctttccaccactcttttcttttttgtacacttggactcaaattttatttaacatatgcac

SEQ ID NO: 255909 - DNA, 205 bp, Gossypium hirsutum
ttcctgcttagatccaaagaggaagcctcgattgctgttaattaatggcggtttaccatctcttacacaaagacgtctaacgagcttccactcaatgggctgacattcatagaaagcttgggaatctacccccaaagcctccatctttcaagcctgaccctttagaacccgcacctgaccctgattccgtccctaaggacaagtc

SEQ ID NO: 255910 - DNA, 170 bp, Gossypium hirsutum
tcgtccacgcgtccgtgtgatcgtggggtcttaagtgttcatcaaagctgttgcttattttatacactcagtgttcgatgctactgctcttgagggctcgatcccttgattcaaatcatgaatcataaccttttgactaattttggatcctaattaataagggatgacaa

SEQ ID NO: 255911 - DNA, 416 bp, Gossypium hirsutum
tttttggaattactgatagttaattcagcaacactgtatgagatgaaagggaaagttgtatttttttttttagattgaactcggctagttgaatgtatctggtactcttgattgttgcagaaaggagcaattagtgcatactcatgtttagaacgagctctgtaataaatttggttgctgtcttatggtgattctttgttgattaaggagtttcatcatattagtgttgaatttgttgatggcatcaattagaagaacactgtctccggtgcctcgaccggggactcctgttacaggggaggctgaacgttcagttccttctcctctgtcgaagtcgacaacgccgcagactggtggcttgttatcttctcttataggtttatcagattctcaagcattgtgttcggtgttttttc

SEQ ID NO: 255912 - DNA, 346 bp, Gossypium hirsutum
ttaggcaataagaatattttggcgattccttcgagctgataaagatgcgaacattgtgaaccgtaagatgaggaaaggtgctcaagtggaacctacagagcctgatgagcttcaacttctagcaaccgttcaaactagtttacaaaagaaggataagaaacttagagaaatagtaaggagtgggaactgcatattaaggaaattgaagaagaatgaagaggagaattcggatcaagtgcttcacttcttctctcaagtggatttgaaattagtggcaagagttttgaacatgtctaatgtgacaagagaccaacttttatggtgccattccaaattaagcaagatt

SEQ ID NO: 255913 - DNA, 227 bp, Gossypium hirsutum
tcgttcacgcgtccgcccacgcgtacgcccacgcgtacgggaaggtaggttggttatacccgcatcaggagactataagccaaatggaggacatacttctgtggctaagtctacagattgacctatgggagttacatgtggtgaaaccacggctggctctttgatggggctggacactttaattaaacccaatcacagttccactgctgctgatgaacaggctaaag

SEQ ID NO: 255914 - DNA, 240 bp, Gossypium hirsutum
cccacgcgtccgtgagctggtcatgaagaaaaaaaaatgaaacccagaatttttgttctttctattgggcgtgggggggggattcttgtatggcatatggcttaattgattctgtcgggatagcgatagaaagtagagagtaaagaagaaaaactctatgggtttttttgaccagtttgtatatagaaagaacatggtgttcttgcctgcatagaattaaaagaggtcctttgtcatttt

SEQ ID NO: 255915 - DNA, 377 bp, Gossypium hirsutum
tcggaagccagggcctgtgtgaaggcgttgaggttatgctccgatctagatgtacaaaacctgaaggtggagggggactctctaacggtgaataagaaggcgcccgactacagatgacacagattccttagaaataacgggatatatagaagatgtgaagagactaagtaaagtttttcgaagctgtaccttttatgcatgcgaaaacatcggccaacgaagcagcgaactagttagccaaagaaggccttcaacaagaacaagaattatttttgaggaatgggattccacaggttgcggcgattctggttgagcgagaccgcagtttgttggacgccccggactgaagagctctggtcgatgaaggaaagggaagc

SEQ ID NO: 255916 - DNA, 195 bp, Gossypium hirsutum
tcgtttacgcgtaggcgattgtttaccaggaaaacttaggagagatccaaccatgtcgtgcacctttgaaaaaaggtggactttgttagagaagagacttgtaggtttgcccatttcatggtcccattatacctagtgatgatgcatgataccaaaccaataagagctcttcaatagatgatacaaatcctggtt

SEQ ID NO: 255917 - DNA, 482 bp, Gossypium hirsutum
cggttttattctcagaaaaagccttatcctccccaaaagtacacagaatacaactttcctcccaaaagacttccaaaacagttcgcccttctttaatctggttccctcgtcttctccgcaacaaaatgacttcttgcaaaggactgaacactccccactagctttctcaggtacaatctttctttcatggactctggtatttctatcacgccaaattacccaaagtgcacaacaaagaagacaccgttgaggagtacagctcaccccaaaagctcgagtaagccattgatcgaacgccagatccaaattatttgagaatatgcaaaagtataaactctgaccaaacctccactgaaacaacactcattcgaaagaggtgatcaatattttcttctgcccatccacaacgaggacaacaagctgtattaatcaatttttttgtatttcatattagccagaataggtagatagttccaagagca

SEQ ID NO: 255918 - DNA, 404 bp, Gossypium hirsutum
gtagtaatcgctcattggtcagctgtctcgagaacacgtcgtaaaagtatagttcccaaggtcaagacggttgatgccttagccttcgcttcggttccctttcgtgtatgctgatgctttggttttgattaaatgttttaaacaacaatttccagtttcgaatttcaagtacttcaactgaaaaataaaaaaaacacgatccattagagaaattaaattataaaagcagcgccaaagcttaagaatccttcacctattctctctcgaaatatcaaccttttttatttttgttgttggaatcgaagatctgataaaaaatttgtaaacatttcttaagctctggagagatccaatttctttactgatctcaaatccatggcgtttccacgatcgaagctactttt

SEQ ID NO: 255919 - DNA, 421 bp, Gossypium hirsutum
gtagataatgctgctaagggaggcatgattggaactgcgattgttccgaaaggtataatcgaaaccgataaagattcggttaattatcagaaagagatgcagaacaagaagttcgaacaggaagcgatgaagctttggcttaggatgaggaatgaagttatttcagagcttcaagagaaagggtatgatgttgagtgagtgattttttcagctatggtgattctattgttaagggtcaaatttcgttattagtccttattatgaataagttgtggattgtggatttaatttttgtacttttcagttagtctttgtttttatgtgctaattatcctttagtgtaattggtaccccttcatgtatgatgcaattgaaccaagctcaaaagctcgagttagacttgaaattcgagactcaaagc

SEQ ID NO: 255920 - DNA, 422 bp, Gossypium hirsutum
  unsure (1)..(422): unsure at all n locations
cttcncaacttcccacttccaccaatcccttcgcttctcttgtttttctttctttgggtaaccatggaaatttttcttgaattcatgtttactatttctttttcttttgttatttccttccttctggctaagcttctttccttttcgtctatcattgatcaacatctagagatcgtgtcgagattatatgcggaagtcaaaactgaatcagaaaaacatgaatttgaagaagttgatgctttatgtgaatccgtggaagaaattggtacccaggaagagtcttcgaatggtggtgaagaattaattagagaaacagagggaactgttgaaggaattagtttatctgaagagaattttgctagtgaaaccactgagattgaactagctaaagaggatgaagaagggattgaggatttggtgtg

SEQ ID NO: 255921 - DNA, 240 bp, Gossypium hirsutum
gtgagactgccgcaattatctcacacccttcagggttgattgttaggagaatctcattcaagtcaaaaagaatggctcgggtttaacattaaaactgtcctccaaaacttcaaacaatattgcttcctcatgatcgcgtggatgtctattctaggtcatttgggagcgaaaactcttttattcccattttgtttataaataatcagctctaattatgataagaataaattgttttggtgt

SEQ ID NO: 255922 - DNA, 378 bp, Gossypium hirsutum
catgttctgctgctcggtttttcatcctctgtcccagctgcgtcctttagatcctcatctgttcccattgcaacgagagaaacagagatccgactgtcgcactatggaggtaaactcccctccttaagcctatctttttctttgttctatgtgttcgcacgctaagttccaaaaaggaaaagaaaacagtgaaaaacgaaggaaaaaaatggaatatacctcggaaatttttctgttttttttcaatctttttcgtattcaatctgtggatgccaaaaagaaaaattcttttacagtgttttttaatcggccttatatccgaatcgaattgaagagaaacaataaaatgccaaaataaaagaataaaaatcccttttt

SEQ ID NO: 255923 - DNA, 256 bp, Gossypium hirsutum
gtcgtccatggctgcccaatctcaacctggaccactcattgtttgaatgtatgtttttttttttatcataatttttttattatttgtatcggattggatcatgccaatcattgagatacatttgtgtttgtgaaactttttgtgtgtatgcaccaatatttgatagatttctcaaattacatgataatatatatataatgaaattttcataaaaaaaaaaaaaataaaaaaatatacaaataaaaataataaaatg

SEQ ID NO: 255924 - DNA, 319 bp, Gossypium hirsutum
ccttatttgatcaagaacatgcaactgctgatgttttaccagtaaaagtacttggtgatgggtttgaagatgaggatatggaagatggtgagattgagagtgactcaagttcttatagagtcctctctagcaagaccttagcggatgtggttgaagcactgattggagtttattatgttgaaggtggcaagcatgcagctaaccacctcatgaaatggattgggatccaggtggagtctgatcctgatgatatggactctatagtgaagccatcgaatgttccagaaagcatactcaggagtgtaaattttgaggcctt

SEQ ID NO: 255925 - DNA, 117 bp, Gossypium hirsutum
gcgctggtgatagtgatcaatgggtaccttttacttgacttcttctcctccgaagtcactggcgtaatctttaccaccgttgtctgtgcatttacaggagcttatcttgcatttatt

SEQ ID NO: 255926 - DNA, 386 bp, Gossypium hirsutum
ctttctcgtgggtgagctttgcaattcggatgccaataacttcgtcaatacaaaagaagcatcagcaagatatgagaagacagaacagtggtgcacaagttggtggtatcagttcaaggtgctgcttcaaaggggggttagagaaaggagatatgaagccttcaacaggctaagaattttccaagtgatcagtgtggcagtacttggtggactactatggtggcacaccccagcttctcacatcttcgaccgcattgcactgctgtttttcttctcggtcttctggggattctatccactctacaatgcggtattcacattccctcaagaacgaacaatgctaatcaaggaacgctctttcggaatgtatcgcctttcatcgtact

SEQ ID NO: 255927 - DNA, 471 bp, Gossypium hirsutum
ttttctcgtccggtttttcctcatttggccgaccaaaactcacccccgatcgccgcaccatcactgtaatagatggctagcgatgagttgggcttgatttcgaagaggaagaatgcaactctgacgaccggattgattcaggtacggaggagaacgtggagcacgtacggaggctatgcgctggcgtacggaggtagctggcgattggggctgcggcgtaaaaggggaacaaaaccttagggtttctgttcctaaaatgtttcggaccgtttgggccaatgtaactttgggtatgagttaatttgggctcgtattgagttttgaatttgggctatgtgattggacttcgatttaatatttggatattttttattttagctttattatcgttgtttgtaacgggccgggcaaatttggcccactacatgaattataagagaatgaaatgtgattatatgcaagtgaattatg

SEQ ID NO: 255928 - DNA, 416 bp, Gossypium hirsutum
taatccttcttcttcaaacttctatttctttttttaaaaagagaactttatagagaagaagaggatcaagaaaagaattttttttttatttttattttggggtgatagtggtgactggtgagggggattgttttgtcattttcattggagtttttgggtgtattttcaaaaaaaattaaaagaaatctgagatttgggggtggcgctgtacaaaaatggagtcggatactatcgagtgcgtatcatctatagatgaaattgttgatgatcatgagatccctcaccataatctactccaccacccacacccttgtgatgcccctcatcatcaattttcatcgtcaaagccttatcacaacggcactaataatgttaatagtattagcaatattgtgggtccaacggcgattgctccg

SEQ ID NO: 255929 - DNA, 363 bp, Gossypium hirsutum
aatccagttatcaaacatgccaacgacatctttatgcttaaacacaatcatgtccctggaaagaaatcttccacatttcagatgagatcactctccaacaacacggttttcgaggatcaatcccagggtgtaatctgctatagagatgaaaatggagaaatagtttgtgaagggtacgacgaaggccctcgttttcctcgacgattccgggtaagtcctatcatctgagagatgctgagatccttgatcttatccgacatagatggctccaaattgttaatggtgacggcctcggcactgctattaaaggtgttatcatcgtgaacaatgactcctagtggaacgaatttaataggttcacta

SEQ ID NO: 255930 - DNA, 466 bp, Gossypium hirsutum
gctcctcacgcgtccgatttcccccccttaaagacaaaaacatattttgtttgttgaatttgaaggtggtagggagatgagtagagcagcgtaagcagttaaaagggcagccaagctaatacctaaacacctctaccctggttccgtccgatataactcttcttattaaattaagtagagacttgatacgcggttgaatagcgtgagaagagacctactattattcctttacgaccgccattaacatccatctatcttagccattaagatctctctaattccaattttcttcttcccagtttggagtgagaatagtacccagaaaccaatcatgagtgagatgaaagataaattgaagggcttcatgaagaaagtcaacacccagttctcttcttcgtcttcttcttcttcttcttctggtaaattcaagggccaaggtcgagtcttgggttcctcttcttcttct

SEQ ID NO: 255931 - DNA, 253 bp, Gossypium hirsutum
agtgcaaggaattgcaatggaggtgcattgagggatacaaagaccgtcttaacttctttctcctgaactgttgtgttatggtagcttgaactttgtagtttgttgtattggttaccatatagtgtttacttaatttgctgaataaaagatggattgtgtagggtaaggggagtgagttgtaagaaacttttttgtctttgtcatgtggtgtgtgcttttcactcggtcccttctgaaaaaaattaactgtgtg

SEQ ID NO: 255932 - DNA, 503 bp, Gossypium hirsutum
cttactcgtgcgcccacgcgtgcgcccacgcgtgcgatatactagctatggcgagtacataggttaaatttaattgtgaacataagtgaacctaattgtagaatctaaatacttttgttaattttataaattttattaaaataaaatgggtttaagatcaaataacccatatttaattattcttaaattctcaaaatatcaaaatgtaaaacagtatcgataccagaataaagatatcgacactttgataaaggtatcgatactttaagcaaagtcaagatactttaagtaaacatattcatcaaaacagtttggatagcagtagtggtccaaatttgaaaattcaccaaaaatcgtagagatagatatagaggttgaattaaatatggaattagaacttaatgagtctagtttttcataaaagaaacggtgtaagcaatagaattgtagattatgagatatatggattttagtgagacaatatcagaattattttgggttct

SEQ ID NO: 255933 - DNA, 389 bp, Gossypium hirsutum
ctttcttgcattttttaagccctagttgcattttaaatctaaccaaataaacatgggttcacctcccatggttgtggccgtccgtttgccccaagtctctgttatgacctttgctttttgatggactctgtttgctgttatctttggttggtgaagttcccttgctcttatggagttaagatgttggcacctctccggggtttcatcgtatctgaagatttagcatctggtggctgttgtagccgatgtttggctttggctccacctctatcggtggtctagcaaatgccaaggcaactttgggattgattttttggggcttcatggtgacatggcctttaccagaggcgtgcaacagcctctctttttgtttcccggtgctctctccc

SEQ ID NO: 255934 - DNA, 376 bp, Gossypium hirsutum
gctactcgtccgaaaaggtttcgattcatagagggaaaacctaaaaaaccagaaacatcaaccacaaagcgaaacgatgaaggtcatccctttaattttgatgggttgtggaggtgttggacgccaacttctgcaacacattgtttcctgcagatcacttgacgccaagcagggagttcatttacgagttgtgggagtatctgatagcaaatcactaatcattgcatcagatgttaaacaaaaagagttggatgataacattttagctgaagtttgtagggtaaaatcagatggttcttcattgtccaaacttactagcttaggtgagtctcaagtgttctccaattcagaatcaaggacaaaagtgctagacatt

SEQ ID NO: 255935 - DNA, 298 bp, Gossypium hirsutum
gttgttacgcgtccgcgcacagagtgccatgactggggagaacaagatccgttcgagaacatatggagcgaaccacccagagatgcatacttgaattgaacatcaacactggtagtagcagtccacgtaagaatatgtttaaagctgtcacaacatataaacctatctatatttcacaacatccatgaaatggatgttgatgctttctatagaataattgcttatgaatgagctgatcatgttatgaccatgtttgatacaaactccattggtgctctgtgctttatagggaagaaca

SEQ ID NO: 255936 - DNA, 272 bp, Gossypium hirsutum
ggtctttgttcaaggggagctcctttagcttgttctcacgatatcccctcacagattttgttcctggccctaacataattcgtgaaatggcaatagtgggagggacaggtgcgtttaggatggccaaagggtttgcactatttcgggccagttcatctagcgccaagactggagatgctagtcttaaggttgatgttactttgtaccactactaaacccaattgtaaaatattgaaatttataataaaatcaataaagtggctcaagtgatt

SEQ ID NO: 255937 - DNA, 226 bp, Gossypium hirsutum
gtcggttcagagccgtgtacgatatgtcgttgggggtacgtgcgagacggattaagactcgggtgtacccgatccgaagatgggagaccgatcagtgctggtaggccaaaaaaaaaaagaagaaaattagggattattcccccctttttttgcaattgatgtttgtacacaaatgttttgtttcatcggcgggaattgagtgaatatacattttttatccccaatt

SEQ ID NO: 255938 - DNA, 329 bp, Gossypium hirsutum
gtagacattcctgaagaagaagcagtatgcaggatttgcttggttgagctgggtgaaggaggtgagactcttaagatggagtgtagctgtaaaggagagcttgcacttgctcacaaagactgtgcagtgaagtggtttagcatcaaaggaaacaagacatgtgatgtctgcaagcaagatgttcagaatctccctgtaactttattgaaagtgaatgatccaaggattgttatcagacgacctccgactgtgccacagcaggctcaagtttctggttacagggtctggcaggatataccagttctcgacatggtcagcatactggctta

SEQ ID NO: 255939 - DNA, 276 bp, Gossypium hirsutum
aatttccatagttttctgtaaaaattcctaattccggtctataaaataatagtagtagaatccaagcaaatttcatgtaatagcttgtaggcactcctaacggagaactcccctgtcaactcccctctccatacttaaaaatcttcgtgtgctgtctccgctagccgggatcttcagaattttttccgctacatccattcggaaggtattccttatgacctctgttttccagcttctattagtggcttcgattaaatttgaaactaacttagtatt

SEQ ID NO: 255940 - DNA, 282 bp, Gossypium hirsutum
ttacccttaaccaccaaaacggatctttggaggttcctttggataaaagagagcgaaggcggcgtgctgactgaaccccccccttaacgtaggatacccttaacccttatccctacccccttatccctaccccttatccctatctcctctttcttctcgttttgaaaaaaaaaaaaaaggaaaaaaaaatgaaagggaaaagctaaaaaatttgttttgtttgagtctagacgtcatcagttgaaacccacagtgctttgctaacctagaatactttttgac

SEQ ID NO: 255941 - DNA, 280 bp, Gossypium hirsutum
atcaaatctgataatgggtaattagctcgctttggtcatccctatcaactctcgtttcaagttcctcatcaatcaactagtcactatcctagtagaatcttctgatcttctactcaaatagcaagttgaaaagagctatttatcttccaacctcacaatctaaaccagtttgggatgaaggtgttcacagagggccataccaaatttgggttaattcccacattgatgacttcctaagatctcatgtctggtatagtttgttttaatctgcttcctaatc

SEQ ID NO: 255942 - DNA, 151 bp, Gossypium hirsutum
gatttgcattgagctttttgcgtaagtgaggtttgagtatggggagttgtagggttattggcgctgcgttcttggttttgctccttgtagatttagcttttgctgctaggtcatttaaggctgtaggaaagggaggtggtgctggaggagg

SEQ ID NO: 255943 - DNA, 316 bp, Gossypium hirsutum
tcgtctacgcgtccgaagacgatgggggaaaataaagctacaagggatgcaagcatttgtaggctataaaaaaagagcaaagtagtgaatgcatttcatcactagatttggaaatggagctccttaacgtacccaaactttccatcaatcctttgatttcatctctgattctccttttctcccttttaatttggcttaaactagcaaaaaggaaaaccctgaatttgcctgcatcacctccaaagttaccacttattggcaacatccatcaacttggcaaacttgcccaccgttctctctgggaccttgttaggaa

SEQ ID NO: 255944 - DNA, 368 bp, Gossypium hirsutum
ccggatatattgaagagaagaaaatttccccttttttttttataaaaaaaatggcgtattcgggtgttctgaaaaccctaatcaggtcatcgcatttgggatctacgactcgtaacttcagccttgttagcagccaaatcagcaatcacactgcgaaatggatgcaggattcaagcaagaaatctcctatggagttgatcaatgaagtccctccaatcaaggttgaaggccggattgtagcttgtgaaggagtaagcatagtgagatcgaggagacatgaaagccctttcacattttcatgtgaagacgatgcctattttgttcatttgacatgtgcaagagagtgcatgcatgcttgatattttggg

SEQ ID NO: 255945 - DNA, 185 bp, Gossypium hirsutum
cttacgcgtccgcccacgcgtccgtttgggacttatatatattcattctccatccaagggttgatgactgagaatggatgatgcaatactatatatttgcattaatttcagactctttctatgtcactgttgctaatgttgtactttgatcaccaaactataatgtgctaaattttaattttttt

SEQ ID NO: 255946 - DNA, 420 bp, Gossypium hirsutum
ctcactcgtccggaaaaaatcagtctactaggagatggaaggtagcagtgggaaaggctacgcctgggcaatctcagctggtttcaacgctgcgttcgctgccgttgccgctaaattcttgttacatccgcttgaaagctctttcatctcttcaagcaacagttacgaattttgctactaatttcctcacttctgggcttgccggcttcttcttgttcgaggaactattgtcgtttaagtggtttgcaggtgccatgatcattgtaattggtgtacttatcctcagcaagtcaagcgtagagaagagggaaaagaaggattagagttgccattaatggttgctgcatttcagctattataactttttggattcttttggcatgtctttccaacaactaaagagatgttttcagttttagc

SEQ ID NO: 255947 - DNA, 332 bp, Gossypium hirsutum
  unsure (1)..(332): unsure at all n locations
ctgatggtccccatatcagcggctacatagcctggaaatccccgaacgcttctcctagtacaggttcactaagcggagcttctagtgttgagacctcagccgaaaaaacaaaaaagccactgtttcagcctgatctgaacaagtcaatcggtaaaatcattgaactgattgaaggaattggactaacatcttccgattcttctgacagttgtctagagaaaaatcaaactcccaaacaatcaccagctcatgcagactactttgttcgtgtttttcaatggaaaagttctgaaataagcaccgntctacaacattttattcgtgcatgtaac

SEQ ID NO: 255948 - DNA, 314 bp, Gossypium hirsutum
tcgtgaattcataggtttgatgggtttagtttctcaatctttctaccactctgaccaatacttgatagccttatccataagactatagtttagtagttggcatttagcacacattacacctttttcatacatactttttggtttctctaccttacctcggttagactggtcaaagtttatagagctagcctattgatggtgtatgggccatacccacttcctaggctgtagacgggaggcacagatcttagttctatcgggataactaggtagaaggactatcatccaattatcaaggtgtgcgagccacccga

SEQ ID NO: 255949 - DNA, 181 bp, Gossypium hirsutum
cgcgtccgcccacgcgtccgtatcttctctctctctttatccaaagtctgatgattgattccagttgggttaccgcacaaaccaactggtttaaagtccaaaattttggtttcaagattagatttttttaaaataaataaaaaagttgcagtcttgattccttttgatctaaagcctttga

SEQ ID NO: 255950 - DNA, 228 bp, Gossypium hirsutum
tttcaatcctgacctcccttgcttccttcgtctccggccagtagcagtcatccctcaggtttataggggtgttaaggtcatcttctcagctgtgtaacttttcttctaaaggaaaccattcaaaggcgtaggaactcaaagttggttattgtgccacaacatgatgagttcaatgtcgcaacatacggagtagaatgctaaaattgctatatctataacactcctaac

SEQ ID NO: 255951 - DNA, 192 bp, Gossypium hirsutum
tctccgaaatacagcttcaactggtatttcaattggatcctgggttggttgggtgttgccttcagcctggccttctctattggtggcatatgcagcatagtgaacaatgaactcaagatgaagttcttcaagcccaattaagaagaaaagaaaaagacacttccttatatatataaaacctatatatcatac

SEQ ID NO: 255952 - DNA, 323 bp, Gossypium hirsutum
gtagaaactggatgctattggacattacttaatcttggtgatccactagtgcttttggtggcgtgagtctcacatagcacctgacggatctgagagcggaagcgcaaagattggggcctgctggccttgctttgcactatgcaaatataattatgcaagttgatactcttgttgctcgatcaagttctattcctgcaaatacaagggaggcattataccagaacttgccaccctgcataaaatcagctctacgcccgaaattacgatcttttcatgtcaaagaagagcttactgttacagaagtcaaagatgagatggagaag

SEQ ID NO: 255953 - DNA, 357 bp, Gossypium hirsutum
gtaggtcccaccaataaggagttgtgtgtacacagggttttggagcttagatgaatatgatgttgggatgggaaagtgataacttgtattaggtctgcttattattattattatttttgggggggggtctacgaacaccaacgccatgggaagatttgaagagagaggattcgattcaggggtttgccctaagcctattcgaacctttagatggtctaccaactgttatcagactgagatggctgattcaaaaactggtgcagagcttcttgatataatcctccccgagggagggtatggggccgagaattccaccaaccaaatggctttattaccaccgtttttttgtggatcacc

SEQ ID NO: 255954 - DNA, 287 bp, Gossypium hirsutum
tataaaaataaaataaaaaaaggcagagcctccatctgtttcggccctccgagctccggcgccaaactcaaccccctctttccgatttagacccggcgatggcgctggtaagtcctcgtccttccctttttattatttatttcttatgtagaagataaaataaaaataaaaataaaatgaaacaaacaaaaacgtaaataaaaaaaatcaccttcaaaagtctgttttgttttttttttatttcaataatccgtaaaagcaaaggaagaagaagttcttccttacag

SEQ ID NO: 255955 - DNA, 433 bp, Gossypium hirsutum
ttcacgcgtccgcccacgcgtccgcccacgcgtccgattacccgctgagttaaagcatacccttttgtttacaacctgggagctagagaccacagtgagatcagctaaagaggagattactaagagagaacttgaactgtttcatttcaaagatgttttaaccaagacaatgaaagagagagatgaagctcaatgtagatgccagaagcttatggtggagaaattcatgcttgagcaacaattgcaacacaaagagcagccaaaacagcaacaaaaccagcaggacactgcttcactgtctggtgtttctagcagtgaagatgaatccaattccaacataagtttagtttcatctccaggtttggactcattgccacaaccatctcttcctcaagaagccttgaaactagcagctaataggccactacctgag

SEQ ID NO: 255956 - DNA, 233 bp, Gossypium hirsutum
ttttaaatgctactttttcttcctctccttcctttctttttcttaactttcgttagtataatgttataagtcgaaagaagtaagagcatttctttctttgtcttttctgccctctggtaccgtaccgtatacattatgttgttccagtcccttttagttctttctttggggatccatatattggttttgctgaccccttttgttgcaatggaattttcttccgacttaatttt

SEQ ID NO: 255957 - DNA, 313 bp, Gossypium hirsutum
  unsure (1)..(313): unsure at all n locations
tgtcgatagcgattcgagctccgatctgttcgagctccaaaactacgatttaggtatctattcaggtggtttacctgtgtatgaaacaacacatatggacagcatcaagagaggagcaccaatttccaatggtgcactatgaaactatacattttcaacttgttgatgatgggttccatttgtttccattgccattgtaggcattagattttgctcgtcttttttttcttcttccctattgctagcttctttgaaagttcgttgaatgctttttccccttttttttattttctctgnatgtacagtttggaat

SEQ ID NO: 255958 - DNA, 125 bp, Gossypium hirsutum
ggtacgtatcgcacatccagagaagtataccgatgaagggaagccaactcctactgagtttgaggaccctaagctttatcattatgcgattttttcggataacggacttgcagcatcagtggtgg

SEQ ID NO: 255959 - DNA, 398 bp, Gossypium hirsutum
ctggtatgacgagacagcttcaaagttccttaagaagacttataatttacctaagaaactttaataacctggagtcgggagtaaagcaaaccaaggcaggctgcatcctatataacattgtttgctagcaatgttattataatttctacgtacttcgtatttggcctgcacaagttcctaaagatgtggcactaattgtgttactcttgtatagcatatcggccatgttcaggtgaaatccagctgatgatattcaccaagatatggagtggtgagaagagggaactagagagaggcagaggaccttcaagggcttacttgtgaggaaaggtgggttggatacactcattgtaagattcaattattatatgattatgagatttcgtcatatctaattt

SEQ ID NO: 255960 - DNA, 169 bp, Gossypium hirsutum
tgatgagcagagcgtcgagagtagacttgaagaagtttagtctctagatggtctttatacagccatagttcaaccaatgcagaccaagaaatataattatcactgccttgaagtttgacagtagtaatggctggataactagaaattgaagaaaaaaaaaaaaagaaaa

SEQ ID NO: 255961 - DNA, 229 bp, Gossypium hirsutum
ctattgtttgttaaataaactacgcgagatcttagccggtttaaaaccctccaactctttttcatcatcatcatcatcatcatcatcttcttactttgttaactgaaaaaaaaaaactcaacttagggctaaaaaaaccagatctctctcaatcgggatcaatggaagctcaatgcaatggattgttgcaataagaaatcggattcttggacggatataggagcctttt

SEQ ID NO: 255962 - DNA, 413 bp, Gossypium hirsutum
agatatttcaattatgtggtggtgattaatgctcccattcttgtttattttcaatatcatgccgcagtagctgcaagttatactttgagtaccatgaagtccctagaaaaagccgatattagcatctatcagtttgattccattaatagtgaaacaagtgcaactcatcttattcaaggaatttgcaatgtgcggtctctaagtttaaccactgatgcagcgattttcctaactagtggacttcctatatttcacaaccttattgaattcaaatatcttggtgttggttttaatgggagagaaacttggcttgtggagtttctacattgtgtgcctaatctaaagacacttaccctcaattttccggatgatgcgggaacccgatggaaggctttacgtatgaaagttccttc

SEQ ID NO: 255963 - DNA, 354 bp, Gossypium hirsutum
gataacactgacagaacttttaaaactcatgcaccaaatctaattaacggtaagaaaagtcagttatctaaatgagaagcaaaaattctgaaattgtactgggtgtgtggcgtaatgaccagcttattcccatattctctcctatttttcctttatttctaacgttcttttctcctttattagctactcttttccccttctttgcaaatatttttccttctctcttggtttttcttctctcggccttctttctgtgttttcttcaatctatggctctcccattcattcgccgactctctctctctctctatatatatatcccttcaatttttttcctcaaatttttttagcttt

SEQ ID NO: 255964 - DNA, 136 bp, Gossypium hirsutum
tctttcaacacaccttaaatcatccataattccacaccagaaaacagagttaaagccaaagtttctcgatggagaatttgctagggttgttgagaattcatgttcaaagaggggtgaatcttgctgcgagagatgt

SEQ ID NO: 255965 - DNA, 307 bp, Gossypium hirsutum
ctcactcgtgcgaaaatataatatataaggtatgttaagctgaaacatattatgtaatcgaggaataatgtgacagaacctagtccaggctaacttcactagcctgcatatggatagggttgtgacagaaccaagtccaagctaacactttgatgatgagtaatcatgttgcagcatgcttctccagctgcatcactaggcccactgccataggctattgcatcaccaccctcggcgataccaaagaagtcggcttctctgtctggtttggccatacagggcgagaggagtgagggttcacccgtgt

SEQ ID NO: 255966 - DNA, 403 bp, Gossypium hirsutum
agagaactccgacgacgtaaccgtgaggtgatccaagtaattttcttccttcttcttttttgttttcgtttacatatctaaataaaatataaagtaatcaaataaaaaagaaaaaaaagaacaagaatttaaaacgaaagtaaaaaaacctttgaagcttttctctgttttttttctgttttcgatttctttttaaaaaaaaatctgtaatacaatattttttctttttaaaaaaaaaaacccctttacatttctgttctttggctatatagccgaatccccccttctattactggtctctctactttgtattatttctgcctctgttctcttttgttttgtttgctgctttggttttgcaagtgtcagaggagcgatgggatggtggcgtgctgcaggcatg

SEQ ID NO: 255967 - DNA, 436 bp, Gossypium hirsutum
  unsure (1)..(436): unsure at all n locations
tcgattggcaaagaacaagaaaccggaaggtcaagaatgtctaaatgactcggacaatcagagtgtcgacaatctagtatctccgtccggcatttcaccaagtcaaaatctgattccaacttcaccagcaggtgtatggcctggttcaagaacaatggatatgcgtaacactcatgttgacatcgatctaatgcgcggttgactcgtttcctctaatagtttcacaagcaatgtacaaagtttgctgctacaggcagcctgattttcagcttgacggaatctcacttgattttactcgtcgacaagagcggtggtttggtccgatatttgtagctttgatagaccgaactcacgatttctactgatcccatcggtaccatttcatttctccaatttgaaccagttntaaattagacatgcttcagtcctctttata

SEQ ID NO: 255968 - DNA, 483 bp, Gossypium hirsutum
atttctttctcccttctctacactctcatcgtctcagcttcaaaaatttcttcgcagactttctttagaaagatatattttctatttccactttcatttctactcattttttagacgcataattctctgtggcttgtaattttttagactgttgtaaaggaggaaaaggagagaccgtttctggaaatttttggaatgggggagttggaaagattttgaattttctctgtattttaataatgaaaaatctttccaattcctcccattccactgatttctaacacttcctctccattttcttactttcttcaatcctttttgtttcatcatttcttgcagtttgtaagtgaaatcggtaaaccttacctaattttcttactcttctgttgtatttttatatagatctattcttaaccgtcttccatggatcttttgagatttgcttcttgctatatagttccagatccttggttttatttttta

SEQ ID NO: 255969 - DNA, 248 bp, Gossypium hirsutum
ttgcctacgcgtccggattcgccaaatagttatagtaatttttgaaggaagttgtaaaccccataattttttgtaaaaatttgtagtttcggtttgtaataagtaattactaggatccagattagccccttgtaatagtttgtaggtatttcgaactgagaattccccgaatggttcttctttccaaacttgaatatgttcatgatccgtctctgcaagtgggatctgtaaaattttcttcgcagttt

SEQ ID NO: 255970 - DNA, 136 bp, Gossypium hirsutum
gttccatttggctctgcagaggttcgggctattttcagcagtggtagtggccgtgttactggatgtatgggaacagagggaaagatagtggatgattgtcgcatccgtgtcaattgaaatggtcgcacagtccatg

SEQ ID NO: 255971 - DNA, 255 bp, Gossypium hirsutum
ctacgcgtccgaatacactcaaatctacctccaacttccttctttgatttcttttttctttctctcatggctaaacaaaaaatcccagatcgaacaaccgaagacaaatctaaagacgagttaccagcatgttgtcctccggtgaccaaagctaagagcggaggcaggaagagaagctgccttgaaggatgtctctttgctttgtgctgctgctggttatgggaggcatgctgcgacctgtaggaataatggagc

SEQ ID NO: 255972 - DNA, 436 bp, Gossypium hirsutum
gcctgcattccccctcctctgccactccagtctcctcagccaccgattacaaccacgattcggatgtggcgcagaagggcatcgacggcgctgccaccggtaagaactcctccccttttcgtctattttctaaagaaaaacaaccaataaaagaaaaaaaacagtaaaggaaagaaaaatcgaaacacgagattcaccttcaaattttgtttttttttctgatctcttttcccttgtattttatttttaattttcaatacagaaatttgctcaccccctaaatcggtttacaattggccttttataccgaaaactaataataatcaataaaactcctatctcttgcttgttgtgctgtgattcgtggtttgtttgcaggtggagcgagcgttgtgcgcgtcgacgtgcgcgacatgcggtgcgacatgcaggaact

SEQ ID NO: 255973 - DNA, 295 bp, Gossypium hirsutum
tttattctaccaccaattcatcttgagggcaggagctgctaatgctcttggttcattcataagccaaacccatgtttgattcattttcctttcctcgatgcttttctagaagaaccctccaaaaaaacacatatataaattgtgaaaataatgtgggaatttgcttgttatgatttgtgtatgtttaaccgtcccttcagagccctcccttttttcttcaaagtttcccttcgaggaagttggaaaattttatagaaattggtttcatgaaaaaaaaaaaaggactaaaagcaag

SEQ ID NO: 255974 - DNA, 213 bp, Gossypium hirsutum
tgtcttcgcgtccgggaaaagatggctatggcaaagtcctccaatgctccaatactattgacaaagaagtataactgtcagaatcgtagaccaacatgggcccagtctcctgctaccaccgcgaaagtccttgcttttatatgcccggatgtggaaggtcgaaacagatctatgtcagcaacagcaaatagagaagcccgtactgacatcatc

SEQ ID NO: 255975 - DNA, 471 bp, Gossypium hirsutum
  unsure (1)..(471): unsure at all n locations
tgncgttcccccatggttctcacactctgcttccctatccattacaacactttctagctcgacccgactttgtattttcagtcatctcaacaagcaagtactataaaaatgagtgtctctggactgattgccagtccctcaagatgttgccttcggctatctgactgcaatcaagggttggtgtgcaggcaagttccatctattccaattgccagcaaacctaaggcgaaatttggcaagcttcatcttgaaagaagtaggttgacagtttctttcagaaggtggaagatgcagaaaactcatctgatcaaatgtgcaatggatgcttcctatggcgatatggctagtgaatcaggagcagctatgtttcctagaattaatgttcgggacccatacaaacggctaggaataagcagggaggcttcagaagatgaaattcaagcagcacggaacttccttattagtaaatat

SEQ ID NO: 255976 - DNA, 329 bp, Gossypium hirsutum
gatcaactcacagcaactgcaaccactaatcacagggctgtaaagtggtggtcaaggatcctgccgctagccttttaccaaaaatatgtttgtcccccgtttttttcccctcgcttaagttgttattggcattattaatattttttttagtttgggattcttgagttatgtggtgtattgtatgtgcatactggatggaaacgtacggatataagaggtataaaaaagaagaagctatggctaaattctaaataccaagattattgtggtcatgcctatgataaaagaattgatgttttcaaatgaaagaagaggggttacttttgctt

SEQ ID NO: 255977 - DNA, 216 bp, Gossypium hirsutum
taatttctcgtagatgtgtacttgatccatagttagcttacatatatcgacggaggaattctacttttattatcagatttctggatggaaactattgttctaataacagacatctttaattccgtttatcttgaaactctcttgtagtttatgttcttccattagtacttgaatgcaagttcttcgtttttgaaatgatgatggcaatattcaacc

SEQ ID NO: 255978 - DNA, 230 bp, Gossypium hirsutum
cttttttttaacctgtaaaaaaccaaatacagtttctctcacttaggatcgcaggtatacgctagcaaatcataaaaaaaaaaaaaccccactactttcttcatgccgcagatctgagctatgcataattgtacatccaaaaaaaaaaaaaccagagttatgtgatccagcactattatgtaatcgaatgttagtttttttttctcaatacaactcttgaagttttttat

SEQ ID NO: 255979 - DNA, 388 bp, Gossypium hirsutum
taaggaactcagaattttctgatgtgaagccattattattacaagaaccatcacaaaagccaattgttgtttcaatggcagcctgtaaacaagaagatattgactccgaccatatcccacaatattacagtgatgagtttcattcttcactgttggaggctgctgattcatcttaccctttcgaaccagaccagtctgatttatcacaagatgaagaagatagcttacatcctcctgcaagttcgtctaattttggtttccctgttgaaggtcatcctttctggtcttggacttattaagttatatatctacaatgcaatccatatgtgtgtatgtgtgtatatgtatatatataaattgagagatcaatcaatggcaccccaatcga

SEQ ID NO: 255980 - DNA, 367 bp, Gossypium hirsutum
gcttcagctcctcttccaattcccaatcccactgctctttctctcttcactttcatttctatcgcctcttttaactcattacatttttttacctttttctcttactagactgcattttttgtgttcgattccaaatgggtttctctttttagttttataaacttgaaggaaaccccactctgctgcagaaagagatctgtttttgtttgaacttgaaacttgaattgtgtcttttgataagtttgaatgtacatggagaagttgatgaggctgattgaaatgactcctttacttctgctgctttttcttcctttagtttttgctggacatgactataaccaagctctgagcaagagcattctgttct

SEQ ID NO: 255981 - DNA, 405 bp, Gossypium hirsutum
taatgaatccccttctactgtcagatttcaaaagcccaactcctcagccaccgtcactgcttggagcctcagccaccgtcactgcttggaggcatgttttcacttccatcgtggtagtgtctgtgttaaaggggttgtggtaagtacacagtgccaaaataagtccttcactatctctgaacatgattcccataactaatttaagcaaataattgttgtaagctgcgtcaaaattgcatttgatcgtgtttgctcttggtggtgaccacattctgttatataaccctgcagatgttgctatttcttttactgtactggtactctctgccttgtatgctttgataaatgttattaccctgtctgtattcatcttttcgccctgatggtggattttatttcttttct

SEQ ID NO: 255982 - DNA, 344 bp, Gossypium hirsutum
tccttgctctctccccctttccttctctttgattttctgctagggtttcaaagaaacccatgattgccgcccttcaaccaccgtaccaccaccggactcgatggctggcgatacaccaaaatgggctcctttagctctccccttttttacttgttggaggctagttccaaaaacgaaaagacaagggttcaaccccctttttagactcaaccacgccgaacggaggggaaggctccgataacgcggctatgggccggatctgatgttggagaggtggaagtggtagacagcatgggagagtgggagcggcgcttgtggcagacaacatgggagaatgggagtgg

SEQ ID NO: 255983 - DNA, 487 bp, Gossypium hirsutum
ttcttaacaaagcttgtagcactgaaacctgggaaacccgtccaggaaatgataaaaaatgtaatgctagggaaagatgaaggtgcagactactctgacactgatgaagaagctaatgccagtagtacgagaccctggggaattgcaggaaggggcactgttacagggagaaaaccacttcctgttcgccccggcatgtttcttgagactgtgacaaaggttttgggtggtatatataatggaaatgtctctggcataacggcacagcatttagaatgggttcatcagaaaacacttcaagttcttctggaaattgcattctaattcttcaagctacttgtaccaaaaattggattacatcataatccgcagtttacatcaaaggagagagatgattccataagtagaggttagagaatcctgctcccaactatgaaatatttatgaaattatgtcatttagaaattgagcaatgttacatgtacat

SEQ ID NO: 255984 - DNA, 399 bp, Gossypium hirsutum
ttccacgcgtccgcccacgcgtccgtctagttctacttctacctgcagctcagcaaagactgctacaaaaaataagaaaagtagtgatctcaaatacgacttattcggatgggtaatccttgctttggcattgttgcatgggttggatttgcaaaatctcagatgccaccttcacagctgccaccaccaccatgataagcacaggatgcaagcaacgccctgacatctaaatgctgtttgcattgattcaaaaagccttaatttatgttagtttagtttttttgaccttattcgtgctcctcagctaatgcttgaaaactagtcatttacagtacaattgctttattcggagaataggtgagtgattgttaacatgaaaaatccatctgttgattattt

SEQ ID NO: 255985 - DNA, 474 bp, Gossypium hirsutum
caaattcagtgcctacctgaaaatgagttcatcacttctagtctttctccgtccttgacattgaatggtagtttgcattcagaaattcctggacttaaagttgagtcatctacaggaatgaatactgatgctcatcaggatggtgatgtggttagtttaaagtccaactcctctctttctgaggaagtttccttctgtgaaaacaattcatgtttacagattgattcagaagttatccgaataaatggtgatgatatggataaggttaattctatagctgtgagaggaaatccagagaatatggataggattagtactctgccatgttcaactgatatgaaggggatttgcaggtctgacaaagatctatttgatgcaaccaactccgaagatatataaaagccaaaagtgcgatgacaattgatgcacagcaattttcatttgttccaagagaaataaatagctgtgagctag

SEQ ID NO: 255986 - DNA, 474 bp, Gossypium hirsutum
tccacgcgtccgcaggatttgcattcgcagcgacaggctctcttgcatgccaataacacgcttcatggagtggatgacaacattggcaagagcaagagaattttgacagccatgtcaaggaggatgaaccggaacaagtggatcattggcatcattattgcagttcttatcatcactattgccgctgttttatacttcaaacgtgttaaataggtagtggcattctgcatcttcaccatcttggctctgggtgtttctgagagtgataagtttattttgtccttgcaatgtgcttcattaatccacagactcggttttattcattcattcatttcaattctatgtggtgaacgttaagaaagaggttgacttcagtccttggatttgggacttccttttaaagattttatcatttatttggaggataatgtggtgtcagacatacaaagaaataaatgttgtttatatacaata

SEQ ID NO: 255987 - DNA, 286 bp, Gossypium hirsutum
ttttttttagaggaaaaaaagaatcttattgaaaatgtcacaagcccaaaaaattaaaacaattaaaacaaacacaatcaatagtcgtacaggtggaatatggttgtcatctcaggtttctttttgaattttacttaatcagttgtgtatatatatatatatatgaacacgtagatttcacagtagtctgcataatggaaactgtatatgattagctagcacttttggagaacttgatgtaggcaacttttaatgattcagagtgttattgttttcttttcttttc

SEQ ID NO: 255988 - DNA, 232 bp, Gossypium hirsutum
tcttaaacaaaccatttatttttcttcagctctatttgactagatcaatggttgacttcaagaaagccactgctgtgattcttacagaggctctgcttgtgaatctcggtctaatgggtgatgctgatggcgatgatgataagaagattcgagtcacgaaacataaaggtgagaaggagtgtatacatggggggcaatggacctactgatccaaatattgttgcaaccaaac

SEQ ID NO: 255989 - DNA, 460 bp, Gossypium hirsutum
ttccacgcgtccgctcctccttatctttctcagagtttttcttgatttttgcctttaccacaaacttaaaagcttcggtttttattttcactttgaaaaacaaaaatggataagattaagactatgatgcgcgctgttcaatacagtaaatatggcggaggagtcgccgatctcaagcaagttgaagttccggttcccagtccaaaaaaggatgaagttttgatcaaagtagagacagctagtattaacccaatcgactggaaactacaggacggggtagctcggccatttttacctcggaaattcccccacattcctggtactttacttttctctggatggttcagctctatgggttaattcgaagcatcaaaacttttctttctgtgattgcttgtttttcaatcatttgcttaacaacatttggtcgagcaggtcccgatgtagctggagaagtcgt

SEQ ID NO: 255990 - DNA, 374 bp, Gossypium hirsutum
  unsure (1)..(374): unsure at all n locations
tgttttgcattcatcaaggatcctgatggttattggatcgaaatctttgatttgaacggaattagacaaatagttaatactttagcttgagttagtacttcaccaagttcaggtagctttttattgcttatcatctttgtacatcattgcaaatcaatctaatacatatcaatgtcaatgtcaatgcaggaaacaatgatatggcatatgttgcagattccagagtctacttccgtacactaaatcatgttttttaaaacttatcgagggacaaatttaagtgaaatcttaattgaagcacatttantttcagttgtgtctatgttttctccatgtttaatatgtataataaacaaagtgaaaataaagtattt

SEQ ID NO: 255991 - DNA, 182 bp, Gossypium hirsutum
ttccacgcgtccgcccacgcgtccgattcctcttccgtcccgtagattccgccagatccatccaagggttcaatctctgagactgagtcttttttaaactgttatggtgcctctcaggggacatgttaggcttttactgtgataaatgacaatgttttgttatagcattagtgcttttgatc

SEQ ID NO: 255992 - DNA, 218 bp, Gossypium hirsutum
cccacgcgtccgggagatatgtcagggcagttgctttggccacaaagcaggtgtagccctgagtgttctcctttacctagtcccagaatgacgagccctggtcccagctctaggatacacagtggtgctgtcacccctttgcatccgcgagcagcaggggctgctgctgagtcacctacaagtcgacctgatgatgggaaacagcaaagccacaggtt

SEQ ID NO: 255993 - DNA, 327 bp, Gossypium hirsutum
cggcgatcctccatgcccatgccacgaatcggggaccggtactacacgaggtgggctccctttggtcctcctccgaacggaggtcgaagacggagccttcgcggcccaccacgacggaagagacgaggaaaggccccgggaggttcgtcggagcacctcaagcagtgtatcggaggtttcagaggccgacggttggctggtgagaaggcgaggcagcgcgtgtggaggaggccgaacggcgcctagggtttccctcttctcctttggctgaaaaatgtttaggatagttgggctagttgggcttcagggttttcttttaattgggta

SEQ ID NO: 255994 - DNA, 456 bp, Gossypium hirsutum
tatcccgaaacccttattttcccctaaatcaaaatttcccctaaaccccaaattgtccccaaatcaaacccatttgccgtctccctttctcttttggttcgacagcaagcagaaagattaagggatttcatttcgaaatcaaacccgactgaaggctagcttttgcgagtccaacaaatcaagttggtcaagaattttagatttacgtttgctgcatcgccttcggtagtctttcgcatcgtcatcggcagccttctgctacatttccgtcggcatccctcttctacatctccgtcggcatccctctgctgcttctccagttttctgtcatccaatttgcttagcttcaatccacattgacttaggtaaggctttgggtcctccattgtggtaattgcgatgaccatgactttcttctttcttcttagatagtgcagcagcatgcctgcacttcct

SEQ ID NO: 255995 - DNA, 287 bp, Gossypium hirsutum
tatcgcgagcggctgccctttttttttttgtttttttttttttttttttttttttgaaattgaaccaagatttattcaaataataaatgccactacaaatatgatcatcataatggttataacgtagaatcagtatcagcacaacaaaactaaggcaatggacaagtacaagatagggtagagagtaccaacaaggagagaagctgagttggcctttgcttttttaactaaataaattttattactttagtatgtatcagcaaattttcatgaggatttggttctta

SEQ ID NO: 255996 - DNA, 443 bp, Gossypium hirsutum
taacaaacggatttaattaatactgtttaggttaggactaaaatttcaaatttcaaaaattaaaaagaatggaaactaaaattgatcaaattaaaataaagatattaaattcacaactttcataaagtacaagaactaataacagaatttaactgattatcatgggataacgaaaattgtttttttttttagttggaattaccatcgaattaatcatcctgttcttaatttttcgatttataatttaggaattgtgcctgattcttctgttggctcctccttggaagcagcaaattctgaagtggagaatgatggtaatcctcctcctcataccctgtttcagggtcactttggaaatgatctccacaagactccataactcaagttaaacattaattagccatttatgtcgtgtcccagccttctatttatttcttgtcatt

SEQ ID NO: 255997 - DNA, 436 bp, Gossypium hirsutum
tcctcacgcgtccgcccacgcgtccggatttcctgatgtttgggggtgaaccaagctgcagttcatctgatggtagctatggcaaagagatgaaacaagaagatcatatgggttttcggggttttggtgcttcattagactatggtaccaacaatggagttaaccaatggattgagaaacaaagtgggcatagtggagaatgcccattagattataaccctgaagatgttaagagactgattagctctaataataactgcttcttcatagatgaaaatgacacacaagataaagctatgtactgctattactactagtgatggaactgcttgcaggaaagatttgatgggtaaggcccaaagctgagggattgaaaagaaaaaaagaaaaaagactttcagtttctggggtaatgtgtactgaatctgatgaaatg

SEQ ID NO: 255998 - DNA, 314 bp, Gossypium hirsutum
tcccacgcgtccgcttgtgttcagtgattgatgaaatgaaagtttggaaagctctaattaggagtaccttggattgaatttaatcttcgttgaaatccgtatcattttgttatctgatctggttttcgatttctatcatctctcttctgttgtttgtttgaatgttcaaagtacttggatgcttccagtcactcaattgaagtacagcacatagtctcgtccaatgctgaagtactcttattcccaggttttttcttctttttaattaatccttttcttttaaaaatcgattatgtttctgtttggttcaatat

SEQ ID NO: 255999 - DNA, 462 bp, Gossypium hirsutum
tcccacgcgtccgctgttgtggtttcgattgtgatttttagaaatccagtttccgttactgggatgctcggttataccctcacggtcttcggggttatactctacagtgaagccaagaaacgaagcaaatgagacatcatcctgggattacggtattggttgtgattgtgatatattttagtgcaaggatatcaacaatgttcaaagaggcaaagtttcggtagcatacaatgctgcggatttgtatgctgcggattttgcgccatagattcctataattttcccatggaaacctgggaagctgctttttcttttgtatcggcaacagctgcgggattttagtcaaaaattagaggaaataccattttatgttcattctttcaggagaaaaaaaggttgtagacatggtctttatacattggttagatttcccatatttcattaattaatggaaaagaaaac

SEQ ID NO: 256000 - DNA, 373 bp, Gossypium hirsutum
cttctcctcagccataacctgtgttttctccctccaagagaccagcccgcctcaaggtatggtgaccgacgctcgcaggcttcgaaacagggtttctttcagccaccgaattccctttgaaccccgatttcgacgaagtaaaagggaatccgcagcctaaactcaaggtaagatctctttttcttttctttttttgaatgtaaaatgacaaaaaaagaagaaggaagaaatagcaaatagaaccgaagaacaaagatcaccttctcaagaagtagctttctgattttcaagcaatgtgtattgcgtatgtattgcgtgtattcgcttatattgccttcgtgaccattacaaagattaaatcgttggctttata

SEQ ID NO: 256001 - DNA, 152 bp, Gossypium hirsutum
tttcttctcgtccgtgaccaaatggctttggaaggagacttgttagggatgtgcggacatttatactgtatttggcatcattgcacgccttgccatcattgatcctgcttccggtgaccaacctctctttaatgaacacaagtctattgttg

SEQ ID NO: 256002 - DNA, 338 bp, Gossypium hirsutum
tatcctctagtagatgccctcctaatgccattaaaatctttatcccctatcaacgccatgaatcttgatcctaatggctgttgcctttgtttgtccttaacctccgccaaaaagtcccttctcccctgccttgaatgtctcttttccaccagcatccatagcccaaattcaggttctttctccttgcttcttgaaccgatggagtcaccgtctgatttgccttcatttgacacatcaacctcggtcgacagcttaccactagccaccgtcgaatttggatctgtttcaaccattgaacacatacgtttgatgtggccatacttgccacaagtgaagca

SEQ ID NO: 256003 - DNA, 400 bp, Gossypium hirsutum
taaaagctttgcggtgagagaaagggaggaagagggcggaagagcagcggtggccggctgtggcaaaattaaatggccacccctctttcctcccatttccctctttctttcttcccttctcaatcaccttccttgggaaagccttttctcttttcttcctctatttctttccccgctcttcgttttctctcttacaccaacctcacgaagctccctagaacctctctcctcgctttctcttctaacaattccggttcttctcctttcaacgatgcttccggttcgaattcttctccttctaagaaatcggttctcaccaatctgatacaggagatcgaaccattggatattagccttatccaaaaagatgtccccccttcaactgtggatgcaatgaaaa

SEQ ID NO: 256004 - DNA, 185 bp, Gossypium hirsutum
tcccacgcgtccggggagataagaaaatggggtggttttaacacatgcactgttacatgtatgacagaagattaccgaaaacttaattctaaaactatctgcatatgcatcatgctaatgatgaatgatatgccgaccattaaagtttcggtactgattgtctaaatgcaagtatgactttaata

SEQ ID NO: 256005 - DNA, 183 bp, Gossypium hirsutum
gtcaccagattagggttacagatgatggcggtacaaatcaaaacatttaacatctaaacagaaactaatatgtaatttaaaatttaacaataaaaaacttaatttaatcatagcataatactcttataagccttaaaccgagtttaagaggccctaaaagtaacttgggaacactgagggacc

SEQ ID NO: 256006 - DNA, 415 bp, Gossypium hirsutum
tcccacgcgtccgaaagaaatgaaagggggaagtgggagcgaagggacgatggtcatggcacttcggtcatggccgattacggcgttcatcggcgctcaacgcctccgccgttgcaccaatccgaagccactcgaactactggtacggggcgtgtgctggcactgggcatgagggtggcgtacggggttgtcgacgtggctgttggaggcgtgggggctgagttcggctgcggcgtgagagaaagaaccctagggttccgaagttgtaatgttctgggcttggtttctgtgccgtttgagtcttagagctttgggttgttttgtaactgggcttgggtattagttatagggtcatgtaattgggcttaggctatgatttggcttgtaaaaggacattaaaatgggctgtttgtgt

SEQ ID NO: 256007 - DNA, 422 bp, Gossypium hirsutum
tcccacgcgtccgaaatttacaaataaattgtatcttatcccttaataaaataattggaaaattttcatataattcttttaaaatttacctatttattatttataataaaaaataaataaataaataaataactacaaacatgtatatcattggagaacctagctagaacttaagaatattgcattgataaggttaaaagggaaggaaatgatttaagatatgatcattataattataataattattgattgttattattagctatttctaaaaagctgtgattgccttgtgttttgtgaatgtctggttgaataatcttggtcttaaaagacactgcaaccatttgtcttgttgtctgtatattatttgcctgtaatttggtaatagttataataatattaatctcaatttttatttcaaa

SEQ ID NO: 256008 - DNA, 162 bp, Gossypium hirsutum
gttatgttaacttttccgatccgaatccaagtgccgttccacagcatgagtgtgtgtcgaagaatgcccaaaagaagctgttgaagcatccgaagtacgaggcgagtaaagccgcgaagaaagcacaaatgagagagcacacacagagggatgcggagagga

SEQ ID NO: 256009 - DNA, 436 bp, Gossypium hirsutum
cctacgcgtccggtgggatgaccaaatccaggttgtttggctatgggtcagtcactcgaggaagctaatatgcatcggccatcagtacattaattgaagagatgaatgctaagcatgtcgagcaaatacaaacaattcaagctgaacaagcagttcgagagaaaactctactcgaggaagcaaaatctcgatttcgtatggaggttgcagagcgagaagctcgtttgatagctgaggcagaagaaagatttatgaaattaactgaaattcgagaggcaaagctcatggatatgtttgatgctcgtgagaaaaagtatgaggctctcatcaatgagtgtatggcaaaaggaatgccaattgaatttcaaagtagccgacatgaagataaagccttcagttcgaatgatgatgaatgaggcttgctgcatattatgca

SEQ ID NO: 256010 - DNA, 346 bp, Gossypium hirsutum
tcgattaatctaaggaagttttgtgaggctaaggataatagcttgaatgctaaagatgaagaaataaagatgctgatgaaaaaggttgaagcattctcaagagccatggaaatggagtctaaacgagtgaagaaggaaacacaacttgttaaagaaaagaagaatggatcacccaaaatggaggataccaaaaaggtgaaaaacaataactgtagaaggtcttgaagattggcaatggaattcatttgattggttggatatgattgagagtgtaaatagtgacttataatgttgttttttggatgataattagcttacttaaaataaagttggttgcgaatgatga

SEQ ID NO: 256011 - DNA, 269 bp, Gossypium hirsutum
taaaaagcacaagaaagttatattgtgaagataaaactcaaagagttgaaaaactttattcaatgaatgtgtttaatgaataatgaagatacctttatataggctagctaattaatcaaaataaagctcttaactataatgaaactttaattaatctaaacaagaagtagttctaatgaactaaactttcttattgactaagaaacataaaactcctaaacaacttcaaatacttgaaaatttcctaaaatttggaataaataagttat

SEQ ID NO: 256012 - DNA, 196 bp, Gossypium hirsutum
tttgttattgttggcaaatttagtgcttgctcggcaaaatagaagggtacttggaaacatttggattctatgcgtttttttttggctgtttgtactgttcttaaaaaacacttgaaattcatcatcgtttatatcactccgctattgtttgtactgtagaaagaaaacttttttaagttcatggaaattttgggtc

SEQ ID NO: 256013 - DNA, 439 bp, Gossypium hirsutum
  unsure (1)..(439): unsure at all n locations
tcggtatcaattgacataagcacatcttactttgttgcttggaccatccggatagtggctgctatcatgatgcttcagagttctatggatcccatccttgcagtagaggcatttttatctggaataatgctctcatcagttttgtgtaaagtcactcgattgagattcctgcgccgtgtgtacaagaagctgttcaagttagccaaagtcattggaagaaacactcaaattcctgatttatcactagatctatattctcatgacgaatatacgtacaggaagcctgaagactctaatttccttaatcgacggtctaagcatttaccccttgcttcttgcaatacttctcttctaggaactaccaagacatctncgagtcagctgtcagatacagactctttcccatccacctttcacaacacaccagagaggagaaatt

SEQ ID NO: 256014 - DNA, 182 bp, Gossypium hirsutum
tcgctacgcgtccgaccgaatcggagccgtagtgggattgatggaactatggaatgacaatgagaggtttgagaataacagttgatgccatatgtgtgtattttaggttactgtaaatagggataaaaccagaaatttattttaggagtatcaagattaaattatatatttttaaggggatt

SEQ ID NO: 256015 - DNA, 190 bp, Gossypium hirsutum
tttggtttttggaaaagtcaagcagttattaaagactctgactgctttctatgttctgtcatataacctataggctatagtattcaattgtacttaactaattgcttgtgtgcgtgtatattgtaaagttcacccctatttcctctcatattacttcatgatcaataagatctaagaaagatggtttatt

SEQ ID NO: 256016 - DNA, 399 bp, Gossypium hirsutum
tgtgtgatcgaagcgtgaccggaatggccggctaaaaaagaacagccaaaaatcgaccggagttgaaacagttaaagagaaaacgacgggcaaaagaagcggtttattttcaagttttcgtgctattttcaggtccagtgggaaagcaagtgaatcagacgcgcttccagtagcccagtggccgccagggaatagggacattaggtctcgtttgccaccagatgatcgtgacgcaatatcgatggagcctgaaattatggagagtgaaccggtcagtctaggtggaatgaagcggttcgcatccggtaggagatcggagccgttaatctgaggtgcgtgatggcagttgtggggcacagcttaagcgcgggttggtctgcggtcgtagttgggtaactt

SEQ ID NO: 256017 - DNA, 261 bp, Gossypium hirsutum
tcggttcgcattatgtttatattgtcaacttcaggttcatttgttgaaacgccagccttgtagggcggaggccgacaaaacaaaactaattgaaagtgtggaatggtgattttaagaagctactgactgattggttctaagtaatttaaagattggctcattgtactgctagggcacatctctggattctactcttctaatgtacaggttgtaaattgatattctgctgaatgcaaaagatttgtgaagacatgttctttc

SEQ ID NO: 256018 - DNA, 333 bp, Gossypium hirsutum
cttactcgtacgattattgagaaattggttatgtgtattggcttaagataaaagcccttcattttgtattaagcctagataatcgctattatttattttggtaaatgcatatgatgatccttctatgaatgaattgatgtcttttgggatagaattagtatattgaaatgatcttgtgcaggttgtgcaaaatgagtgacaaaatgggctggaagataccctagtttgtccacatgggcaagacacatgggcgtgtgtctaggccgtgtgtgacacacggctcacccccatgggtgtgtgttatggccgagcgtaccctgcacttaaactttt

SEQ ID NO: 256019 - DNA, 209 bp, Gossypium hirsutum
ccgccactgctaaagatttgtcggctaaggagtgcttgccatgcaacacgaatgatctacgggccatgactgaagaaactgcaagtaaactaattccaaaggtggatggatggaatatggcaaatgaagggggtacattgaagctaaaaaggtcttggaaagttaagagtttcaccaaaggactggagatgtttcagcttatatctgat

SEQ ID NO: 256020 - DNA, 417 bp, Gossypium hirsutum
gttcgcatcggggttgcccgggttctcccctctgctgtggtgtggtgtttcccgctcttttatttttttttctttctcttttctcgctttccactgtttttcctttgatactctgcaccattcgggatggattcatgatccaattcatcatcaccatcatcatggtctacatggaataagctcatgatctccaaaccatcgatcgcaaggccaaggtattctttacatatttaaaaccaaaatttgccctatctaattttacttttaaaatttaaatatgttttctaatctaactattgtcattacttttcaacatatttttttcttattaaaaatcactcataaatttttttgaaaggaattcactaattatttaattaaaaataaatccatttataattatatttactatctttg

SEQ ID NO: 256021 - DNA, 414 bp, Gossypium hirsutum
tcgctttacacgcgacatcgtttagcgcgtatcagcaagatcaacaccggatttatgttgtactatacatcacgttgaaaggaccttttcgtaattttaactcaacctccattctcagggtaactaaaaaccatttttttccctctcgttctgaaaaccagagagagaagagaaagagaaaaaaggcaaaaaggcgcaaatccaacaccgttactctttgctttgctaacttacgcttctgctattctacgcacctttctgttcacctttttcccttctttctctctctctctctctaggatttttttttcctttttttctttttttgtcgttctctcactaagacctccgcaatgaggaggagactcgcggctctcttcttcatttgcgatctctttgtgttgttcggtttcg

SEQ ID NO: 256022 - DNA, 367 bp, Gossypium hirsutum
cctacgtttccgaagaactttgggtttcttttgtttcttagataaacaaaaaatatggaggagaatatgtgaaaaagtgtatggagaagaagaaagagaatttaatttccatggcgaatttaaggttttccgatgagaatccgtcggcggtggcagcagcagcagcagcagcagcagcgaccagtttcggtggaagcatctttgacatggcaactggagcaggggcatgtgatggagatactaagtgggggtcttctttaggtcatggacttgcttggcatccatcaagatttcattgccccttctttattcgatttctttcagccaccaccgattttttcaccaccacctcccttaacatcatctg

SEQ ID NO: 256023 - DNA, 164 bp, Gossypium hirsutum
ttgtgtctccttgataacaacacacaaaatggaaggccaagattctctgagcagatgaaattggacacagagacttctggttttttttcaggacatcgaggtggacgtggtggtcgctttgggggtggttatcatggaagagggtatgggcatgtggggagggg

SEQ ID NO: 256024 - DNA, 342 bp, Gossypium hirsutum
tcgtttaagcaaagaaaaagaagatgcaagagaagagcaaatcaaagaaaggaaagggtctgaatcattgaagtcaggctatgatcccgacgtataacaagttccagcttttcaaaaggaactccagcaggtaccaaacaggaaatagtgtttcattaaatccattgaaatgaaaatagggaaatagataattggagctgtgctccattcccttctatcacaggaaaattccattgtgggggcataaaacaggtggaaagaaatgtgatttggttgggaattggggggatgctacaatctttggattactgatttatatattttacttgtgactaacttttg

SEQ ID NO: 256025 - DNA, 209 bp, Gossypium hirsutum
gtttctttatctggatataaaatttgtcatatgctttgcttcccaaggtcggggcctatcaaggaaattgcatagagttgttaacgacataattgctaaagccatggctgcatttgctgccacagggatggatccatatggagtgctgcctgacgatgagtggttcaacgaaatttgtcaagatgcaatcgaaagattaagtggaaaat

SEQ ID NO: 256026 - DNA, 292 bp, Gossypium hirsutum
cttggagcaacagacggaggcgcacacgtgtgggggtgcagcacgcgcgaggagagctgtgattttccttctgcagcgactgaagggttctagaaaccctaaggtttctggaacactcttccgaagtgggctaattgggctgagttgggttttgggctttgaatcgggtttaggtattgtattgggtttgggtatttaatttaggcttaatgtaatctgggttttgggttaataacttgtattggactgtattatttggacagtttttattggatttttaattttatttttc

SEQ ID NO: 256027 - DNA, 275 bp, Gossypium hirsutum
  unsure (1)..(275): unsure at all n locations
ggggnnnggggggaaaaaaaatcaagaaatctaaaacatatttcaattatagtactcagtttgactggttcgatggaaaattttcatttgtgcgcctgccccataacttcgatagatatatgcttcggttgtttttatggctaagaacaggggaaaatgtaggcccttggttcaactttcaggtaatttataattacgttgggtttgaagttaaaaagcattacacttaacagtaatacagaaaaaaagattacaccataaaagaagatgccata

SEQ ID NO: 256028 - DNA, 388 bp, Gossypium hirsutum
cccttgcgtccgcccacgcgtccgatttggccagctttttatcttctcctttatttctcattttccaaatccaccaaaccttccaaattagtcaacagatcaaatctggaacccaatttgcctttctcccttatattcattttaatcagattattattccgagaattgctctatgctttccttttgaccaccatccatggcccgtaaacaacgccttctcctcctttccccacctccgtcggagtaacattcatttggtccttctccggtgcgagctccgattgcagcgaagcacataactccttagtatgaccgtgcttccagcatgtgaagcaaatagtcggcaacgcttcatattcaactctctggttcatgccattcacaagga

SEQ ID NO: 256029 - DNA, 319 bp, Gossypium hirsutum
cccacgcgtccggcctgcttctttggctgtttcttgttcaagcatgcaatgtaaaagcagcaatctcatgctagggaacgttacagtgcagcaaagtagtgctggatgcaatgtcacttcttgtgcttatagtggttatgcaaatggcaccattatcacttcgttgtcatcatctctccaacctcgatgtccaggaccacagcaatttcctccccttgtagccccacctacatatgtaactcgggattcagtttttgccccagcacctgcaccccagtcagatggtgccaccaccgcaacagtgcccaagacttctaca

SEQ ID NO: 256030 - DNA, 164 bp, Gossypium hirsutum
ctttttgatatgactgcaggaatcactgaaagccagacatggctcccaacactgttgcatacactgctgtatttgttaccttgaacttgacgttgtacactttggttagcactacctacaggcctagctaaccaccacgaaagagacacacgcctacccacaaa

SEQ ID NO: 256031 - DNA, 175 bp, Gossypium hirsutum
tgatccgagattcattttatctcatcaatacctgcaataagttattcagtttgtacttatttcggacttctttctcatttgcactgtgaacactttgtctagatgtgttgattttggattgtcagataactagcataaaagttatttaatatataagagagaaaaattttatctt

SEQ ID NO: 256032 - DNA, 412 bp, Gossypium hirsutum
ccttttcgtccgattaaattgaagatggatgatactgctgaattgtatggatttgatgatgacaaggacgagaacaagtttgacatcaagaaaattgcaagtgaaaactggattgagcccccaaaaagagagcagaagcgaaaggaagagtctgcctggcatttgctaatgaggtactgtgctggctttacggaacagtcaaagagaatgaggactacatactacaattcgcaccaccattcaaccgattggagcttctacaagcacaatcttgccctgatgcgattactaatcacgttgaacaatcgtcagttctcattaggaaaattcctagagatttgacagaggcatcgatatcgggtgcatggttgtccattgcaactgcattggctatgatatttttatttggaat

SEQ ID NO: 256033 - DNA, 316 bp, Gossypium hirsutum
cttgtcttcgaggaatgagaaagatagtggcaagccgaaccccgtaagaatgaccgtggcactagtaatcttgggtgtggtgtgtcttgtcggacttttgctgacttattttcttacacgggaaaccacgggaaggtcccttgaggacaatgagatctatgaagatgaacttatatataatacatagaatttctaataaagtttttaaaccccacaagtaaattttaggaataaaatattaaaaaaaagacacacatcataatgtttaaaagttatcaatgtatcaaatactaatcaatgtatgtgttaatataat

SEQ ID NO: 256034 - DNA, 462 bp, Gossypium hirsutum
cctatcgcgtccgaaattattagagcagcatacaatttatctttcttggatacaaacagattgttcataaaagctcaaacactgaggtagattagtggcatcatcgggttttaatattccaattcatcttgaattgaatgcctttcccacctttgccttaatctaattcaaaaacagacagacgattgctttgtttttctacttcaaatggttgggtttttctttcgtcgtattttgcagcatcgctctcaaatcctattggtcagtttctcctcttttcacttttactgttactggcttcttcttctaccataacaatgatgagcaaatttataataaataaaaaattgctggtggaattgaacttatggatactttattgtggaaacagggacaacgactaagagctatgagatttagattgggaagggagagaaggcgtaatatgcgtgcgacggaatt

SEQ ID NO: 256035 - DNA, 430 bp, Gossypium hirsutum
attgttatataccctggtgttatatattccctggctcagtaccgatacatgcctggatacccacgagtcgatgcacaaaacacgtatctgataacgagatacgacgggactgtcatcaatgcccaaccttggggttacggaggtgaaacacgtgaattatgggatggctcgaaaatgctagatgcaaagctcaacacggatgcaacagagaaaggctcggatcggttttggaaaatgcttagcaagcctttggagagctcgcgagtggggaatggtgaagttttggaacgtaggaaccctttagccttggcacattttgccaatcaccctgctaaagatacggtgccaaacgtgatgatctgtccttacgacttcccgctgactgagaaagacatgagagcttacattccaaatttatcatttggaaacg

SEQ ID NO: 256036 - DNA, 290 bp, Gossypium hirsutum
ccctctcgtccgcccacgcgtccggaaaatccctaatttgtttacttgctagcttattcttcttcttgctgccgacaaatcgagtttgggatttgggaatttgcgattgggaatttcaagttaccaaatttccggccaaagcttgggaaaaaatgactgattacgaagaaccgcggtatcaaggaaacggagataatctcgaaaacagttatggcggaggttcttctcctaagtctcgttccgacgatcaaaacgattctaaatatcaggattatgagagagagtcttct

SEQ ID NO: 256037 - DNA, 437 bp, Gossypium hirsutum
cgtttgagcaaaggagaatcaatcttgaagcaagtaatcagcaaggtcagatgggatggttgtcatggggaacttcattggtgagtaacgccatctctggggtttcccaaagtgttggggaatacctgagtgggccaaaggctagggatccgtatctggatcaacaactgtgatctcttggtgctcgatgtgtagctgtttcaagagattccagtagccaaataagagtagcttagcaactacaagatttgtgtatatatgctctgtaataatgaggataccccggatatacatgcgtgggagctgaatagacgcaatgtgatttgtgtatagtggcttcaaagccgtcgttgggtttggctcctttaagctgctaactccaaaataaataggttgttttcttaaacttgacaatgtagttgagtgtttttattttc

SEQ ID NO: 256038 - DNA, 283 bp, Gossypium hirsutum
cttttactgatattgtcatagtatgccaatgctgctttcttcttctgctttttctgttttcgaatcttcacttcttgtgttttcatatgggattccaactcataatcaacaatgtggactgaacttgtaaacatatttctggaattttttttcttcctttttttaataccattaagctacttgtaaagtttcatttgtattattatgatgaatattgatttgggtacaatattgataaacttcaaatattaatagtattatctcataaattttttttcttttc

SEQ ID NO: 256039 - DNA, 318 bp, Gossypium hirsutum
ctttctcgtggggttgggttgaattacatatgccgttacgagcagcagcaaaacgcattgttggattgtgcaagcagtttcgatttcgaggactgcatggaatggcagatgaaatatggaaatttgtacattgattaattacgaagttcgaatattacaaatacatgtagagatttgtagactatttttcttgaccctcgtagttcaacaagatgttaatatctcagttacgcatggaaaggctttccctgtaatcaaagcttgaaatagattaatgtatccacttttgaaggtatgggaaatctttacttctttagt

SEQ ID NO: 256040 - DNA, 419 bp, Gossypium hirsutum
ttttcagtgcccatgttgtgaggctgtacctaagggacctcagggatgctcaagccaaggctagaggaaatgcttataccttttgaagaataagatgataaatgacgataatgatgaaagcatttggattggacgttgttgtaggaaacaatttgggtggtcctgctgcggaatccctgtatgcattgtctgtgatgaactagatttatgttgttggtcactgccactggcattggagtaatgtacatttaatttacatcttgtttctgtcttaacgaatcagagtactggaagaaaatttgaaggctgttctatttactttcttgaaatcttatttcatcttaaagttattatgatttatgataaaaggggttggaccacaaaatgtggtgagggaaaatcctcacacgtaattagct

SEQ ID NO: 256041 - DNA, 377 bp, Gossypium hirsutum
cattattccaccttcggtcttcgacggcttcacccatttctagaatcagaggttagagcggtgcttctacgtcttctacctttgaatttcaaatggcccctcctcctctttgcctgcttagtcttgagttgattttttgcaatatcaaagagaaagagttgtcttctttcgaaagtgatgctagtgaggataaagacatgatcatcacactcccaaaaatcaaagagttgaacttgaatgtgattaacaacatatggaagcaagactccccatctcgtgatatatgactccttgttattacagaatgttgaaccgtctgaagaaaagcatgaagatagcctttaattgcatgaagctgggctaatcggacaaaaaca

SEQ ID NO: 256042 - DNA, 410 bp, Gossypium hirsutum
tttttgctttagggctgaaaggccggcatgaaggtccgatcatggctagctacatgcacaaccagcagctgcgccactttaacccacgactccaccatcccgttccctaaaaaaccaccgcgcttatcggaacattaggtttccgatagttcctccgataatcgagggagcgccacctcatcttcagcttcttcaagtgacacgagctacagcagcctccctagcaacccttccctccagactctgccatctgtaccttccttacagcttttccctgataccttagtcttttccgtctctgacatcagcgtttcttcaattatgcctctacccaaccacccgatcacctgcgttgcggttcagggtaactacttgtatgttgcttctgttaacgaaattagcgtctacga

SEQ ID NO: 256043 - DNA, 169 bp, Gossypium hirsutum
tttttattagttaattaatatagacaaccttctcataaatgctccaacatatagttatagctttaatagatgcacttccactttaacacatgctataccgcttctccacgaggctgctcgatcttctcgatgtttttcaataccctaaatgatataagtgtagaagcat

SEQ ID NO: 256044 - DNA, 312 bp, Gossypium hirsutum
  unsure (1)..(312): unsure at all n locations
tcttcttcctcatattgaactccgctcccatccaacgtaggcaagaaatctttttttcagaaatgttttcatgtgctccacatttcacttctttgaatttctctgaaatgttctaccctaagattataagctctatttgttcgccaaaggcggattttaaagtatttgcttctgcatcgaatgttaatgaggcgcccaattatataccagctgctcctattcttctccctgatggtngatggagtttggaagcagattccgggaggagttacagctgctaagggatttaaagcttcgggcttatatggtgga

SEQ ID NO: 256045 - DNA, 245 bp, Gossypium hirsutum
gagatcatagatttttcctctcgctttttgttcagagcaaaaaaaaaaatggcgttgcgacccatagataatgcactccccatcgtaccagacggtctcagacccaagaaacaagccaaagtgtcgattcaaccccagaaaaaagcttccgagatcagcgtaaacgatgagaacaaagctcctttaccgcaacccatagatgcctccgttgattatgtcgcttccgaggatctcaaaccctttca

SEQ ID NO: 256046 - DNA, 170 bp, Gossypium hirsutum
ctggacgtctgtgcttttcttatttttaccaagttattattattcctcttcaaaatttgatgtggttttatttgaagtttgtttagcaagaggagatggattttgctatatccgatgaactattggggactatcgttccgattgttgtttactggatttattcaggaata

SEQ ID NO: 256047 - DNA, 135 bp, Gossypium hirsutum
gtggagacgccgcggtcttataattctacggatttgagcggtgataacaacaggaaaagcaacggcgaagtatcagctgctcagaaattgcttttcacttcgacgagaagcttgtccgtttcgtttcagggagag

SEQ ID NO: 256048 - DNA, 168 bp, Gossypium hirsutum
aaagcagaacccaatccgccggctgctgtttcttgctgacgcatcctttcaattctcaatggacccagtattccacgttgaagtcgcccctactctttccttcgccctccgcgcctccgcctcaagatcccctccgctcccttccttccccatgaccgtcttttctct

SEQ ID NO: 256049 - DNA, 414 bp, Gossypium hirsutum
tcccacgcgtccgcccacgcgtccgcccacgcgttcgcccacgcgtccgaaaggattaaaacttagatgtataagtagctatccgaacatacgacacacctgagagattcaggcagacatcacccttccatccatagcttgtgggctggctagcatggttgaaacactcaagagcattgtttctgcacgaggtgactgaaaatttcatttgaatttgcttctgtcggtataatatctgtcaaccgagccgatcatttatgcaggttatttatggaaacgggagatctagtataatagatgtcgggttatataatttttactatggcttggctatctcatacatgattgagacatttttgctcatgtttttatgagttgatgtctgaatgtcttaaagccgagccaagctttcac

SEQ ID NO: 256050 - DNA, 251 bp, Gossypium hirsutum
ttctacaataacaggtgcgttttttttttttgagttagattattggagattattggccttttaatgggtgatatgaaaattgtatcgtggaatattaggggactaggtttagatgttaaagtagccatggtaaatagattagttaaaatacacagggtgaatatatgtttcttacgggaaataaagttagaggaagtgtcaggggatttagttagaagaatttggggtgacaataattttgattttagatt

SEQ ID NO: 256051 - DNA, 335 bp, Gossypium hirsutum
ttgattccaacaaaaaaaccttccaattttcctcttcacccatctcaaatcttcaatttttctttgccttttggtgatcatcttctccactcacacaaattggtagctttaattgtatagaatgaaattaagtgcaagtgaggatgatttagggtcagacattcatgttccagcagatatagattggcatatgcttgataaatccaagttcttcttcctcggtgcagcttttttttcaggtgcatcagctggtctttaccctgcaatggtgttaaaaacccgacaacaagtttcatccactcaaatctcttgcttcaaaatgtctttctctatta

SEQ ID NO: 256052 - DNA, 131 bp, Gossypium hirsutum
tcacgcgtccgcttttctttttcatcattcatggttgaccgagaccgtgaccggtgaccgcaaccagcctcaagagattcagctacttgaccctccaccccactaccgacaaacagaaccatcaagcaccc

SEQ ID NO: 256053 - DNA, 286 bp, Gossypium hirsutum
tctattaaatggcggcttctatcggcagtgtttttttctttctaaaccattctggaggtatccccatgtactacatcgcatttcacaagtatgcgaatcaaggattctacaagaatgaatttgaaggattaagtttccccggcaatcaagttgggggacctcccaccattactggtgatgaagtcttgagaagcttttggcaagctgaaatgggatactctaaatggattgaacttgcaatcttgtttggcatggtggttgtataccgtctcatgttctggggaat

SEQ ID NO: 256054 - DNA, 256 bp, Gossypium hirsutum
tcccacgcgtccggattcttcactctgtgtgctacccatcaatcaatcctcacccacctcctgttttcttcttttccttccttctcttttcttcctgtcatacatagtaagccgttcctcactttgtcaagccttcacttttctttgctttgctttgcttttctgtgttcctcactgtctctgtgtatatagccccaaagtgcatgtttcatccaatcccaccactttccacttcacccctcttcttggcccatct

SEQ ID NO: 256055 - DNA, 105 bp, Gossypium hirsutum
tctttctataagctaagaagctccttttgctgaccaaaccttctcctgtcatccttgaacttgatcctctttatcctctgtgcagccgctcttgcttacattatc

SEQ ID NO: 256056 - DNA, 214 bp, Gossypium hirsutum
aacgcaacacaaaaacagtcttcatggtcaataactggcctattttaattgctatacactagcttacttcatggaattgtcattatgaagcatcaacgttggactagcgggtcggcaccttcttcagctgcccaatctgccacagccaacgatcccaacattgcccacaacgcaaccatgtttgccatatcctagcatgccgtatcccactacc

SEQ ID NO: 256057 - DNA, 171 bp, Gossypium hirsutum
tgttcgcttggtcccaggggagcacacgtatggaatggagaggtttgggcgctttattatcccgactaaaggggtgcatgatgctaactgagggggtggccggtgggcttaaatgacaagtccatgatttgaaagtctgatctgatatacaatcactgtagtgtaccatac

SEQ ID NO: 256058 - DNA, 231 bp, Gossypium hirsutum
ttattaaaataagcttttttctggttttcccttattttgtcttgtttttgtttcttggtgtgggatatgagtgttttccattttgcctcgtgggtttttggattgaactttaagaattatgcgttgaacggtcgtaaatttttggcgaagagagaagaaacttgtttcttcattgtttatcaaagcagagcaggcttgagttttctttatgtttgcagggagagagtggaa

SEQ ID NO: 256059 - DNA, 406 bp, Gossypium hirsutum
  unsure (1)..(406): unsure at all n locations
tcggacgcgtgggcggacgcgtgggcggacgcgtgggcggacgcgtggggtcggcctcgttgggtctttgtcttcgtattctcaactgtgagtttcatcctttggtatgtatcctgtggtctcttgactgtgctctgggcgcttgccattgcactccttgccactatcctccatgcaagttttagaacacctaacctgaaggctcgtcttaacactttccgtgaggagttccgtgcagtttggcgcaattacagtgagctgtagctcatatagcctatagcatctcttgaacatttggtgtagtaaatcatgggactgcttcaaaaattttcttgtcatgggantggtgttcctcaggcagagaaggaaggttgcgataatgtggaaactcgtacaacatgttatt

SEQ ID NO: 256060 - DNA, 163 bp, Gossypium hirsutum
tcccacgcgtccgaacccttcaaacttcttaggtcccaatctgcaattaaaccctttagtatatggtactatctatgccttcccttttatgtcttccctttatggctccagttttctcttcgtttcttgctttaactctcattattccattaagcaatgctca

SEQ ID NO: 256061 - DNA, 105 bp, Gossypium hirsutum
ttcttgacaaacccagagccaaaagaccggccaaggtattgctgcccatcgcgctatgagaggccccatgacttgactgtgctacacgcatggtgaagaacccgc

SEQ ID NO: 256062 - DNA, 367 bp, Gossypium hirsutum
tcctacgcgtccgaaaatgcaccccttgccagcagcaagtcccatctccgccgccaccgtctccaccgccgcctgcatcttcgccacctcctcccgctaataaccccaactactgcccaccacctccatctccacccacctctagtggtggtggcagctactactactctccaccaccaccagctcaatccgggggtaacaacaacaacaactatgctcccccaccgcctggtggtgtcattggcggcatgtactaccctccaccgacgtacaaaaactacccaacaccgccagctgagaaccccattgctccttacttcccattttattaccacactccatgacccccttcagggtctgaaaagct

SEQ ID NO: 256063 - DNA, 444 bp, Gossypium hirsutum
cccacgcgtccgaaagatggtagtgaaggttaccatgaagggcgagaaatcccggtctaaggcgttgaaaattgtagttggtctctcaggggtggagtcggcttcgttgaaaggcgatgacaagagccaaatagaggtaacaggggatggtgtggatgcagttaagctaaccagtctgctaaggaagggcgtggggtacgccgagctggtcagcgtcagtgccgctgataagaaggatgataagaaagacgagacgaagctaccgccacccttctactattatcagtgtcaaccggtgcctccgtacggatacgtcgaaaactatggaccctcttgctacatcttgtaatcacagacacacgaaattttacacttcacagtcgacaacaacatatatatattacttggcttaaattcctcagttcctgttcatctcaaaattag

SEQ ID NO: 256064 - DNA, 310 bp, Gossypium hirsutum
cccacgcgtccgcccacgcgtccgcatcaaattattactctgatagctccgcagtagttctaagcaatgtgggttcctcttcatcttcttcaacagttttggagtcagctccagttgcaggtggagaactgggttactggaatccctcattttcatcatcatggtctgatctcccaacaactaatggtgcatatccgtaaagaacccttttccccccctttcattttatctcagcttttaattaatatgctagtggtcgttgcagtgcattctggtatatggatatatatatatatgtggctgtagggta

SEQ ID NO: 256065 - DNA, 328 bp, Gossypium hirsutum
tcttcacgcgtccgcccacgcgtccgggctacgaaaactcaaagaatcgaaggagaacctcaacccccccttttgggtccgatgtcggcgatggaaaagtgttctccgacacgcgaccaagagatccaaggtatgggcgtgtcagacgcatggagggagcatatgctggtggtggtgcgcgaggcggccattggttggccgagtgtgctgttgaggcttgagggctgctgctgttttctcttctctgcagggggctaggatttgggctttagggtttgtatttaattgggttcggtggtctagtctgggccgggcataattgggccta

SEQ ID NO: 256066 - DNA, 265 bp, Gossypium hirsutum
tctctctgctagggttatgaaccctaaccttggcgccgtcagcccgtcgatcgagaggaaaaaaggctctcctctcctccttttgggtctgacttcagcaacggagagagtctccggcgacacaatcacagggattccaggtgtcagaggcacgtggaggcaagccaagcggtggtggcgcgcgtggtggccttgctggcgaggagcgacggctgaaggcttggcggctaggtttttttgtctgccgaaaattttgaagatagtg

SEQ ID NO: 256067 - DNA, 355 bp, Gossypium hirsutum
gttcacgttcgggatcgcgttcggatcaaggcaatcttttttcttcgacagttcgtttcagttgtctccttgcgaccgccgcctctctctctccaactccaattctcctgtcgctctctttagacctaaagttgacgagatatctctcctcaccatcaacgggtcttccttctctccggactccgttggtgggtatatggttgcattttctggtcgaaaatacgctgcaaggtccctgcccgcttttgtcgcaaacagttcatacactgtaacaagcttcactcttgtgcttgagtttaagaaaggaaggttgcaaaacttgttttggaaaagggatgggatgtgctcaatgctc

SEQ ID NO: 256068 - DNA, 361 bp, Gossypium hirsutum
ctcattctccttccctgttgttctcttatttcttgctgtcagttgagttgtttgctacccatttttgacaaagcaagggtctgtaatggcatcacctgaggttggcagagataaatctccatttatgcttcaacccaaatctctgccttctccggtctcaaaatcctcaaaaacaagctcctttaatgctcaaataatcctcagggttttcgctgctgctttcacattggctgccatctgtattatgaccacaagctcccaatccttccctctactcggcttcactattaaagctcactatagcgactcatctgctatgaggtttttacttgtgacagacgctactgtatgcgccttctct

SEQ ID NO: 256069 - DNA, 148 bp, Gossypium hirsutum
gtggtctgtctctctctgtctgacattacgagaaggggtttttatttcaagaattcatgatgcaaaaaggggggcctctgccaaaagttgtccaatgggctgacacagagccggcatctgctgggatattactgggatccttaacaag

SEQ ID NO: 256070 - DNA, 351 bp, Gossypium hirsutum
aaaaatgtccccgggggaggttttggctgtgcagtttgtcttacctcttctttcggacttggcaattttcaaaagggaaacaaaaatgattatcaaagaaaactaaaggcgggagtggaaacgaaataattgcttttatctttttcattttaaaggtcattatagcatttttaatagatataactgtggtttcaggttttgagtgctccatatcttcaaacctcgccgacaaataatatgcaggcaagcattaaaccggcccaggtacagaaagaagattaattatgccttgaactgctccttacttgggtttacttctcgtgttaaaaacactagtcatccctatttatg

SEQ ID NO: 256071 - DNA, 271 bp, Gossypium hirsutum
caaatataagctagaagttttcatcgagtctcctacatcccactgcggtttttccaacgataagttgggtaaagttcagtatcgagtaatgttcctgccatgaaagaaggtaatcatttcaagcttttcgaattcaagctatagatgatctgattgcttctgttctaacttctcgcagtttttaattttgctcccttatggccttgtagagttatttttgttacaatttgttgcacgcttcttgaattgaattattgagaggatgttttca

SEQ ID NO: 256072 - DNA, 303 bp, Gossypium hirsutum
cgaatatgaggatgactatgatgatgaaaatgatagcatgagtgcagacatcgcggcaaacatgatggtggatgtaccgaactcttagtcaagattgaatccagttagtatgcttacagaagagccaaagcaaaaccagtcagctgaagctgaagacggatgggttgtagtttcatcccggaaaaacaaaggtagaaggaattaagctataatttttgttacccatgctccctattcctggtatatacatgttttctatagacatttttggtgctctaattattagtgtttgtaacttttttt

SEQ ID NO: 256073 - DNA, 442 bp, Gossypium hirsutum
ctttcacttataactttacagcttagggaactgaaaaatgaccaacctcgagcttctgatgttgaggaagatcggtaccaagtgctgttaggacggagacagaatttcaaactgcatgcatttgtagctattttatcattcctcgtatttggcttggttcctcctgtcgtctatggcttctcgtttcgcaatagcgatgataaagacttcaagctagcagcaatggccggtgcttctctaatatgcatcattttgcttgcactagggaaaggtcatgttagaaaaccaaaccgagcttatttcccaactgtattttattacctcagccttgggataacggcgtctggcatctcatacgtagttggtcaactgttgaaaaaactcgccgagcagctcggtttgtttgactcgagttcaactgtcagcatgccgtttttggaga

SEQ ID NO: 256074 - DNA, 392 bp, Gossypium hirsutum
acgcccacgcgtccgaccacgcgtccgacgcgagcaaagagtcaacgcttggattaacgcataaacacctcggagaacatggagggggctagagaactaatccggcaatctcactgttcttgcttctacattgactcccaaccgatgtcacacactggaggagaagtcagctcacaaaacatgacccaaacggacgatattggttacgatgcgattttggttcttctctccatggctgttttcattcttggtgtcgtcctcatcatcatcatctgcaggaagaaaccacaaaagcccgatcagaaacaattagagctccccgccaagttttgtgccagctcctatcagttaaccgacatagatgcagcgacagatggctttaaccctagaag

SEQ ID NO: 256075 - DNA, 371 bp, Gossypium hirsutum
  unsure (1)..(371): unsure at all n locations
tggaaacctacaaactcatttctatccttctttccttcgcaattattgcattctccacttctgcaagaatgcttgatgagcaaccctcgaatccggtcgtgccacctgttgctacggccaccccaatagtcccacagcctaatcctactggagccgttgttggcaaccctgntgtggctgcaggtgcagccactggtcctattcccacaggaaccactgttgggaacccaggtgtaggtgctgcagccagtggtcccattcccacaggacccaatgttgccaactctggtgctggtgcagccactgctgaccaccccttgatcttcttcatgcatgatatcctaaggtgggtcaaaccccactgctatagc

SEQ ID NO: 256076 - DNA, 322 bp, Gossypium hirsutum
tttcccacttgttcgcaacatactagctttggaaacctacaaactcatttctatccttctttccttcgcaattattgcattctccacttttgcaagaatgcttgatgagcaaccctcgaatcctggtcgaagccactctgctggtaccgggcaccccaaatagtcccacagcctaatcctactggagccgttgcaagtagactatgagtggaagaagaaggtggcactgagtactatgatactcgggggctaatgtgaagcggctcgagactgaaacagatgcaaagatcaatcacttgaaaaacgaagctgcaaggatatc

SEQ ID NO: 256077 - DNA, 278 bp, Gossypium hirsutum
tcgtccacgcgtccgcccacgcgtccggcagtttgagggacttgctttgatgacgtggattcaggtgtgactggtaaaaaacggggttgttatgatttatggatcgaaaagaggcaaaaatttacgtgtagcttgtaatcaccgacgaaataagtccaacttttttaatttgaggaactttctaaagtgcctttcaacctcatgtttagtatgagaatatgagtgttacttatattttgattttcatggttaaaatccattgttctttttatttgctc

SEQ ID NO: 256078 - DNA, 290 bp, Gossypium hirsutum
tcgaaaaaaccgaaaaaacaaaagagctatatatatatgagaatacaataaaagtgaaaaatgttgagagtggcaacgaggcggctcacttcttattcgtctgcgtggaggtcgcaccaggccaccttcgctatcgcctctcgtcctttcatcgacggcgccgattcttctgattgtctcagatccaattcctcctcctcctcctcttccttttccttctctttcgcttctcaattccttcttcccaccagagggtttgcttctgagtcactcaccccaaaaagtgacca

SEQ ID NO: 256079 - DNA, 259 bp, Gossypium hirsutum
caactatgtaaagttttaaaattgtaactcaactattcaattttgcatttttttcattgccaactggctaacagtgacagcttttaaaattggtataatactaactttaaccttcaagatttataaattgtattaatttagttttgatttttttaaaaaaagtctaaccctcatcatttacacgtgtaatttgttattttttgtaattttgcttttctttgtaccatgttacttaaaaaaaaatgaacgaattaatagg

SEQ ID NO: 256080 - DNA, 412 bp, Gossypium hirsutum
tcggaccgatttaaattttaaaatttctttcacaatttgaattttttaaataattttttactaataaataataagttgattttatataattcatgctaaatgatttttttattctaattgagattcatggattttatattaacatttatgcaaataatatatttagtatattacaaataattagattccactaacacatttttatctatgtgtaatttagaaaagtgtatatatatatcatataataatttaagaaaatatttttatcaaataaaatattgaattacaaaatatattaaaaattataaaaaatttcaacgtattcataatcttcatcatctacgccaatgtatacaaaaattcaaaaataattttaatatattctaattaatacatacaactaaactcatgt

SEQ ID NO: 256081 - DNA, 438 bp, Gossypium hirsutum
  unsure (1)..(438): unsure at all n locations
gttttatagggattctctttgaaaaacaatggttggccatgaagctgtggaggttgccaagacggttctcgaagtggccgacgtcgcttggaccgccatggaatgttgtcaccacctccaccaccgtcacaaccccgacgatgattctcctgaaaatcatgacgctttcaaactcgaaaaagaattggaaaccctaaaatgcgaaaatcaacgtctcaggaatcttctggaacagaacctcaaactcctcaacaatctctctgaatctcctgtttatttaaacgactgtcctcctgacctctatgctcggttggtatctaccgtggaatctaaagactttttgctccgactcaaatctcttaacggatccaatactanaatcgagtttccattcaaggaagctacaggggatgataagcattctgctgaaattctgat

SEQ ID NO: 256082 - DNA, 347 bp, Gossypium hirsutum
  unsure (1)..(347): unsure at all n locations
ttgccttcctttatccaccatcactggagtgtttggaatgaatgttggtggtgttccatggaccgtgcaaaaggaccctgcattgaaagacggattccgaaacgtcatggtactatgtttagcgatgctgattctagtgctgctatgctttatttttccggctctttattcccgattgtacgcctggcgtcagagacggtctttgctgaaaatactggtcgtataaccggaagatcgttcctcaggagaagtgtaggaattcaagaanagtggcagcggtcggataccttaagatttgatgagtttgaagaaagtcgatgatatcatcgtatttgtcatcggattaa

SEQ ID NO: 256083 - DNA, 384 bp, Gossypium hirsutum
tttcggatatttaggtcctcttgttgtgaaaaaatggcagggctgccttcaatcgtcaatagtgttgtgttagctatcagcagctgaggagcaccaaagactttgacatttgttgtatttggagtttgcatatttggtaactaaaaaggatcattgaatccatagctaaaatagtgctttttggcaatgttaaaacgggaattttattttatttcgctgattctttgaagagtgttccactcagacatctattagaagttccttcgctcgataataaaggttatccttaagagttgtaaatgaacattacgttcggttcaatgagtagttttgtttttgtccatttatcaaattaaattaataataacaaaatttgaaggctta

SEQ ID NO: 256084 - DNA, 194 bp, Gossypium hirsutum
ttctcgcgtccgcccacgcgtccggaagcccgtggcctgaccggaggcaccgagggttcggctaactgaaccgggcagcacgtcgccgccgtaagacagcggtaaacaaggcgaaacgggcggccgatgctgtatgctggccgcccttttttcaaaaaataaaaaaaaaaaaaaaaaaaaccatagttaggaat

SEQ ID NO: 256085 - DNA, 175 bp, Gossypium hirsutum
tcctttcgtccgcaaaaagtaagctgaatacaccgttccgtatgcaatcgtgcatgtaaacttacctttaattttgtgtttaatgcttataataattgattttgagtatgctgttgatgtagttgtaagttggtttctaggtttacatattagtgattgcatgtatatgatttgg

SEQ ID NO: 256086 - DNA, 119 bp, Gossypium hirsutum
ttctttctccctagaagaacactacacgagtgggtttgtactgcaaaaggagatcgatttcaaagccttttcaccatgagagctaagcggtagaagaagcgtatgaggcggctgaagag

SEQ ID NO: 256087 - DNA, 422 bp, Gossypium hirsutum
ttccgattgaaccgataataacaccgttgcgccaagcgcccaaatttaccacagaattggcacaggatctgagagttaaaaccccttccattgccaccagtaaatgagtgaccaccacgcgcgggttccaccgctatcggcgtcggagcagcctccatcagatttgcatgaaacggcacgtcctgcgccacacgagtctgtcgaatcttatattccaatagaacatccacaagtcgttgcatgggaagtagctcgaacgagaacgaggctagagtgagaacaacgtcgtgctccgatggcaggcccacaagaacaattttcaccttctcagcctccgagattcgagatctagatgcttcgatcaaggcacaagtattttgaatcttagccacatattctttcattatcatattacctttttt

SEQ ID NO: 256088 - DNA, 250 bp, Gossypium hirsutum
tcttagataaagggtaatttgcccctgatattatttactacaccactttaatcaatcaaggtatagctaaagatgcattgaacttgttcaagtagataatggagaatagttacaagcctttgatattgtttcttactgtgtctttgttaggggcttagctagaactgctcttacagaagaggtgatcaatctttggactatgtagagacgcatggtttgaagtgtaacactatcatgcacaacatggaca

SEQ ID NO: 256089 - DNA, 266 bp, Gossypium hirsutum
tcttcacgcgtccgcaaggtttagtcaagttaatgcatgtaaaccgctcttaagaggttacgttcaacaagtgtagagttcggatcctggtttttgcaacatcaaggcagagcatggtttcacttcaaatagaaaattacaggttttaagaaaaggtcgccccttgttaatattatgtacatttgctatatgaatgactacgcacgttaatatagaaaagaaaagaacaaaaaaaaagcacaacaagaacattaaaggcttataag

SEQ ID NO: 256090 - DNA, 291 bp, Gossypium hirsutum
tcttcaatatttgtgaagctcactgccttaaacatgagctaaaatgtcttatgtctataagaaagtattaatttgcttagggtcataggtgtaaagtgcgccttgttcattctcagagatctggcctgaatttgggtctaaattggaggccttgttttaattttaactgtatggacctcgattttcgtggctaagaatagatcttgcaagttgaaggcctcatcgggtcaacaaaaaaaaaaaaaaaaaaaaaaaaaaaaaaaaaaaaaaaaaaaaaaaaccaaaccaaag

SEQ ID NO: 256091 - DNA, 212 bp, Gossypium hirsutum
tccacgcgtccgggaagacaacagaatgtatgaattatttaataaaatgtggtggtgtataatataggcgatgtttacgagtactaagagatgccgtgatcgtcggatcatctttggttgtcatcaacctgttgtttctttaagctaagtgtgcaatcaatattttgtagtggaagttaattatgaatgagaatcttccctttttttggttt

SEQ ID NO: 256092 - DNA, 341 bp, Gossypium hirsutum
tttgccaatgtaaatggaacgacgcgtctgtggggatggcttctggaatcttctacttgcggcgcgaggtgaaagagaggcagaaaccctaaggtttcatgcctcggtgtaacggtttgggccagttgggccactttagtcttgggtccatttaggtctgttgtaatgggccttaagagtaagattttagaaatgggccagtaatgtaacgggtttgggtctgctgagttgtaaccgggcataaggtttaggccaattgattttgggtctactggttggtgggccaatgtaaatggacttttaaaatatttatttggtttacagcccggtcaaatttgggc

SEQ ID NO: 256093 - DNA, 343 bp, Gossypium hirsutum
ggccgaagcggcggcggcggtggtggtggaggatttggaggaaacggtgggtacaaccgtggaggcagtggatatggtggtcgccgtgaaggtggatatggaggtggtggttacggaagtggacgccgtgatggtggtggatacagtgacggtggatctcgttactcaggagaccgctgttcttgggcttatgttaaagcgtgttaggatttgagtgagcttctgctcttattttagggtttaatgggtttgtttgttagtgtgtggcttctatcgatattttttcttgtatcatcaggagttttaaaacataaaagtggaatgaagtatatgccttcttttc

SEQ ID NO: 256094 - DNA, 282 bp, Gossypium hirsutum
tctgtaaaaatgatcaccgcaacatacatggtaaaatatcatttccttttagtttaatcctttatatatgtatatggtaaaagtaccgtggaagcccatgtactaggagttagattgtattttaccccatttattcaagtctttgtgcattagatcaaagagcaaattggtccttcagtgtaaaaacttctgtcattttatattgttaaaaattggcgtggttgatggaacaggttgacagtgaccagtttttaacggtagaaatggatgaaattttaacaa

SEQ ID NO: 256095 - DNA, 296 bp, Gossypium hirsutum
ttctagagctgagttgaaacaggtcattagacaagagatggagagcaatcgagattgcaaggataggcaaaagattcgcttcctgattagtgaaggaaccgagagactgaaaggtctgactgagatgcttggtatgcagggacattgctagttcaatgaaagctgcctgctgctttggtatcttaaaactctgattttgtagaatagacttcattctccacaagttaaccaatttcataaatttacttcttccatgaatataaattttttatttaattatagtttattgaggtggc

SEQ ID NO: 256096 - DNA, 406 bp, Gossypium hirsutum
tcttccataaagagacctatctgtcgtccggcctccgttcaacccaagattaggaccgaaagattcgcctctttctcttctttctagttctccgattagctttctcgaaaggcttactgaaattttgaaaaaatttcacaatctttagaatcttccaagcctcgatctaaaaacccggctgttgaatcatcatggaagttcggtcgtggcttgtcgtcaccgctttcaatgtcttaactactgttcgggttttagaatgatgcttgaacctagagaacctagaaacgcgaaatgggtcttcgtgttgattttttttctcgtcattttctatttgtttggttgcgtgttgtaatggattgatgagttttgtgatttttgttgcgttcatttcagtaaataggtttag

SEQ ID NO: 256097 - DNA, 231 bp, Gossypium hirsutum
tcttctcgtccgcccacgcgtccgcccacgcgtgcggcgaacaagtaccgcgagggaaagatgaaaaggactcattgggccagacatggtaccaacaagtttgtcactatcaggtagagagctaaaaggatggtatcgacagcgggtctgcatcgcatgtatatatatctcggcctcctgtggagatgtttgttgcctgtgtagtttcatgaattttctcagtcatgatta

SEQ ID NO: 256098 - DNA, 490 bp, Gossypium hirsutum
attgtgatattggaatcacttgcttcatccatagattttgggttttcagccctaggaaatattgtttcggttcgtcttttcaaatctatggatgtcggtgtggttgttcttgttggatgctttgggaaagaaagaaattctggttctgcaagatttcaccagccatggcgtctcttttacagtcaactactttattattcatattctctattacattgattcttatcccaaatagacacgctattcccttcatcgtattgcatggctattgcagcaatgatgcgtgctcaggaagccaatcctaccaatctggaagtacttcttgctcttggtgtgagtcatacaaatgttttgacaagctagctcggaaatcgagaacggtcggaggcccactcacactatccgtataccatcttggcataatggcttgtatattttgagtatggcatgtatagcattataatcattttgtatatatggtcttatgata

SEQ ID NO: 256099 - DNA, 389 bp, Gossypium hirsutum
ttatgttcccgagttacctaagccagagttgcccaagcctgaattacccaaagctcccgagtttccaaaacttgaatcaccaaaagttcctgagttaccaaaatcagaattgcctaaagttcctgaggtgcctaagccggaattgcccaaagctcctgaattgccaaaaattcctgaggtaccaaaaccagaattgcccaaagcgactgagttgccaaaacctgaattgccaaaagctcctgaattaccaaaacctcaattacctaaaattcccgagttaacaaaaccagaattgcctaaagttccagaggtaccgaaaccagaattgcccaaaactcctgagctgccaaaacctgaattacctaaagttcctgaattgcctaacatgc

SEQ ID NO: 256100 - DNA, 218 bp, Gossypium hirsutum
ggatgataaaaagaaagaaagtgatcatattgctgagcttgttaaggcttacaaggcccataatgctcacatgactacatattatcgagtcgtaagtgcggaagaaaatcctttttccagttttatcaggtaaatccgctggacttataaaggatgcaacacatcagctgaatgaaatgtaaggagatgctgtatagagagtgaataaattttgatca

SEQ ID NO: 256101 - DNA, 252 bp, Gossypium hirsutum
tcttttttttttttttttttttttttttttttttttttttgattaagttacgtaatttatcatctcttatagtaagaacaaacttatcttccaattctttctcttaatacataaatcaatccataaagctaatgaatgggtaaaaaataggagggtctttattgaataaacccccaaccaaagcaaaaccttctctcctgcctgaccccctttggtgaaaggttaattcacttctttgctgtagctaactta

SEQ ID NO: 256102 - DNA, 266 bp, Gossypium hirsutum
tcacgcgtccggcgaaaggttgggtcactggtaattctgatggcgttggctcatgggttacaaccgcgatagactttcagatttcgatttcacacttttgagcaacctccggttagtgcatggagagtctcaatggttcttctttgctgtaattttgttagtctttctttcagtctttgactgagcttttcttttaccaaaaaatgtggtgacgttaaatttttataaatagatgaaccataagtcgtcctcttctagtttaaaaa

SEQ ID NO: 256103 - DNA, 327 bp, Gossypium hirsutum
tccacgcgtccggcaaaatcttcggcttgcttatcttcgtagtttggaatcattagaccttgttaaacaaatagaagtttcagagttcctcttttcaggagatattgccgctcttatctacctatgtaatcctttcacgatagttgcatgtgtgggcttgtcgacatcaccaattgaaaatatggctgttattctgtgcctttatggagcatgttcacgacttattcccttggcggcttttgggtgggtcattgcaactcatttgtctctttatcctgctattctgataattccggtgatctttttattaggatgtggtccagattc

SEQ ID NO: 256104 - DNA, 165 bp, Gossypium hirsutum
tccaggcacatctgaagccataatttccaacgtgtctgtgcttcatggtctcaaaatgtgtagccatgcagcagtttaatcatgtatgtacggcggctataatagtattagattagccattagctgattttacattgaagaactgcttggctttgcacttcataa

SEQ ID NO: 256105 - DNA, 395 bp, Gossypium hirsutum
atcaaagacagaaagcaacatgctcaagtgcagaatctgtagatcaaaagcaagaaattgggcctcatcaaaaagccgtcgtggtgttgattcggatcttatcagcaaattctgcagatggcatcgcgtactgtcagtttgattcaagatcagaatctaaatgttcagtttaatggcaaggctaatatctctaaagcaccgagaaaagccagtactggtggaagaaaaccacttggtgatctatcaaattcagtgaacccaaccgcaaagcagatatctaaaaaggagaattccaagatcattactttcactgagaaagaaacagttgcctttaaactcccaaatgattcaagcaggaaaaagaatgtccctaaggcctcagagaaagttcaagc

SEQ ID NO: 256106 - DNA, 243 bp, Gossypium hirsutum
tcgttattgagctgctgtcctgccacctggatttaagggcggtagggcatagtataaaatagcacacacgagtttatcttagactcaattgaacttaattttaactagcacacatatgaggtaagtttttgtttttaaattatttagaatctaattatccctaatgttagtaatttataatattattactggtaggtattaatatttttgttatgtaaaaaaatctaataaattataattatt

SEQ ID NO: 256107 - DNA, 156 bp, Gossypium hirsutum
ttcctttcactgtaaaatgtaaatcttcttgctgtgttttcccccctacttgttggaggttcgaggacagattcttaagttttaaatgactctgtcatatgtggcttctgagcgaataaaaaacagtgaaaaaaaatgacaaaaatcgtatatgtt

SEQ ID NO: 256108 - DNA, 240 bp, Gossypium hirsutum
ttctgggacatgcatcggcattgagatgagagctagtgtaagacatgtctgggacatgcatcagcctcgcgatggacaagctagtgtaagacttgtctaggacatggcgtcaccttactgcgtgtcagtgtaaaacctatctgggacatggcattggcatctatagatgagagccagtgtaagaccatgtcatggacatggcgtcggcatcttagcccatgttaaggctatcgagtatcc

SEQ ID NO: 256109 - DNA, 425 bp, Gossypium hirsutum
ttcacgcgtccgtctggttctgcggcatgaatctaaatacagcattcgaagcactgacctcaaaacgaccttgtggacccaataaaagagcaatacgaggagccacctatgatctggctaagaatgatccatggaaggagccctttgaaaatcttcctggacatgcttttgagggtgtagcagattgggagaggaagttgattcaagaccgtgttcgttccctccgtggaacctgattatcttggttaacattctcttaaagccgggtcacaagcgcatggcagacaaatccgcagaatcttacgtattgcttgtgggatgttgaagctgatctctccagggactattttcctgactgaataccaaattacttggtcaaatcataaatatgatctgatttttatagaagctatttgtcataaacc

SEQ ID NO: 256110 - DNA, 415 bp, Gossypium hirsutum
ttcatcctgtttttaatgaaaaagggtctttcagaatggatcccccattgatcaatgagtcatccttttcagcagccaatccttcagcttacagcctcgctgagatttggcctttcccgatcaacccaggctctgacccaactgctgtaactggaggtgggttggggctccggataggtaatttgggtgggtttggggaaacttcgggtcttagagatgggtccatggaggaatctactgtgactgaacagagtgttggatgtggaggtgggagaaaaaggaaggaattgagctctgaagatgagtcttccaagattgtttctactactactagtgccaatgaattgaatgattccaatggaaaacggatgaaaactccggtctcaaagaatggaaatacgggttctaaagaagc

SEQ ID NO: 256111 - DNA, 491 bp, Gossypium hirsutum
ttcgtggttctgtacctcgtactttacctggcttgataaatgacattatgagcaaaggcaggcgaatgacttatgaagagctttgtaatgcagtcctgccacattggcctaacttgaggaaacataatggagaacgatatgcgtattctactcattctcaagctgttcttgattgcctaagaaatcgacaagaatgggctcagttagttgatcgtggccccaagactaattcaagtaagaaaaggcgcaaggcagatgctgaagattcagacgataatgaattcggcaagggaagaagtacgaaagaggtagaaagcaaaagcctcgagtcacagaaagaagagttccccaaaggcaaaaggaaagcgaggaagcgcaggcgattggctttgcaaggaagaggaataaaagatgtccgcaggagaaggaaagtagatttcagtgatgatgatgccggacccttctctaactcaagtgaggagagcatgttc

SEQ ID NO: 256112 - DNA, 258 bp, Gossypium hirsutum
tccacgcgtccgcggacgcgtggggacagagcaaaaatttgccttttaaatattgtactgtaacatataatccccttgaactgccgtgcatgcaggcggtctagagacttgggtttagtctatttttccatctcattggataataccaaataaactcatgaatggacaccattgcttttggagatatcagctttgaaatggaaaagttgtggaacaagacaagaaaaataatatagttaggcgtttctgatgcttaac

SEQ ID NO: 256113 - DNA, 278 bp, Gossypium hirsutum
ggaggaggaaatgggtctgagagaacttcaatagaccaatcgaagaaagagttgatgcattctctttcatattccaaccctaccagtcaaaattctggtgctgttgatgataaccataccagagagtctggactagatgcattcgggactagtacggtaattttgcaaggagaggccgatattggtcctattaaacctcaacctgatacaactataggtgatgtttcaattggaatccagtagtcatactgatagtttggaagctcactggggatcta

SEQ ID NO: 256114 - DNA, 247 bp, Gossypium hirsutum
tattttgtttctatgcaagtggttgaagctttgagtttatctatctagctagttgtagttcgtaatctggctacctccatcccttctattccttagccaagcatttaaaaaagcctgcacagcatgtaatatagtgttttcatctcttcaattacaaacccctaaaaaaagaaaaaaaatacaaaatgaggtaaaggatcattagttatatagtagaatgtatccatagaatttgttaaatattatt

SEQ ID NO: 256115 - DNA, 126 bp, Gossypium hirsutum
tggagaaccatagttgattataatctttatgttggactactgagacaggccggtgtcaccaatgttgggttttatggaaatgttatgctcctttatccattggtatccatatattattaatatgaa

SEQ ID NO: 256116 - DNA, 413 bp, Gossypium hirsutum
gcgtgggtcaagaggcagtgatactcgaaggagaattcgccgctctagttatgcttcatcaacttctgatgagggttcagtgcattctgtagaatttgcagaatatagagtagatgagactgatgatgagtttgtgagcacaagtggctcctcaagaggtagcaccagctatcaaagttctcaaagacgccgatcccgcttttatgataattagccgcatacccaggaagtgaagctgaggattgatcctgtccatgtggtgagcaataaggtaattgctgctgcagacagttttagattcttaaacatgtaaaaatacccttggagcctgttatgcttgttttggttcagacttgaatttcatgtggttctattttgctcattttcgataatatatattacgcaaatagaca

SEQ ID NO: 256117 - DNA, 186 bp, Gossypium hirsutum
ttatgcctcgttgtcctggaacctagaaccagtagaaggatatagttgtggatttacattatttttaataaactaatggatcaaattttattcgaatttctgttaataagattatatggaaatgtaattttataatagaattgtgatcgttgtaaggatgattttatattggactattatttcatc

SEQ ID NO: 256118 - DNA, 105 bp, Gossypium hirsutum
gtccggcacatttctagggtgtaccaagggtgttgaagggagtgcccctttctgcaagggacatggaggggggaaaagatgtgcattcgaaggaggcggggtttg

SEQ ID NO: 256119 - DNA, 101 bp, Gossypium hirsutum
aatcattttaacggagtgtacatacagttatcagccttccatacggtgatcatacgtattattcagccatttgcagagatgcattgctggttctaagacca

SEQ ID NO: 256120 - DNA, 290 bp, Gossypium hirsutum
aatactacgagagtttgcaagcagaggaggcaacacagcaaccagctgctgtatcttcttagatgcataatttagtagtagatcttgcagcgagttttattacatgtgtggtaggcttgtcctatggtgtcaagttcctaatggcagcagcaccagtaatggattcaacatctccatctctacttttatgcctttgttcaactccctggtgattggagttttgtttttaagcggataatattgtagcaagacaaacaattgatgctggtttgaaatctcattcttttctc

SEQ ID NO: 256121 - DNA, 248 bp, Gossypium hirsutum
gtccgggcttggccatctgctgaaacttgaggacatactggatatttgacattcgcaaggaagtgtaccttgaaaaaagtataactttgcaatcaatgcaaacacttagttttcatcctactattatgattgattcttagctatgacacattcccgagtattctgtattattacatcttcagttgatttagcaaataaagtgtgaatgactaatgattctgtattattacatcttcagttgaactttt

SEQ ID NO: 256122 - DNA, 164 bp, Gossypium hirsutum
gggggtggggaatcaacagaaccctgagcaacagttagctcaggaagacgccaagaggcaggcagatgaacggaggcaaatgatgcttagtcagattctgtccagtgaagtacgcgaaagacttgctcgaattgccttggtgaaacctgagaaggctaggggtg

SEQ ID NO: 256123 - DNA, 104 bp, Gossypium hirsutum
ctattgggccctattacattaattttgggtgtttgctttgtaactttgtaactttatgtcatattagtattcttatcttgaatttcagaattttaatttggatt

SEQ ID NO: 256124 - DNA, 223 bp, Gossypium hirsutum
tttgtttcccagcaaaaatcaacctttgctgatctggtggaattccttttttgtgctgaatcttcgtggtgggatctaagccttaaggtcttccttaatgtgggttttctggttttacgtgaaggattgtgccctttgatggccttttaaataattcctagtctttgtttaccggttgcatctatgtatggtttctctttgaatggaatttgcatatttacct

SEQ ID NO: 256125 - DNA, 349 bp, Gossypium hirsutum
tcacgcgtccggtcaaaacaacagaaaacacgcaagaaagatcgataatgaacacgttaacgatgctccacgattacgaaaaaaatatcaaacaagatcctcagagcttagaaagagctgaagcattggaatcattgttggagatttgtgctagtttacttaaacagcaaagacttgaggaacttgcaggggttttaagaccatttggtgaagaagctgtttcatcaagagaaacagcaatttggttaacaaagagtttgatgaatgctaaaagcaaaatcccagtagatcataggaattgaattgtaagtttttaacaaaagaatccagcaataggtaactcaatgat

SEQ ID NO: 256126 - DNA, 402 bp, Gossypium hirsutum
tttcaatcaatcaaatggagttaggggaactgtgggcgatcttcggtcccggcgtcgctggcgcagtgttcggtgccggctggtggttttgggtcgacgccgtcatatgcagctccgtcaatgtctctttcgtccactatttacctggaatatttgcttctatcgcggctttgatgttcaattgcgttaggaaagaggatattgattactctccttatgatgaaggcgagtggaggttgaagctctggcttttctttgcttatgttgtatcctttgtctcactagctgcttcagttggcctcttgatacaagactcactagtgaaatctggtccttcaatgtggacgggtactgcaggcatcttacagtgtgtgtttgtcttaatcagtgggctgatatatt

SEQ ID NO: 256127 - DNA, 402 bp, Gossypium hirsutum
ttgattgaaattcataatctcccaaaaatgatcagttaatttttcgtcattgaggtgtttttagggtttttattcttccaacttttaattgaagactatcattcattcattttagttgatccttctgaagtaacaaccaaaagagcggtttaatcgatttttaattcgtttagattaacttcatggcagaggctccccggggccgtgttactattactctcggacgtagtggccaggttgtgaagaggtccggagctgcatcggatgattctcttcctgttgctggaactaagcggtctgtaagggatagattaggaggcaatatagatagttccttgttgaatggcggtcagctcaacaacaaaagacaaagaggcgatggtcaaagagcaagtttgaatg

SEQ ID NO: 256128 - DNA, 188 bp, Gossypium hirsutum
tttgcaacccaaagtaccacaacaacaccactttgttcaccatcactagtaattccatcacactttgactggcatgagtacgggctaggacacagctgtgtgcctcacatccaatgcccacacagcttacgacacgggcatgtcacttggccatgtgtgccacattcacactttgactggtatgagca

SEQ ID NO: 256129 - DNA, 228 bp, Gossypium hirsutum
ttggactgaagaattaaccaaagtctacagtagaaaagccggatctgctcattagtcctttgatcgaagacgcagggcactgttggaaaatatggctgctgtcttctacattttgacgacacctagggcattgagcttccaccacaactctctttaagtctgagtttaacaagggacggaatgaagttctatgagattctccatactgaactagaatttttaagggga

SEQ ID NO: 256130 - DNA, 186 bp, Gossypium hirsutum
aactctgccgggtcatctatgcctcataatcccactgatcttcacctttcgttacctgaaatgcacctttctcaccttaataacatacttggtattcatggtagtaatactaacttcatggagagtaaatacaatccactgcttgaaaacccagggccgatcgatttcttgtctaggaactatgac

SEQ ID NO: 256131 - DNA, 244 bp, Gossypium hirsutum
tgagaaacgaaaagaaaacagatctggaaaatcaccttttttgctttgtattgcttgtatatcttgcgtaaaatgtgtaggcattcgtaacctttacatagactaagaactatggctttatagccgaaggaaaaaagaaaaaggaaaataaattaaaaatgccattttttcatttgctgttctgctatttttgtttgtgtttgttgccgtgttcgtcctttcttttgcaggtacgggatgcgct

SEQ ID NO: 256132 - DNA, 106 bp, Gossypium hirsutum
gtgccacaaccatattattttggaccactggcgcacatttgatgaccttttcagtggagcatgcctccaccatggaaagatcagttggaggtttccaaattcctgc

SEQ ID NO: 256133 - DNA, 113 bp, Gossypium hirsutum
atactacttaaccctagttttactttccctttatcagtatatatatactacaactgtaacttatttttgtcatttcaggtgttaaagtttttgtggatgatgaagtgctttgt

SEQ ID NO: 256134 - DNA, 102 bp, Gossypium hirsutum
ctagatatgtattttactatagctttgcgcgatgcaaataactcattaatctgtgcattaattcccattctgatggcaagacattctacattatttactgac

SEQ ID NO: 256135 - DNA, 297 bp, Gossypium hirsutum
gtaaacttagcgacttgctactcgctactcgctactctttaattggctaaccgggtcaatcttagcgtagtcgccacgaccgaggaaaaaacacaaatttttctcgtgtccacgacgcgttcgagaaaatgccacaatcagtatcttgaccattcactttccacgaaattgtctgccccccaaaactaagctcttcacagtataaaaatcatcgccattccccgcaaaattcatcatatttctttataaactttccccgtttctcttcggttccccttaaaaaagaaaacccagaaa

SEQ ID NO: 256136 - DNA, 164 bp, Gossypium hirsutum
gcgtccgcgatttttaactcactctcgactcagagagtccaattgtagcaaatcgcaaaaaggtttatagttttccttatcactgccggtaatgctttccggcagcaaagcgtgaacagaaaatcaagctttctcgttgtcgctttctaaagtttttttccctc

SEQ ID NO: 256137 - DNA, 105 bp, Gossypium hirsutum
ctccaacggtttgctcgcacacatttcccgtctgtaaagtacatggaatatgccgtccaagttgaaacatatacgctttccaaggctaacaaccttgtcctcaac

SEQ ID NO: 256138 - DNA, 401 bp, Gossypium hirsutum
tggcacacaagaagtatgaaccatttttgaataaaagcattgatcattatgatgaaatgacttttgttgttggcaaagatatggcaatagggagttttgccaaaacattttctgacaatgaagagactgaagaggtaagaacaaaagtatcttcatctggcacatccaaatgtaaaagaaaaaatgttcaataaagtgtcgttgatgacaaaattaaatttgtgggtgaacaacttggcaaaattgctaatgctttggaacaatttactgcggataagacaccacatctttacgaagaagtgatgccgatggaggaagaaggatttgatgatgacttcctgtgttctgtgtttgattatctagatagtcatgaatctgaagccaaatcttttttagtttta

SEQ ID NO: 256139 - DNA, 197 bp, Gossypium hirsutum
tataaaaatttaatttaatcctttacaaattataaaaatataaactataaaaaattaaaatttcatccggcccccttaaaaaaattttctagctttgcctctgctcccgtggaggtttatcgtttagatggggatcatttaacccacgaaaattgacccgattcaaagaactgttgaagaaacctatatttgaagct

SEQ ID NO: 256140 - DNA, 106 bp, Gossypium hirsutum
agaaacgaagtgatatggtccatggttggggctcaaaccaccgagcaaggcgactgttccaaattcaaaggaaatgtgccccactgttgattgaggaagcctgttg

SEQ ID NO: 256141 - DNA, 163 bp, Gossypium hirsutum
ccttggtttgtgttggaggctgcactgcactgcactccctatcgcaaaacttggtttcaaacaatgctaagacgcacaagttccatctgtgactgttgactgacaacaaaccccatgaggaagtctggttctctttgaaccatattgtagtatttttgttttt

SEQ ID NO: 256142 - DNA, 316 bp, Gossypium hirsutum
gcgtccgcccacgcgtccgcccacgcgtccggtcactacctatacataagatgagagaccatgttctgatctaccttctactagcatggctcctgcttatacattatcaactccagggatccgatatcagtgttcgagctattgactcagtgccagcagttcacttcaagttcagcacacctagaagcctaatgccaagggcacgtgttagaaatgcattacctacctgggttgaaatgaagaagattcataaatccccatccagccccaacccagtcaaaaatcgccggtcaccatctaaacactaaggtgatac

SEQ ID NO: 256143 - DNA, 478 bp, Gossypium hirsutum
aatattctcttttgtttactgagttgcttttaatggagtcggatggaattatcagcctctttgattcgtgttggtttgagatggaaatattcaaaaaacagacatctccatcaacatctacggtttcggaaccaaaccaaaatctccgagttgaagaaacatcatcgaaaccagagtttacacgcaccccatctctccatacaaggtccatgagcgaccagttgagcttaaacagcacaagcttcataggttcagcttcgttgtcgcccgactcggttctccactcaccaaagctgcataaaatcatctcgggcaaagaaatgacggaagaagagttgcaagataacgggagtagaatccaagaagaacccaaaaaggagacagcagcaagcaacaggagaagtagtagaaggaaaaagggtacaagcaagagcttgtcagacttggaatttgaggagctaaaagggtttatggatct

SEQ ID NO: 256144 - DNA, 208 bp, Gossypium hirsutum
gcgtccggaagaatatacggcgtgggaagcggcggcggcggagaaaggttttattccggcactgaatgatcactttcgaagtcttcgcacggagcaccattgcaaccgcctgacgcttccggggattagtgttgctgagattggaagcatcaaggacacggtcgtttgcgttgactgcggtaagccgatggaagcgctccttatgttt

SEQ ID NO: 256145 - DNA, 150 bp, Gossypium hirsutum
gcgtccgcccacgcgtccggcagtggtgaatggaacattgacactaagaggaggttactatgattttgttaatggagattttgagcaatggaagatgtgtaccaaaccatgccacccatattaaggtcctttttgccccatgcattatct

SEQ ID NO: 256146 - DNA, 291 bp, Gossypium hirsutum
gcgtccgcaaaaaggaaaacattttcaaaggtaacaacaaattactgaggaggcaatagtatccaaaacaccccatcattttcaaaggacaaatggataaaaattaagaagaaagcaaagggagaaatcagatcatgacatgtctactgcaataaatatttatataaaagataaaaatatattagaaaacttgagaggaatcgaaaatcactaaaaaacagagcatatttacggaaaactaatataaattcttacctaaacaaatatggccattgctataaatatgtggat

SEQ ID NO: 256147 - DNA, 110 bp, Gossypium hirsutum
acaaacaagagagatagaggaagtctcaaatttcaacaatatttggcagcatcgggatgcttgaaacagcggcagaaatgtggggcgaaaaacatgtatgcaacaggtag

SEQ ID NO: 256148 - DNA, 203 bp, Gossypium hirsutum
gcgtccggaacttttcaatttgctttctatggggaactcgggagaaaatgactctgcgttcagctcatgataattctttgcaacctactgaagcaaagtccgccaaggaggcaagtgatgttaaacaagatactatatttgaaaagtcaagcacagtgtctttcattttccgtcctttaacaacttactatgcttcccaaaca

SEQ ID NO: 256149 - DNA, 275 bp, Gossypium hirsutum
tcaaggcactgctccaagaagaataagcctgcaaattaatctttctactggaccaatgaaaggttctgcaggctgtgtcgatggtgggagcatgacaagtcctggcctcgttgaagaagaagttcagtctgctctaaccgaggtcacagaagctgaagctgtaggacagacttctagctctgatgagtcagagatgaatattgtaaaccaagccattgctcctagaagaatacgtttgcaactttctactgggccaatgaatggttctgcaggct

SEQ ID NO: 256150 - DNA, 186 bp, Gossypium hirsutum
gtaaagcgttagacggtgtaaatggagtgcaagtggttcctcgttcaccttttgcattggaggagataaaccaacaaagggaattccaatccactcatgataaatcattttttacagcaaatcaaccactattgatgcaagtatggcagcagaggccatcttgtttaaggccagcaagatgttgca

SEQ ID NO: 256151 - DNA, 381 bp, Gossypium hirsutum
ttatagaactggtaatgtatgggaggtatgatgagcaaatagatggctttgtttacaaaatgcttgatcagttccaaaatcactataaaaagttggattctggttttctgagcaagatccccaaaggaaagttcaagcttaagaaacatgactaggagcatttggtcacttccattagatccttagagtttctgtatcacatatatacatcaaacacttgaataaatggtgttatatttttgtgaaattatcagtttgaatattggaaatatctttgccaacctcaactgctgggtcgactaatgatctgctatgtcacattgttactcaaacttaggtgtcaccgttaatatggttatggatatgtttaatcgttctttt

SEQ ID NO: 256152 - DNA, 297 bp, Gossypium hirsutum
tattggacccaatgcctcaatcaccaacgcccgatcttcttagcatttaaagccctgtttgtttttcttcttggaggaattggcttgtgctctaagtttcatgaactacgctagtttgttgctttgatttcttttattaatcttgggcgggagtttgctctaactttaaggtgtttgttttaaggtttttcttccttattttgtacagtaggaggattggtggggggtaatttctttatttttttttttcatataaaagtttgtcttcatcaagatgtactgctacttctactggct

SEQ ID NO: 256153 - DNA, 359 bp, Gossypium hirsutum
tgtacttgaagaccttgtttacatcccttcttcttttcctcttgatttttgcctcctccccaaggatcggctcagccactgcaactgctgatgcttcacttgctcatgctgcacaatcacattagatgagccagcgcatgaatcatggcagctatcgaggacctcgaaaacaccttctacaacccagctgttgaccatcctcttcagcttcccaagctgtctgtatagttttctatgtaaaccaaaatctgatcactagaagctataatagttcatctgatcttatgtttctctttttgtatgtcttttatattactaccaaaaccatacaattcaattcaaacagctgaacccaattc

SEQ ID NO: 256154 - DNA, 314 bp, Gossypium hirsutum
ttttgctgacattgttgtcttcatgttggtggaaaccatcacttgaacttgctgaaaatgtcttgatgttaaaacaaggaggttacttactatttgtcttccaatttttgtcggaactgttgattagtttgtttgctatatgacacttttctgaattgtctcaaaaaaaaaaaaaaaaaaaaaaaaaaaaaaaaaaaaaaaaaaaaaaaaaaaaataataaaaaaaaaaaaaaaaaaaaaataaaaagaaaaaaaaaaaaaaaaataaaaaaaaaaaaaataaaaaaaaaaacaaaaaagggggggcccttttt

SEQ ID NO: 256155 - DNA, 472 bp, Gossypium hirsutum
tcgcccacgcgtccgcccacgcgtccgggtccattccttctgctagggggcgaggaaatcctcgtagtggttttgtttcacgagggattcagaggaaagatacgggttctgctactcagcaatcaaaggtcagagctccagcacaggcctatgttgtgcggacctatgaagagggtgatgctacagatgtcatagcagctattgacaatccggtttcttcaaaagcgaaggaaaaagctaaagtcaccgacgagtagtttgaaattccctgctaggtatattttgagattttgtactcagagttatcagcatccaaccgacaaatcttgaactcaaccaagttcgtatattttgttttgtttcaagttggcatgtacttggtttttagtaaagtcatttggctatagatatatttttgtgacaaaaacaaaataacttttggttgctataataatattattatcagttaatt

SEQ ID NO: 256156 - DNA, 550 bp, Gossypium hirsutum
  unsure (1)..(550): unsure at all n locations
tcgggaaaattttagacaccgatcttccctttcccttccccttccccttccccttcgcttgacacctgatcttctgcttgccatcagccaacaccgattcttaacaccagacaccggctttcatcaaccttttttctatgttttgatttcggagcaataattgagggaatccgaaaattgagaaaactgatggaattgggaaagaaaatggaagcacagaagaaaagcaaagtttcaaagatggatcaatttgtgggtatacttcgcttcaccacctcttgagcgcaaatctcaagcctcaactctaccagcataatgctaatattatgcacaatcggagcccaccaattgtttacattttttgatcaaaccattgaaaaaaggaaagaaaaaatcttccatctacaacgctgaagcaaactctcaagtctcaaccttgaaanttgctggttcttaaaccctcaagatataaccggtattcctctntcagttctgtctcgtttaagcaatngcgtttggttgctgagaaaatgctggaatatataagttt

SEQ ID NO: 256157 - DNA, 150 bp, Gossypium hirsutum
tttttcacgcgtccgtctcattttatgattggctagggacattattgctcggctgtctttctttacaccattcattctttttgtcattttttgtcatctcaagtttttcatggccaaaagcagaatgaatgtttcgtgggatttaacttc

SEQ ID NO: 256158 - DNA, 472 bp, Gossypium hirsutum
  unsure (1)..(472): unsure at all n locations
ttgaaattgaagttgccggagcaaagaaagcgcttcagagactagctggaaataggctaaaaagcattttcagcaggacttggagggaataaccagtaaagctactcacctccccgccaactaaggaggaggtttggaattttctaactgtcagaactgctgtggttgaaaacgcggcaaacacacttcgtatactccaaaactttacctcaaaagcaaaatattaattattattatatgttttaaacactatgttaatttaaatgatgataactgaaggcatggatgcggtttttagggagtatcctcgtttttttttattagtaatatttgattcactgatgaaagctgagctgtaagagggagggtatgatgatngttatgtttccttccctctttttttcttttcctaattataatgattgtactttgttctataatgtaaattattaaaggattgtttgtttgttta

SEQ ID NO: 256159 - DNA, 559 bp, Gossypium hirsutum
  unsure (1)..(559): unsure at all n locations
ttggaaactatgaaataggtaaagtctaccttaaaggcagatgctgacagcagcagtgatgtaaatttgaaaattcactaaaaatagtaggaatggaattaaatagtgaataaattatttaatcgaaccttgatgaatctactttcatatggaagaaacgaaacgatcatatgagtcgtattttaagatatatttaagtttttgtggaatagggccagagcgatttctggatcccctgatctgactttggaaattcactataaattaaccagagataattagaagtcattctatatatgtatagattcctttttgagtctagtttcattagaaacaaacggcataagtattgaatccctgtacagggagatatataagtcgtaatgcatgaaggtcagagcagtcgaaccctgaaacaggggagaatttaactaataaactgtactaattggcctgattaaaaattctataaaaaaatttgtagatggatatatgagtctagtttcggngaaaatttacggaatcagtttttgagcttcggaactcgagatatgatttt

SEQ ID NO: 256160 - DNA, 299 bp, Gossypium hirsutum
tttattatgattacagtgtaatgatgccgggaaaggagagcccggttgacgcttcaagaggggaccaaggcaagggtttctatacacgtagcgggaggcgttacgatacggcgaatgatgaggtggcaacagctcaccgctcagagacgcgggagaagaagggattgatggattggatcaaagacaaactcccatgacagcataggatagatgaggaggacaccacacaaccaccagatgatgttgtcctaattgagaacgaccaccatgaaggagagacaagacagaagaagggattg

SEQ ID NO: 256161 - DNA, 579 bp, Gossypium hirsutum
tcgcccacgcgtccgcccacgcgtccggaagccccctccgccgatgaacttttctccgacggtaaaatccttcccactgacatcaagaagagcaacccctctaaacaaattgaccactcttcttcaccaccaccgccgccattgccacctcagaaagcagcagaaagctcgaaagaagaagagaagcaaagttcaaagccaacttcattttggggtttcaaaaggagtagtagcttcagctgtgggagtggttatggcagaagcttatgtcctttaccacttttgtcaagaagcaattcaactggttctacaccaaatgctaaacacccttcgccaaataaccctaaacacatccattcacataaacatgctgctgctaattctattactaatccatctttcaagtcttccacaagttatcatcaaaagcctccactgaagaagactgcttataagccttattacggtaatggtgttcatcctgttctcaatgttccttctggtaatttgttcggtttaggttcgatcttcttcaatggcaacaaagctaaagacagctgcaagaggaaatgatatgat

SEQ ID NO: 256162 - DNA, 437 bp, Gossypium hirsutum
caaaatccgaactctactttatggggctggagcttttatattctcctggttgctgggaaccttcttgatggtatcagtgattccacctattcctattcttaagggcccaaggagttttgaagtgctgacatcattgataacctatgtgctactctgggtttcatctacatatcttaagtagtgctaaagcaccaggttttcttattatagactcccaattttgaagtaatggataaccaaagattttcttggtagtagctcattgatcatgttattttagcttatgagagctgtgtcatatttctactttgggcattgatactaaagcatagtttgtggatgatttttttttgttgactggtaaaaaatgtaaaaccagttcaaagtaaagataggttgttgattttctgaattgtggtttcttatatgcttttact

SEQ ID NO: 256163 - DNA, 283 bp, Gossypium hirsutum
ttttcacgcgtccgcccacgcgtccgcccacgcgtccgcccacgcgtccgcccacgcgtccgagcaggccagttccattagcaatataattgcacaggccacaaagtaggttatgaccgagagtggttgcggattgccatttgtattggggttggttttggtgtctcatctgttgtgagaactctttctggattttagtttgagaacttaattgtatgtttatgaatgtagattcgggagccttttgtagaaatgatcacatataatgatcatattaattatg

SEQ ID NO: 256164 - DNA, 236 bp, Gossypium hirsutum
gtttttcagaaaaacagaatccccctccctccctccctccatttgcacacctatgtttcttcacttccaacaaatctgaaaccatctccaaaattaaagaccaaaaaccgccatgaccgatcaccaccagcgggtcggccagctacggtccacatctgagatcctgaaaaagttcgacgagcatttcaccgctcaccctttcacattgctcttgctttctttcctcctcctctctt

SEQ ID NO: 256165 - DNA, 266 bp, Gossypium hirsutum
tttgaaatcctctttcaatcaagggtgatgatgttgaagtagcatgtgtgtgattttcagctctaggatcagttcctggttgtgttaaaaccctaatcaggtctgtgcaagcatttgtgagaggaagtggttctttgttcatcatataacatgaaaaggaaaagcaagacaacagggctggccaggtattgtaacaggacaagctgggataatttatggggatgaggtgtgggaaaattttctccaaccttgcatattattattta

SEQ ID NO: 256166 - DNA, 357 bp, Gossypium hirsutum
tgtctgaattgcctgacagaaccagtggaaatttacctctgttgctaccattaagcacgaaggacaaggatagtaagaccaaagaagagaaccagaagctcttgaatgggaattctgtagaccctgctgattggaggcggagaagtgaagttaatggcaagacaatggaagatgcaaatggactccatgccgatactgcaatgaatggtgcgtagatgatggaagctgcctgctattactgtaattgtgctctgctcggatccatatgatcttttgattaaaggcttagcatcttccaatactggtaattgatttgtattcttaagaaaaacagaaactgagtagtgcacttgtaca

SEQ ID NO: 256167 - DNA, 365 bp, Gossypium hirsutum
gttggatctgtccgtgtatccggtcctgcaagaaacatgcctgatggtccaccaccagctgctacaatagggcctggctactctggtggatttgaatctttcaggggtggtggtgcacatgtgtatgactatgaacctcagaatttttctgttcctccagctgctgctagatacttaaatatgaactgtgctgttgaagctaaagttccggaaactgtgtcaagttctgcagtaggcaccagaggaagtactgtttttattagtagtgaggtttcaagggcaatcctaaagcttgatgatcctcaaactggtggctttgaagagttccctcgatcttctgagcatacaagtgctcagagcatttt

SEQ ID NO: 256168 - DNA, 333 bp, Gossypium hirsutum
cttgccaagaaagcttatagctttgcaaccatttcaccaccttcggttacattcaatcacacatttgctaaatcttccattgaatctagacacctttacttccccttcttcaactgcaaaaaaagaagagaaagctaaggagcttcaatggattcatgttgtgtagcttttaaacccaattctcctttattgaatacaagaaatggctatggctatggcaatggagatattaaaaatacatttttaggggaaagaacaagagggagtgtttggttcaatcagctctcaaacacattgagaggtgatgataagaaggaaaataagatcaaatct

SEQ ID NO: 256169 - DNA, 359 bp, Gossypium hirsutum
ccttttcgtccgctactctagaagagaaacttagacctcataaggaatgccacagagtagagttagaaagtctatgccagtcctgtgaagaaattttcagaaaatttcgggaggataccaagaagaattttagtgatgctctgtttgaatggagatcaaatcttattctacatgcccaagtggctacaagtcctcttgatcttagtcacgtaaatttcaactgtctcagggacatttcttctgtgtctcttaattttaaagtttaccatcctgatggtgaagagtgagaagcatttcaaagagagtggaaacagtttgatgattttttcattcccactacacccaatgttgcagacaat

SEQ ID NO: 256170 - DNA, 253 bp, Gossypium hirsutum
tctcgcgtccgaatccctgttcgggaagtaggaaaagatgaatcatggtgaagtgtacaaaaataaatatattggcatcaaaatccagtttgtgtctttttttattgaagtcgattctcatcttgtgctagtggtagtgtcctaaagagagacattgttgtatgaatgtaagcttgtgtattgttatatccatacctgaagtacagttttaatggttatggatggtggtggaacatgtgtattgatgaatatt

SEQ ID NO: 256171 - DNA, 374 bp, Gossypium hirsutum
tgtttcaggttctaaattgtccaaggctgtaagacgacgccttttgtttggttaagaaaatgataaacttttggctttgatgatttcaacaccaagatctgaagggtcctccgagatgtcagaatcatcaaagccacaaggtgttcaattaagtatcaccgaattttaccgtacaaccaaaacaccatcccaggaaaaactaggggaagatttagtcaaacagtcaagtagtccaggtgttgggtcatcaaaacagaagaggaaagtttcaggttctaaattgtccaaggctgtaagacgacgccttttgtttggttaagaaaatgataaacttttgccttttttgatgtacaagatatcccaccttaagatgt

SEQ ID NO: 256172 - DNA, 334 bp, Gossypium hirsutum
gttgggggaaaatatccatgaaagatttttgatgacaaacaactcaaatcaaaacccatcgaaaaataaggaaaaaagattcatcctttttccctcctccttctctgaaactaaaaaacactttcctgcaaatgcttcaatctctcctttccctttcttctccttcccctctctctctccctcccttccataacccatcttgctccccactcctccaaaaacccacttttttctcccctttatttccccattccaatgtccatcttcgcccattattagctctacctcgagaagaacctttcactacccccatagctgaagaaaaagaagaaga

SEQ ID NO: 256173 - DNA, 371 bp, Gossypium hirsutum
ttcacgcgtccggccacgcgtccgcccacgcgtccgcccacgcgtccgaaaggtataggtggtagtaataagagctctcagatatggaagaacgtcaagcccttcatcgagtggctccagaatgctgagtctgagaccgaggaggagtgattctctagctcttggtatggttgcatggctacttctaggtacaaatatgtttctctcttgatcttgttttttaaataaagtacagtgagcacggccctacatgctctctgtaatttgagtgtctggatttttcagctgcttatccttaagacatcttttccgtttgctttatatgagcaagttgaattcagtttgctattttatttttttatatatttttt

SEQ ID NO: 256174 - DNA, 348 bp, Gossypium hirsutum
gcttccatggcgaaaatgaggggttgcatagtcactgtggctttactcttgctgctacttctttgcttacaccaaacacctgtagagtgcaaagaaagactcattagacaactgtcttctcagccttcttcagctactaagcctcaagaattcaagattgggttcaaaagggtaattctcagcattgtgctgggaattttaactggattgattggagctattctttttgctttattgatcaaaattgctgttcagtacatcaatcaaaccccattccttaaaggtcctgttatattttctcccaaaatatcttccaagactctccaatcagcccttgcaaatgaaaac

SEQ ID NO: 256175 - DNA, 388 bp, Gossypium hirsutum
cttacgcgtccgttccccttgggttgcaaatcaatgccattgccagaatgaagaacaagcagagccattaccgaagaagcatgggagatactagggccattgaagtttggattttaagtacgccatctttcattggtcacttacagcaagatgatgatgctaatatgggaatgctcctttgcttgtggacacaacttgtgtattaatggatttttgtaatttttttccctttccttgtgcaagtgccttgtgtaacatggttatatttatgtatgtatatgtacatgtaaaaaaattgtgaattcagtcataatgttgtagtttgatttacacaatttgtttagtgaatttagctaaacaattaaatgaaaagaaaaagtcaaatata

SEQ ID NO: 256176 - DNA, 370 bp, Gossypium hirsutum
tttgggaatatatatagaaggggaaaaaggaaaggaaaggacgacgaaaaagacggggacggggacggtgacggggacgggtcggatatcgggtttaatttcgggctgggctaatttggtctttggagtttgcgttgacgagcgcgtcgtgtgggtcctctgtaggaccgggcggcttggtgaggtgggacccacacactaaaaaaaaagaggaatgtgtgataacggcaatcgtgtgttttgtttggttgtcgttagccgatgttcggattttttggggacaggataacggaggtttgatgtcggaacgtttagttgtcggggtgttaggttctttttttttttttaaatagagatttattaattatta

SEQ ID NO: 256177 - DNA, 272 bp, Gossypium hirsutum
attccatatgatggtactggtgtctatagaccacccaaattcgctcctgcggttgtggaagaggaccaaaagatgtcgagagaggagaggaatgctttaaggagggaaaaagaaactttgcgaaaagcttcaaggagtggttatattagggaaatgatggatgatttagaaggaaaacctgaagaggttagagaaattattggaactgaaagtagagaactcactagatatatggaaaagatggaaaggcgcgcgcagcaagaggaagaact

SEQ ID NO: 256178 - DNA, 362 bp, Gossypium hirsutum
tgatggttttgaaaacccatcatcgcaccatcgccgaacagccttggctccaccgtggacagtggtcggagtcacgcaagatcggactcggatggtggttgaagggtgtcagacagcacgtgggtggcagcagaggctgtgctgaggctgctggtcagaagaccctaggtgcggcacacctagggttttggtatttttgtttttttctgttaacttagggctagggttagattgggcttggtttgggcttgttttgtaagtggttttttttgtgtttgttggattgtttattttgggcccgagtaaaatttgggtcttacagattttatattttatattagttacaatgaattttatttttc

SEQ ID NO: 256179 - DNA, 234 bp, Gossypium hirsutum
tttttaaaaagtaacaaggcaagtgatggatcacataagggtgaacctcgaactggaagggtattgtcgttgagtgacatactatatcgctcagaagctaacagtgatgctttacaagatggtccaagatctgaaagagaagactctgattttgatgaggagctggaattagattttgaaactttaatatcaggtgatgaagggcgtgatgttgaatccaacatatttcatgga

SEQ ID NO: 256180 - DNA, 315 bp, Gossypium hirsutum
gtgcttttgaggaacaaagagaaacagagtttttcctttccctttttctttggtaaatattttgtttgaaagggaaggaagagacatgcacaaatccaagcttagaagaaaattcttcatgagtgttatttctctttcagtttaacaaatcccaaaggtcactgatgtgcgagcacgttaacatatagcagcaaagatttcttcttagcactttcaaaatctctcacggttccttttataagtcaggatgcatttgaagtttgaatggtaggttaccgaaatgcaaaccttgcataaaaaggattgtgtgttaag

SEQ ID NO: 256181 - DNA, 313 bp, Gossypium hirsutum
tctttagcagatttacttgttcaatatctgaagaaattcgttgctcctgatgtgtctattcttagttcagattctgccattaatgattttgttgaagcagctggtactttctttcctatatacataggttttggcttgaatgaaacagtgatatataatttagctgttaagtacaagaaaaaggcctggttttcggtggcaaaggatttctctgatgatgccatggtgttgtatgactttgacaaagttcctttctttggtagctcttcatccaagctataagcagcaaagcgttttctatggcccatttgaa

SEQ ID NO: 256182 - DNA, 131 bp, Gossypium hirsutum
tttattatctcaaagtgctttaagaagatatatgggatttatgtcctcaagtcttataaatacaaaaatgccgggtatagtttcttcaccctctgatatctaaggcaataatgaggttggttcagaaacac

SEQ ID NO: 256183 - DNA, 275 bp, Gossypium hirsutum
tcgttaattcacagccttagaaaatcaacttattaaggtctgttccagcaaccaccgaattcaccacttaatcaggtggtcgatagcatatcaaaaacaatcaacggcgccttaggacctttccaaccttgatctcaacgaagtgaacagatccatggccgtttcgcaaggtacggatgtgctggcgtggctggtggtgtactggagcgtgctagggcagtggaggctgaatggttgcggcgcacagagagagccctagggtttctgctcttgaa

SEQ ID NO: 256184 - DNA, 173 bp, Gossypium hirsutum
tctttaagttaaatatgcagaattcatattctgtttttttatatgcatatatacatgcagatcaaccagcactgatggatgggattatgatgatgaaggttaagcaagtactgctgaagaatgaattccaattcggtgcagctgccacctccatagccacttgttcatcttaa

SEQ ID NO: 256185 - DNA, 224 bp, Gossypium hirsutum
tttttctgatgcacgaggactgccgacacctgaagcattgagcattgtaattcgaaatgcagtacggtttctcaacagtcatgctattggtgcattgactcaatattgcaaaacgtttagagcaagatagggattcttctgatcctacagtgagggggcaaattcaaacagaatcagcacaagcaggtcttacaatgcagtacttacgttcccttcttttagag

SEQ ID NO: 256186 - DNA, 140 bp, Gossypium hirsutum
tttttaggaaaaggtctagttctggtgagaaattctccttccctagcaccccgaaccaagatcttgattcggagtttgaattcgggtgttttaccccggattcaccttctcaagatccatgttgaaccttaccagctgat

SEQ ID NO: 256187 - DNA, 174 bp, Gossypium hirsutum
tcttttgttgcagcctgtgttgttacgcttcgttggaaaaataacaccgtaaatcgagtttcttcaaagtgcatcttaacttggtgtgatggagtactatgtattttcctagtggcatgctgtggttttgctgttggagatctttatcgttatggcactcacttcatttttatg

SEQ ID NO: 256188 - DNA, 144 bp, Gossypium hirsutum
cagcatgttcaacttctttgcatttattcttcaaaacccattttaaatctcccaaaaacctcttcttttatccaaattctatccattttcagaccaaagtttccaccttttcttccaacaacttaacattattctttaaaaaca

SEQ ID NO: 256189 - DNA, 212 bp, Gossypium hirsutum
ttacgctggacggtaaagatagtgttgcttcgttgattggggaatcagatctatgtgtttcttttagggttattcagagtctttgcctatgtcgtcttaagattaacaaactgttgtcgtgtttgcttgatttgacattgatcttgactcttaaatcttctatctgatttgtattgaaattgatttcctaaaaaataaaaaccctaacaaag

SEQ ID NO: 256190 - DNA, 192 bp, Gossypium hirsutum
atttgctagttggatacaattagaagatgatatgtagtgagaattctttagctccacatggatgttgggtggttctaaggcgatttaggatactgttttttcttgacctgaaagtttatgttttatcattttttttgagggttcatgtcacatgaatcaatcactttctttgaatttgccttaacacattct

SEQ ID NO: 256191 - DNA, 417 bp, Gossypium hirsutum
tctatgcggattgttttccgcttattgttaataaggaagtaacggagtatcagtggaatggctatcttgagaaccccgaagagtggacggaagccgagtattatggcgacactgtcgaactagaaagtatttcaccactagattttgtttcaattgtggatatcaggtataaagataaaacaatatgctcaaaagtgctgtggggtattcctaatgcaaatggatccaatagttggtttcacaactgcccgtttcggattgatcttctcaattatgcagctagagatgatgatagtgaaagtgaggttacccttacggtttctgatggcctgccacctattacttttatggaaaaggaaaggaaagatgggaagctatggaaggagctacgagacggccttcggcttagttggatcg

SEQ ID NO: 256192 - DNA, 323 bp, Gossypium hirsutum
gcttttaatacatggaaagatatcatcattcctggaaatgttgatgatgggatgacgaaaacaggggctactgttttccagccgttgcctctatctaagagaaagtatttggcaaactatttaggccgggcgcaaaaaaaggttggtcgtcttaagctgattgagcttgcaaagcaatatccagataagttggaatgtccagagttacagttcagtggtcctaacaaattgggaagagtggaatattttcagcacctgggcaattccaaattttgcctcgcaccacgtggagagtcatcttggacccttcgtttttatgagtc

SEQ ID NO: 256193 - DNA, 335 bp, Gossypium hirsutum
ctagagattcacccgaaatctctgttgatcaagaaaagaaaacattggaatatggaagtgttaaaagcagcttggtgtctgccaaagttagtgacgggactagtagtcttgccaagatcagtgaccgtcttgattatgttgagagtggcaagagggagtaacgaagaagctatgctttcgtttacttcaggtgtaattttaccttcatctggtgtggtgaaatcaagtgggggtgccggggattcagatcactctgatcttgaagcttccgttgttaaggaggccgatagtagtcgagtcgtagagcctgaaaagaggccttgaaaacgggggag

SEQ ID NO: 256194 - DNA, 392 bp, Gossypium hirsutum
gccctgttgagcttgactctagtccgtctttgtgaaatgactcggaggtgatcggaaatgttcagggtattgggctcctgtccggcatgaatgcatcgagcacacaatacatagattttggatttaataccggtaagtttaacggcagctctctaagcgtattttcaagggagaacctgggcttgcggtagtcggaggaagaggacgattcatgatggcaaaaggggttgcactatgtaaccctttccttataaatgccaccactgtcattatggaatttaacgttacggttattcatcactaggatgttatctccagactcaatcctcttggattttgaaagagtcatatcattctgttccacttgattagaataaatgtatgagatatat

SEQ ID NO: 256195 - DNA, 343 bp, Gossypium hirsutum
ctgagtccatgagtaaagttggttgaaagggtgtaaattacctttgatgcgggaaaccgaaatgaggtatcaaatctccatcgtagcaacgatgaacctgtttagagtagaatgcttattttcgctgttgattaattattgaaaaatccttaagatcctggtgatatataagatttgcatttgcagttcagtgtaacaaaatttgaacatcatttttcagtgaaacgaagaaagttgtatttactatttgctattttttacaagtagaaaatttattaactgaattttatttaaattgttgtaataaattgaatttaaacacattacttataagaaactaatt

SEQ ID NO: 256196 - DNA, 332 bp, Gossypium hirsutum
agaagaaaaaagaaaagaacccttagtagaaactccatgtttcgctgttgacctgttcatggtagtgggaatttgctctagtctgagtaatctggtgatagttaatgatatctgtataacaactatgttgctttaaatccttaatttagagtaaatatgagcttagttggatgtttgctgtaatttttctgggctcatgcttttacatctgcgaacaataatggctttttaagtcataggtttataatgtaattttatctacttgcttatatataaaactagtttgtacctgtgaagtcgtttatataatgttacgatgtttccagctgcta

SEQ ID NO: 256197 - DNA, 359 bp, Gossypium hirsutum
ttcttaaactatatttctaaaataaaaggggtgttttagaagtatcatatggaaatggttattttatttgtaggtcttttttttaatctatttatgtagtattagccttagaaaatatataattggatgttattcatgtttaaatccaataatttcttcagagaaaagacagcaacattagtcaactttgtttacctaatgtcttaatgatctacagatgattgcatatatgactctgatcattgtttgaaaatgtttatgtcatgttttatatgtacatagatattttctttcatcctttgaaattcattgtggaaatgcttaatgatactatttagttaatcattttttttcatttg

SEQ ID NO: 256198 - DNA, 397 bp, Gossypium hirsutum
tttcggataacttccctcaaatgtttgtccataattcgatggatgctgttagtgaagatcatgttatgtcactcgagaagttggaggttgagttagtcgagcttctgaaaacaaagagaggggatccggtttccatcgcatcgctgcctttgttgtattacgagaagtacggcaaagttctgcaggcagatggttatctcactgagagccagagacatggcaaagcaggttacagtttgacaaagcttcttgcgaggttgaaaaacacgatccgagtaattgacaggcctcacggacagcattccgtcattttggctgaagatgctcccaagtacatggaaaaccgaaatgatagaaacgatccaggtcccgatgtaagtggatcaagacagatata

SEQ ID NO: 256199 - DNA, 408 bp, Gossypium hirsutum
tggtacctaattgattaattaatgtcttaatatcgtaaattgaaaagttttaaaataaattttaaaatacgatccctttttatgaatgtcgagtttaaaagtgcttgaattggatcaaaacgattgctaaagatttcctcgtctcgagacatcagagaatcacatcccgtaagttaggacgcgataccttgaacttccgagcgcaagtttatctttaattttaattgaaatttcatgtgttcttaaaactcgaaaggatatttggctatttagaatcaacgagagaatcgaaatcccgtaagttagggcacaattcttcggtgttccaagacgcgaaacattgtcttattttcaagattttcttttggtttaaatttggatctaaaaattttagtgaagtatttaaga

SEQ ID NO: 256200 - DNA, 206 bp, Gossypium hirsutum
tccgcccacgcgtccgaaatgaaattcattccacttccttactatcactaatactctacactaagattatgaattttcttaccgcaagtaataacaaaaataaggttaatttaggtaagaaaatcaaaatgctcaaaagcattgctagagactatggaagtggaatgaatggctttagaaattgtatgaaatgaaattcatattct

SEQ ID NO: 256201 - DNA, 422 bp, Gossypium hirsutum
tcactaattaatatgggttctttgatcaaagcgactgtttggtcaacctgttttgccgcattaatcattgcaatagcagctcaaatggacatgccgcccggcatggtaatgccaccaggctccgtcatgccctcggcgcccacgcccaatagaagcggccacgttgtatctccatctgtggtgcttggactccttgctttcatgttttcaatttttgttttcaaccagagagcctgatcagcctctctctacataaatgcttggtatttcgattttcatgctttttttttttttttaaatgtttttggtgtctccgtctgttgctacgctggtttgtaatacatttctctttcttaaattactatctatgatataaatcttctttctcctggtttgaggaagaatattagattaaatatttc

SEQ ID NO: 256202 - DNA, 397 bp, Gossypium hirsutum
gagagagaggagaaaatggagaagcaaagcaaatcttatggtgttgttttacctacaatggatgaagatcatgaagaatttgttttcattgatgaagattatgatgttgatgatgatctttcccattgggaattcattgattcctctgttaccgattctgatgatgccgatgatgatgtctcgtttcatcgtggtgaattattgagaagaaacgtagagtcgtttatccctttaactttcccctttccccctataacggaggtgaaaaagtccatcccgattcctgctccgattcaagatactgatgatcgtgatccatcacttgatggatctgatgatcaagatgatgatgttgatgcatcatttcatcgcgacgaattatcgagaagaagaaact

SEQ ID NO: 256203 - DNA, 413 bp, Gossypium hirsutum
ctgtcgcgtggggtgccttagagatgtttgcaaccggatactctacgataaaagatttagtgcctttcattacccagtcactgatgaggacgcgccaaactaccgctccataatccagaatcctatggatgttgctactttattgcagcgtgttgactctggacaatatcttacctgttctgcttttgtgcaagatgttgatctgattgtaaccaacgcaaaggtttacaatggagatgattataatggtgcaagaattgttagtagagcttgtgaattacgggatgcagtacatgggatgctgtcacagatggaccctgcattggttgcttattgtgacaaaattgctgctcaagggggtccagctcatatgcctgatgatctagggctgccttctgcggtacctgttatgc

SEQ ID NO: 256204 - DNA, 249 bp, Gossypium hirsutum
tcgtcagctccgtccacccaaacccatcctagcccataaacacctacctcttcaaccgacctacagccactgggtagcgaaatcgccgctgaatgtcaactaactcaaaccacattggtcgcacccagataggagcagagtgcgatttatcgccccagcgttcccttggggaaaccgatgcctcctcagacgagccccttcctttggtaggcgaagactctgccgccttcgatttggggacccaaaaca

SEQ ID NO: 256205 - DNA, 133 bp, Gossypium hirsutum
taaatttggcaaactaaataataaaagtatcatgaaaagactggtttcgctaggctgccaagttatgtacatatgtttgatggtatgattttcaggatataattgtaatttcagagttaggcgagctttgcat

SEQ ID NO: 256206 - DNA, 368 bp, Gossypium hirsutum
tcgtccacgcgtccgcttcatttcttcgtcaccagaagaagaaaaagaaaaaaaacagtttccttaaattttctaggaaatttagagaatggatgattacacgagagaaatgatggatttgaaaaccctagttacacgaacccttgagaagaaaggggttctagctaagatccgggctgaacttagagcaagtgtctttgaagcaatagaagaggaagatcgagtcattgaaaaagaagaaggtttacctcctgcattattgagaagttgcaatgatcatgctaaacgacttcatgcttctcctttgggaagacttttaaccgcactaatatgcgagtacttagactgggcgcaactaaatcacacac

SEQ ID NO: 256207 - DNA, 178 bp, Gossypium hirsutum
cctacgcgtccggcctaggcacgcaaacttaggctttgtcctttttattccagtgaacgttacaagttgattctcacaatagagctcatatctgaacatggagttttcaaaaaaatctcaggtgtttgagacactgatctcggctatatttttattggaactactgagaccgaatgta

SEQ ID NO: 256208 - DNA, 121 bp, Gossypium hirsutum
ttaacaaagtgtggtagaaggagcactgaagggtatttccgagttctttgaactgacaaatcaggaggaaaggagagagtacttaaagaagaatcctatggataggataaggtggggtttt

SEQ ID NO: 256209 - DNA, 230 bp, Gossypium hirsutum
tccacgcgtccggctcaacccaggaaagctccaaaaaatagtcctacttctgttttacgatctacatttcggtgtctaagactgtcgcgaaagatggataaagtggcagagcttcgaagcatttcagaggcagcagcagggtgcaatagggataggctgctgttctcgtcgccactgatacctgctaactatatgaaggttggacgtggttcaaggaaaagggaaccctc

SEQ ID NO: 256210 - DNA, 222 bp, Gossypium hirsutum
aattaattaatgtaaaacgtgtggtttgttccaagtttttaaccttatggattctacttgttccccccctttgagaaatgaatgattgtactgagttgtgaaaaattcttttgaatggtaaaccttcatagccattgaaaattgagacttggaaggggtatcaaaattgtaatgcttgttgctatcgcaatatagaataatcacgtttgtgctgtgcatgcc

SEQ ID NO: 256211 - DNA, 121 bp, Gossypium hirsutum
gatggcacatggtggtggaaaaaggtgcacatatctgggatgtacaaagggtgctgaagggagtactcctttctgtaagggccatggagggggaaaaaggtgtgcatttcaaggtggtggt

SEQ ID NO: 256212 - DNA, 370 bp, Gossypium hirsutum
ctcacgcgtccgcaaatcccttggccttgacctcatcgcagccgacaacgggcgccttcattcctcaccaatgatttacagccccgtgattccttccccaccttcgatttcaacgaagtcaagagggatcaatggcggattcgaagggtaaggtctcgttttccttttttcttttgtttttaaatgcaaaaaattagaaaggaaaacgaaagaagcagttagagaaaaaaaacgcaatagatctagagactcaaaacggaaatcacctttctttgcttttttctatttgattgtttcgtatgcgtagtgtgtgtctaaaaaagatacaatggcattgttcttggctttatagccgaaacagagtaagaaa

SEQ ID NO: 256213 - DNA, 259 bp, Gossypium hirsutum
cctacgcgtccgctcctacctctcaaaccaaatagaaaagagaaaaagaaggttaagttttcttcaaatttccgtcccaaataaccaagctaaagactcgggacgtcgtgggataaaggaaaggcgaaaactgtagacgagtagcttatctgatttcaattaggtctcatggattcaagaaggttggcagcatccaggtttcaaatctcagctcagtaatgtttgaatcgtcaaatgaggtgtgttttaggttgttttt

SEQ ID NO: 256214 - DNA, 315 bp, Gossypium hirsutum
tcttgttctgcaaaccagaatgcttcctcaatgtccattttcatggcttcaacgtctgctcttgcaggaaatgcccaaaaccagtcagggttctccttgattggctcatccgaattggaagggatcacccaaggacgtcccatgaagccaaggagcactgaggcgctgttgcagtccccaatagacatggacattaaacaaagagaggcacgccacgacgttttcatcaagtatggcaaagagggctactgcttcatgggaaccgataccaacttcatgggaggtttcgggcaatatcctatcgctgaaatggca

SEQ ID NO: 256215 - DNA, 137 bp, Gossypium hirsutum
tgaaaatgagaagcacgaagaaactactactcagaagacaaaggaaaatgtggatggttgttgtcagggtgctaatgggtttacctgttgcatgactgctagttaggaagcatatgaaaaagagatatgtgaagagc

SEQ ID NO: 256216 - DNA, 300 bp, Gossypium hirsutum
tgagtggcggaaacatatttgaagatggtggaatgatcaagtcactgctctagtagagctttctgaataggaagattaatggagcagtaaatgaagtaattggtagcaataacttatcctccgcacatgtataagatatgcttgtctagaaataaatatgaactttattaaaagtagtagaaaagtggtagccatatagactgacacaaccattcttcattgtaaacttcaactgaatatcatttctttcttattagatgaataccaatggttaatatattaaaaaaagttattaacgtc

SEQ ID NO: 256217 - DNA, 246 bp, Gossypium hirsutum
aataagttggcatgaaatggattcaaatggatcaaacagcctagtgatttctaatgggtcaggaaccattaataacaacctttcaacccacactgatgtctatcattccgatggaacagcaaagaataggaacagaactacaaaagttgaacccaaccatggggatgaatgggttgagcaagatgagcctggtgtatacattacccttgttgcattgcctggaggtatcaaagatcttaagcgtgt

SEQ ID NO: 256218 - DNA, 145 bp, Gossypium hirsutum
ctaagaaaatggggttccaagaaaggtggaaattgatcttatagcaaatggcatttttagttactaaagtcggactgtcatccttggtttaatctgcaaaattacattaccttgcatttgcattttcatgctttggaattttaac

SEQ ID NO: 256219 - DNA, 403 bp, Gossypium hirsutum
tcgttcgcgtgggatcacatatcaatgatttcgattatgaatacagtcgaagggtttttggggcaacatgggatagcattagtcgccctatgtcacgtcgctatgacacaagtgacccaatttcatatcccttttactgatatttattatgacagctacatgagggtaaaattcttacatgatgcacttaaaattggactgttgtagttattcaaacaagataggctgtagagttgttagtcagaaggggtaaagctagcattttttgtaagttatgtctttggtcccagcattgttcgtttatcatactacaatttcattgtgtggtgctatttcatattttcacaacctttcaaatattgtatttttgtatggttatgactgcatatttgctagtagattg

SEQ ID NO: 256220 - DNA, 133 bp, Gossypium hirsutum
atgtttatcactcgcaatgtgaaacagtttgtgaccattgtacagtgataaaagattctggaaacttgaataaggtttaaacttgtagtaagtgagaatcttgttggtgataatgacaatagcattggtttct

SEQ ID NO: 256221 - DNA, 192 bp, Gossypium hirsutum
gttattttgagggctttctttttctttaatggttgtttctctgctttggggtttgatatttagtattgaacttgcttttgggtccaggggtcaacatgccgatggaagaaactatgggttttccattttgaagtggtatggatgtatgtatgtatgtatgtgtatgtgcatgcatgcatgcatgcacgtatg

SEQ ID NO: 256222 - DNA, 249 bp, Gossypium hirsutum
gcgcattgataagcgagattaggttgattattatgcctggggttctcttgagttgtccatgtactgcaaaaccgtgaaggaaacactgaacactccggatgctttgttaatctaataacatggattagcgatggattgcgtattatggcaacaatggtagaaaaagattattacatttaaaagtaaaaatgtcatctttactgctagttttttcttgatatgacctcaaatggattattaccgtgcttc

SEQ ID NO: 256223 - DNA, 466 bp, Gossypium hirsutum
atttccctagggttttgttggttctcttactctgttgcaggcaaaatctagagttttcaatcgacaatggtgggagttttcgaagtaggcgctgttccgtttaaccctgacggctggggtccacccgattccgccgccgccgcatcgatcaccactactctccctctccatgttcccttcgctcctttctcccgctccgacaagctcggccgaatcgccgacttcacccgctcttttccttcctcaaacgctaatccgtccaaccgcccttcgtcgaggcacggggctgggaaccctgcggactcgccctttgatttctccctcgacgtcgacgctttccccttggctaaccccgaagacgattcctcattccgtttagtcgatgccaagcctccgccgcggcctaagttcggtcctaagtggcgtttcaatcaaaacagacctcaactccctcaaaggcgagacg

SEQ ID NO: 256224 - DNA, 251 bp, Gossypium hirsutum
cttcgcttccgaatagagtgcctacccgtctttcatttctagtggggaaaacaagatagattaaaatctatgatctgtttcctggtatcggaaaatttatacttgcacacattggtaatgtaatttggagtttatgttgtgccctttgtgatttatctgatattttcagcattcctgataatcaaaggctcattttttgctaccgagcttaatcctatttgcccaacaacaataatcaaataaagcgttac

SEQ ID NO: 256225 - DNA, 466 bp, Gossypium hirsutum
cctactcgtccgggatttttgttttaggatctcaggcagtgccagtttccttttaaccgattttatttatcaaattgtaattaaaagaaactttgaaaatatatgcggctcccaattgagcgattaacaatttcatttcattaaatagaaaaaaggaagtgattatttaattttgatttgaaattgaacattcaagtctgaccgttgatttcatcggttgttttctccgtgatcgtcgtgatggaagtccggccaaatcaagcggtggacaattcatcaacctcacctcaacagcatcggcgccgtgcagctgccgctgcatctaaacaaccagtttccgctaccaacgccgttgataccacttccgttactcaaaggctccaaaaggaactaatggctctcatgatgagcagtggagatctcggagtgtccgcatttcctgaaggtgaaagcatttttacatgga

SEQ ID NO: 256226 - DNA, 293 bp, Gossypium hirsutum
ttgatttagggagagttcattgggggttcagatataattctcaacatgcaccagaatggagaactgaaagaaaagctcaaggatattgtaggcagtccgaagctcggataattcactgttgaatctcaagattgtagtaggtttttgctttatttgaaagtatttttgtttgccccttttcttctctggaagatgataaagataaaaaggttccatatgttactaatgtatgatgaccttgacttgttaaaaactttcaaaaaataatcttatttgttctactttatttattt

SEQ ID NO: 256227 - DNA, 396 bp, Gossypium hirsutum
tctctttcgcgtccgcccacgcgtccgaccacgcgtccgtccacgcgtccggccaaataattattcaatgtctgaagcaaggtcctatcttgtcctttcccgatgtagcaatgacttaacaggtggatctcatggcggttcttctgatggatggtccatgcgcacattttcagagcttgaggcctcttctcaaagagaaaggtggtcttttgacagcgaacacttaggttctggttatggcaagataagtggatgtagcagcagattctcatactctccttccatagatgcacgaacttgtggtgcttgctccaagcttttagctgagagatcctcatggagtagcaatgagatttcagtggtttctgtgcttgtctgtggacatgtttatcatgc

SEQ ID NO: 256228 - DNA, 118 bp, Gossypium hirsutum
tcacgcgtccgcactaaatggccaccaaagctgagaaataggcagccggaccgaaaccggcggtggagaaaaagaccaccgatgcaccaaaagccccggaggaaaagaaaccgaaggc

SEQ ID NO: 256229 - DNA, 138 bp, Gossypium hirsutum
tccacgcgtccgcgttttctgtactcgtggatttctactatggaatgttagttttggatttcaatgctcgcacttttattgtcaatttctttgtgatttatgtgtcgattttggaatcataaacattgtgtttagctg

SEQ ID NO: 256230 - DNA, 353 bp, Gossypium hirsutum
ctcagttacccgacccgagattcaccaatattgattttaatcttgatttctaatttcctaaagagtgggatcatccatttcaattttgggggttttcatcaaagaacagagagttggctagtcgagaagcttaagatattcgtagtgcaagagccagttgtagctgcctcttgcctcatcgctggttttggtctcttcctaccagctgttgtaaggcccattttagattccatggattcatcaaagcaagtcccacaacctgctttaagagacgtggtttcaggtgtgattgggaaaaaacagggttgatatgatttatggatcgaaaagaggcaaaaatttatgtgtagctc

SEQ ID NO: 256231 - DNA, 329 bp, Gossypium hirsutum
tactacttttttgcccacgcgtccggagaaagaggaaagaaagaaactgattaaacagatgatggaacgagatattgaaactagaaatggtgaatcccttgacaaagcagcttgtttaggaacagaggacgttgatttaggggcagagcaatcgagtcgttcgcgtaagaagagaaagaggaaagaaaattcttttgtggagtcatcgggattgaaggaagaaccgaacttcgtaatgaatgattccgtgtcaggtagagattcaaatgtacagactccggggaataatgtttcggagagtcccttgaaaggacaatcggctgattcag

SEQ ID NO: 256232 - DNA, 266 bp, Gossypium hirsutum
ccccctttacaaactgatttcgcttcggttttataactgattacaatagaaaaaaatcgctactatttctcagttgttgctgctatcttttgctgttttttgccctcttttcttgctgtttgcaggtccttggaggtgcaggcgatgggacggggccagggagttgttgagcctcgagcgtcggacgtgctgaccaggcacgtggggagcggcacatactgctgctagggtctcttggatgctgaaactattttaggtctgggcca

SEQ ID NO: 256233 - DNA, 213 bp, Gossypium hirsutum
cgaatccctcacttgtctcataatgctctaaaatgccactttcttcgccatttaagttcttaaatgccgaagtcgaagaaaattgaagggcagagactagtgatgaaggaaagaattttaggtgacaatgaaagtgatgccgccgggggcaaagagattagaaatcttgatcacgtgctttcccaatttgtatacgagggcgatcatggtgag

SEQ ID NO: 256234 - DNA, 398 bp, Gossypium hirsutum
tcctaccactcttccggttcggatcgcggcgacgtgggcggttcgatgcccgcgacgtctcgagaagtccactgaaccttatcatttagaagaggaagaagccttggaaaaagttgttgaattcttccagtctaaatatttcaagaaggattcagtcatcacttaccattttccagcaaattcagccactgctgagattgcattcacgacggagggaaaggaggaagcaaaaatcaaagtagagaatgcgaatgtggtcgagatgatcaagaaatggtacttaggaggaacaaggggagtgtctgcaactaccatttcctccttagctaataccctctccgctgagctttgcaaatgaacccatgccgttttgataccaagtctttcctactaagaac

SEQ ID NO: 256235 - DNA, 356 bp, Gossypium hirsutum
ccacgcgaccgcccacgcgtgcgcccattcgtacgtttttttgtaccccaaatctctccttctcttggcagcaacttacaaccaaaaatctactagctaaacttatgctacatcttaaaacttaagctttcataacatgtagaacccttaaaccaattcttgaagctccatagcttcatttcttaacttttacgcacatagaaaggttaagaaccttatttgcttgctggcttccctaatttttcatcttaatccttatgaaatctgatctatatagaaccttccacaacattctcttctctaaagcaaccaaagatgatgaagaaaaagagggaatgagaccaagtggggaagaa

SEQ ID NO: 256236 - DNA, 335 bp, Gossypium hirsutum
  unsure (1)..(335): unsure at all n locations
atttttgaaaaacttatcaaaactttgaaaannnctcacaatctttagaacttttcaagccccgatctgcaaatctgactgttgaatcatcatggaacttcaaccatggcttctccccaccaccttcaacatcttggccgttcgaatttctgagacgatgcttgaatctcaagtactcaaaaacccgaaattgatcttagtttctgtttgcttctcatcattttatttttgtttggttctgtgttctggacttatggttttgcttgtgatgttaattattctcgacttttcctctcgcgaaatggttcagggtcaataataaaaataatagcagt

SEQ ID NO: 256237 - DNA, 389 bp, Gossypium hirsutum
cttacgcgtccgcccacgcgtccgcccacgcgtccgaaaccccatattatataccatcagaaaatgctagatccagcctccgatatgcttccgccgccgtcttcccccaccatctcttccgtttcctcttctgatctcgacactgagtcgacaggttcatttttccatgatagaagcactacattgggtactctaatgggtgtgagttttccggccattactttccgagcaccgtcacggcacaaccaccgcgagacgcaacccgcgagccccggttcttccacggcgaaacccaagaagaggagggcgttgacggcggctttcgggtcggagcgttcaggtagacggcggaggaagtggtggcagatttgccgggatggggattcaaa

SEQ ID NO: 256238 - DNA, 323 bp, Gossypium hirsutum
attacatttattaggacgatgcagcgagttgttgttggcatcgccaagtggatcatagatcatggcttcgactttccttctcaaaatcgtggatttgttcctttcttcttcttcttttttgctttattctcctaatcaattataattggttctccccccccccctttttttaattccactttatttattttgtcggtgcactatattgaggtgtaccattcagccggaaaacaggggagggaagaaatgtcggactctgtatttctattgtaaaatgaactttgagtaccatttaacaacccgtaatagaaaattgctttatt

SEQ ID NO: 256239 - DNA, 199 bp, Gossypium hirsutum
gatcccttttgcacttaaggaacataataacatttccttaatttccattgtttatgtgaatttgaagcatagttgttcttccacaagcgaaaaagataaagtactatgtaaccatcccatcccatcccatccccctccccccccccctatctcagattctctgcatcaaagtaacttgagtctttatatatatcacctt

SEQ ID NO: 256240 - DNA, 428 bp, Gossypium hirsutum
tcgattgccgactgaactcccccgccgtcatattgaagtgccgccgagtccatgtaaaatagaccaatggccacgggaacgccaaagaaatctgggcctcctaaaatagttactctgaataacgcattgaaactggccgaacaatggataaataaaatgaatggatctgcagaatatgaagtagtggaagcagaaccagaagctcggccagaaaggcttggactcggagcaaaagttccacgtcaatcaaaagttggactctctaacgacccagttgagagaaaactatctgctaagttgggtgttggaaaaagaaaagttttaaaaaaccaggattctaccatcccttctagtaaagacagggtcgatgaagatgatggtgatgaggatttagatagtagaagtagtgcattttctaagaagagagc

SEQ ID NO: 256241 - DNA, 409 bp, Gossypium hirsutum
tcggtaaaatcttatctagcatcgatgaggatcaggaaaagacaggttccgctacctttctcttccatttcaccagtacccctttcatcagatcccaactttaaccgccctccggtagcggtggtgcaactcccgctacggcagcaacaaccatccactccttgctgctttgatcctcactacccttctcaatctgatcatccgatcggccaaccactaccaacccaaccccgtgatggaacaacacatggagaacaactcacgaagaacaaacaagactacttggttttgaagactggaggagaagaagaagtggagaacaataatgataccaggtaagaactgaagggctaaaaaagtttaaattaaaaacaaaaaccaaatttcttctgttatttcataaaatctt

SEQ ID NO: 256242 - DNA, 239 bp, Gossypium hirsutum
gtctctctatgcacttctcttctgcctgtggcacccggtgtgcgattctgtggacccgtgattgcaactttaaatttgttgggtacagacattggccgcatattggttttgaagccaacctagactggctcttttttttttcctaaaaaaaagtcaaaactactttgatttgtattattattttctgcttaagtcggctcttaaaataccttgtatctaattaaattcctattttctat

SEQ ID NO: 256243 - DNA, 383 bp, Gossypium hirsutum
tttattacgcgttcgaagaaacagagcaattgaaagagacctaaggcttgacagccgagcactcttacatggttggagccatgacttccaatgctggtgctcttccttgccgcagaggcaagcaatgctagtattatccatcttttccccaatcaattaaattggctgaaaatcagcctttttacaatctgtttgattttccccctctttccatgattcttaaaaaaaaaaattaaagcactgcctaccccaatcaaatatccatttatactatatatcccctgtcttgttttccaccccatctacctgcttcatcacatattttgacgacgtgtacaaatttacacattgtcattatatttggcttgtcctgccagctcact

SEQ ID NO: 256244 - DNA, 294 bp, Gossypium hirsutum
tcgcttcaagctggaaaagccaaggcttagcacttcttcaagtagagtgttatttaatgttgcatttttataaacgccactaaaagttatgacctatagttagcaccgtttgtgagaaaagtgcagttaaaggtcagtctttagcggggtttgaggaatgcgccgctaaaggtcatggtctttagcggcgctttacccacaaacgtcgctaaaggtcatgatctttagcggcgtttatttctggaaacgccgttaaagttagcgacgctttcattagcggagttttttgcggca

SEQ ID NO: 256245 - DNA, 308 bp, Gossypium hirsutum
cttacgcgtccgcccacgcgtccgcccacgcgtccgggcagatcccttgtccagtacaaccaattatggctttggccgatatgtttgagtgttgatggaataagtaaagctgtcttccttgttggagctaatgtgagtccgtccttttgttggagtcagtttgtgctgttaattagatttatgtaagggtgtcctaatgttatgtggagtctgctgaattgggatttttggttttgtagaaaccctttggtgtgtttccgttttctgtactcgtggatttctactatggaatgttagttttggatttc

SEQ ID NO: 256246 - DNA, 339 bp, Gossypium hirsutum
gttattgtattttcagattgcacccaaattggggaaaaaaaaaagactcaatttttctgtgcataaaaacccgaatatgaggactaaggagaaggaaagttattgccattttggcaattcaaaatctcaactcccagttgctggtgcttttttttcctgttttggatgtgaaagaattagtcatttacttttgctgtaactgctgttgcatttctggatatttgcagacttgtatttttctttctttgaagtttctttctaaatattgtcttgagttttatgaaagcaaatgaactgaatgatgaaatattataggcaaatctagtgtgcaattctggt

SEQ ID NO: 256247 - DNA, 164 bp, Gossypium hirsutum
tttacgtgttcgtggacgcctgggtgtgtcatatggaaagaatgatgacctggccgagcggacatattacatggatggaggaactgaggatgagattgagaaggcagatatcattgcctgggaatgcgcagcctaatcaaatccacataccttaatttctgccg

SEQ ID NO: 256248 - DNA, 433 bp, Gossypium hirsutum
  unsure (1)..(433): unsure at all n locations
ggacagcgttcatcaacagacaagagaacacgaagctgaattggaggcaaagcatatggaaatggaggctttggtctatgaactcaagggtgaaaacaacaccaagttgtcaacagaccgcgaaaaccttcttggatttgttacgagcctaggtgattggatcagcgagttctccggtgaagacgctaagctgatggggattttggggaggatgntgcagtcttttgacaattgcatttcagacatgaaaggtaatgatgaactttatgacactctcaaggaaaacaagaagagtcttatttcttctccagcagctagaaaacctgattctcttgttgaagaaagatcaccttttagagagctcaactagaaattattgatttcattttccttttcggcttctgtatatggataaattcgtgcatgtattatc

SEQ ID NO: 256249 - DNA, 399 bp, Gossypium hirsutum
catattgtgacacaaaaacaaccacaactatttataaagcccatgtgccaacctccagattcttttaagagcataataaaaatttttataaaagccgaagcttgaacccaagacttcccagacatccctaaacacacctagctcacttaaccgacaaagcaaacatgaaatttgtgtcaaagcatgaaaaattacagaccttacatttttgaggcgtcacataatatatgaagaaattcgataaaaatcgattttctgacctaggggtaaaatggtcattttgcaaaagtctaggagaaaaatggtcatttcgcccaatttttaaagtgttgagtgcctaggttaataaaatgattaaatttgtgaattttcattattatagattaagaattacaaaat

SEQ ID NO: 256250 - DNA, 185 bp, Gossypium hirsutum
tcgcctacgcgtccgatttgaaaggcttataaccaaggtacatacattttgtattttttaatttcagatctaacctttttacttatttttgtaattttattattgggtccaaattatttttcaaattgatttaagcattcaactgatgtatagagttattattggcccaacattgttacttgact

SEQ ID NO: 256251 - DNA, 342 bp, Gossypium hirsutum
acgcgtgcgcccacgcgtgcggttccattacccttccgtgacgcagattctgatggctgaaaaagattgctaaaagtcagggaagaagtccctaaccaagcttacatagaaggcaatccagggatcaacatttgttataacaatgtggaagatctgatctcccccaccatcaatcacatatccattccaatttgtagagtacttaaagtgcaagaacaagtaccagcatccaaatggcaacattctaacttggatttgctggtatctgaatcaatctgatgtcttcagccaatactcaaagggcattcttttttctccctgtaagtctctgttggatatgat

SEQ ID NO: 256252 - DNA, 124 bp, Gossypium hirsutum
tttacgtgaggcaatgagattgggtggagtgcttaatgattcaagggttaaaccagattgtgttggttataatactattatgaaagggtattgtatgttgagtaaagggagtgaagcaatagag

SEQ ID NO: 256253 - DNA, 339 bp, Gossypium hirsutum
gtttcaagtgctaaaatctagggatttgcgggtggagaagacgagagcccatctctctgcttcaaagctcctgtccaggtagaattctcttcttcccttgcgttgcgttctttgctgatcaatcgccacggctacacagcggattctgtgagaccaccatgttcctccacttcgcatacacaccatttcagcccttttttcgcactacttggatacgagttctatatattacaactcattttcaacccaagcctacgaaaatatcctatatagcagagattctctccctgaaaatccccatatctatgatttctcagacatatgctcggccaccaataa

SEQ ID NO: 256254 - DNA, 392 bp, Gossypium hirsutum
ggtcgccctttttttttttttttggtctcatttcgctgtaaaatctaccttcgatatttccttgggactgctaagaaaaatatgtttaaacaacgaaaatttaaaaaactcgtttttttgacctttcctctttgacgatctgcgaatattaaaaaaaaatcaggcaatttccggaacggcaggttggttgagatcgatattgagaagcgggcgcgacttgacctcatggtggttcaaatcaacgacggatgatgagtcagagtcgctttgtacaccattaaacgtcgcatgaagatcatgatgatcgaatccaaaccgttcaaagggtgtcctttcactgcaccaggccgaacgaatggttcaaagtagaaaactttgcggcccgcaatata

SEQ ID NO: 256255 - DNA, 292 bp, Gossypium hirsutum
tggacgcgtgggtggagacagaggcggtttaagcctgtgttcgatctggtttagtttcacgcctcagatgaacggttatcactctgttaaagttcagacaattataaacccagtttttactttctaacaaactcctattcactatatcttttattgtttgtaggactttgtaatgaattaatggtgggaatggtctaacatttatgagccatactaggtttgtgcatataggaagctaatccctagcatctattctgaattttggcattatcatgtatgacattcattgtgg

SEQ ID NO: 256256 - DNA, 400 bp, Gossypium hirsutum
gagcaaatgaaggaaaggaagagccgggctaagaagatccgaggagtaaaaaagaccaaggccagtgaagcagcaaagaagaagtgagataaaaggatttgaaaaagaagaggtgaagttgatgctgtaacttagagccaatgttttccaacacgagtgtccaggtgttcttcaatctgttttgtttttgaaaaaaaaaaaaactggattttggtgttcatctgatgtttaatattatttatgcagcagattttgatatatttagtgagtgtaatactttgttatttccattgaagttcccttcctttattttgccatttagcttcttctttttccttctaaaatattagaaaaagacatttaattatttttttctatataaatactagacttttaagtt

SEQ ID NO: 256257 - DNA, 429 bp, Gossypium hirsutum
ttctacgcgtccgggggaggtgagtgcttgagctgcatatcttttacttgggctattattttcatatcaacatcgtgtttatttcatcaatgttattacttggagaaatgaagtattctttttcattctttttgcaggtccagacaatcaaacaaggatatttgttgaaacgttctagttcgaggggagattggaaaagaaggttctttgtacttgatagtcgaggaagtttatactattatagaaataagggtatcaaaccaatggtatgtgttaacattttattattatccttgattgatcatgtctagtaatataacttggagcattttgtcctttaactatgattatgggtgaaggggaggtatgcctgtacctagttagctttgatgctagctaatttatggttttgacacaattgatgatgca

SEQ ID NO: 256258 - DNA, 270 bp, Gossypium hirsutum
tttttatttggggcatgtaatcaagacaatacgctgtcagtggttcaactctaattaagtggactgttatatcaggacatggaccctaaactgacgggtacgtactggctatatttagatttagactaatcattatttatgttgtgcttgtgattctgtaatgtattaaaagttttaaacctcatgaagctacctttgaagccgcttggtgtactgattgtagtattttcttgataataactgaaatttatataaaaccaatgttgtgca

SEQ ID NO: 256259 - DNA, 375 bp, Gossypium hirsutum
atgagagaaaaagaatgaaaaagagctgaattctgaagggactgaaagcgctctaaactcagtttacaactcacctttcttccccactgtttgtttctttgttttttttttttttgtgtgtgtgtgtgtgttgggttggcgccaaaaaggaaaacacccagaaagaaagtttgggggggatctttggttcttgatcacatgatcaacggccattgaaatttaaaaaatgggttgcgtcagttcgaagcaggcggtgtcggtgacgcctgcgttagaccattccggcgctttacgtgacaatgccggtaccgttagctatggtagtaattcgtgtcggtctcggatcgggttctcggagctggagaagaagaccac

SEQ ID NO: 256260 - DNA, 271 bp, Gossypium hirsutum
  unsure (1)..(271): unsure at all n locations
gttaaacataggaaagatgaaatcaaacttcaattatgtaagtagtggctccaacactggtatttgatttgcaacaacatgaatgtcaatttactttgaattctgggatttgttttttttttttaatgttcctccattaattctatgctttagagctcgattggatacatatgtaattatatcattttcaacttgtgaggcgttttaatgtacaatatattacatgttgnaaaaaaaaaaaaaaaaaaaaaaaaaaaaaaaaaaataaaaa

SEQ ID NO: 256261 - DNA, 360 bp, Gossypium hirsutum
tcgtttacgcgtccgccagtcgtctccacacacccgaatatccgcttaaaacctttgaacagcacctaaacgagagtaaaatgaaccctttgttaactgcccatatatgaacctacaaagaaggagaagcccgagccaaagccaccggtttatacacctccaaagaaagagaaacctgaacccaaaccaccagtgtgtgaacctccaaaaaagcctccagtgtacgaacctaagccaccaaaaccatcggtttatacacctccaaagaaaaagaaacctgaacccaaaccaccagtgtgtgaacctccaaaagagcctacagtgtacgaacctaagccaccaaaaccaccggtttataca

SEQ ID NO: 256262 - DNA, 239 bp, Gossypium hirsutum
ttgctgcacgtttgtgagcaagtaaggtgattttgattcttcctcctttgttctctatcttgaactagacctttttgctggtgccattgttccaacatgttgcagaaatggataacgcaatcatgccacagcttcagtccttggaccttcagagttgcgggaagttaaaggctttgccgcactaccttgttggattgacaagcctaaaggaacagagccctgattggggccctggtctt

SEQ ID NO: 256263 - DNA, 115 bp, Gossypium hirsutum
gtggttttgtatttgctcccttagagggtgggacagtgatggtaaaaatgggaatggagcgtaacgaaaggtggtggagctggagggaatcctaacggggggaatccatatcaag

SEQ ID NO: 256264 - DNA, 415 bp, Gossypium hirsutum
cccactcgtccggtgaatcctctcacacacacacaaaaaaaaaaaatggcttctttcaattacatgttcttgagctttgtcctggctctgtcatttgcaagctttgatgttgggtttggagcccgtcatcttctgcaactgcctcagttacctccaatgccaatgatcccaactctgccaatgccaacgataccaacattgccaacgactcaaccgtctttgccgaggccaggcgcgatgcctccactccccgccatgcctaacatgcccactttgccgaatgtaccaagggccactttgccaccattaccaagctttccctcaatcccaactacgatcccttccatcccattcctctccccgccacctgcaccgtctactccatgaatcttctgccttaattctggatgcctat

SEQ ID NO: 256265 - DNA, 301 bp, Gossypium hirsutum
ttagaactgagtacgggggaccccaacctcgcaagactttgtatttcccaagggaaccaaaggacccttctatgcctgaccaggcacacatatcattggctggcgaaaatcacatgcgaatctcatggatcactgatgataactccgttccttgaattgatgaatacggaagcttgcctggacaatacacctttttatcatgaggagaggccacctcttataattactgattatatagcttctgaaagatacaccatactgtcattgggcctttggaacatgataccgcttatttctatcg

SEQ ID NO: 256266 - DNA, 240 bp, Gossypium hirsutum
tcgctttacgcgtgggagggactgtacggcggtgacggggaggggacgcgtgggagagcaggtggcggcagaagctagggcaagagcggcggctagctagggttttttctctcttttttttttagggctgtttgggtttggaattttaggcctgttactttattttgtaatttggggtagggtaatatgggcttgtaaaaagaattgagttttggcatttattattttttgtgttttatt

SEQ ID NO: 256267 - DNA, 266 bp, Gossypium hirsutum
ctcaacgacgccaaattttatttatttatttatttatttcattaaagccgatcagagatctcctccgcctctaatttctcctccatttgtcttttgcatttacggttctttaattttctgtaacaaatggaaccttcatcttcatcttctggttcaatgaaagtttcgccgctcgatctgatgtcggcgataatcaaagcgaaaatggacccttctaacgcctccgccgactcggctgccgagatggctaccatgcttctagagaa

SEQ ID NO: 256268 - DNA, 373 bp, Gossypium hirsutum
cgcgcatcgatgatttagttgcgaattccatgaacattttggaacctgcttcagttgatgctgatggaaatgctcgtgaagatgtgatgcatgcgaatgatccagttgatttgttcattttgcctggacttgcttttgacagatctggaagacggttaggccgtggtggaggatattatgatacattcttgaagaactacaaggagcttgccaaggaaaagaattggaggctcccactctttgttgcactgtcttattctgtgcagataatggatgaagaagtaataccagtcaccccaaatgatgtactggtggatgctttgtttcccccactggagtgattcccattacctcagctgccttagggagaatg

SEQ ID NO: 256269 - DNA, 228 bp, Gossypium hirsutum
atttgatcaaataatgatgatatctcattattggcactacctctgagacaaaccatatgtcagatttattactactaattcctccctttgcaagtctagatttttgggtttttgaatggtaggtttcaacgaaagggatttttcactttattgaatatggatttcttttgttctgtaggttttgcacttcatcgaatatggattttgcaattctttattgagtctata

SEQ ID NO: 256270 - DNA, 256 bp, Gossypium hirsutum
tcgttcacgcgtccgcccacgcgtccgcatggcagaattttacagagagacaatgcgagcatcctgatattgtaaatcttcattctttacggtgatctttgttttgtaccataaataattccatttttcgggagatttgtaactagtgcagatgttagaatactagtttagattctaggtttacaaatattgctacagcttcagcttcatattttttattttttttctctgtttaataaaaatatattcttttctt

SEQ ID NO: 256271 - DNA, 308 bp, Gossypium hirsutum
tcgtccactcacacgaattaacaagaaacacccggcttcataggccttgatcgactatagaactacatccagaacggtgcacttgtccgggtacgagtcatgaatagctgttattgctcattgtagagtttggtgtgtgtttttagttatgttgataatggtgtgttcttcagtttgattgatttcattcattcttggggttaggttaaactagtgtttcttccttgtatttgtgtgcttgggcatctagatttgtgtgtttatggcgcatttggtaatgaggtaggatttcatatgttatatatgag

SEQ ID NO: 256272 - DNA, 277 bp, Gossypium hirsutum
tttctcacgcgtccgtttgcttttagctatccagcttgatcccttttgcaggctatagatgtaaaacaacatgccactgctgttaatcttcctattattatggaatctaacggtaagaggaaaacagctgaacatagctacagacatatgagactgcagatgcatttgaatgagttatctgactgtgataaaaaaagctttcttcatgtgcagatataagccttcattcaaccataaatctagttaatccccagtttattttgtcaatgcactttta

SEQ ID NO: 256273 - DNA, 475 bp, Gossypium hirsutum
ttgttaaacgattgtcctcctaacctttatgctcggttggtatctaccgtagattctagagactttttgacccgactcaaatctcttaatgaatccgatattaaagttgagtttccattcaaggaagctgcaggagatgatatacattcagctgaagttctgattaacgttgaccaaaaagaaccaagttggtgggtatgggtaactgatgaaatggttccaagcaatgttgaagagtggagtggaattgacgatgagaattacattgttgttagcgaagagcatgttgtggatggtgttgctaactttatggcaaaatgccttttgtcgaaccctaaagctcagactttgaccccagaagaactgcagaaaactatgctgaaagcattagaaggtgtcagcaaattggagaaggttttgagcatttggcatgctggaaagatgttctatgtgttgtcaacttggggacttacat

SEQ ID NO: 256274 - DNA, 292 bp, Gossypium hirsutum
tgacgcgtgggcggacgcgtgggcggacgcgtgttcatacgcgtgtgtgttgtttcatgtcattagcggtctatatggggaagacatggcaagtattactaaagtagttatctcagtgacctacatcttctcaaatgcctgaatttcaagtgattttcaacgaccaattcacaaacgatttcaataccctcttcacgtatctcccacaagacaagcaataccttgtagcttccgatcctggttctttccataaccaagtattgcccaaatcatcactccatttagcccattg

SEQ ID NO: 256275 - DNA, 224 bp, Gossypium hirsutum
cccacgcgtccgcggacgcgtgggtttgtgcctgatataaatggtgttggattgtttatcatgtttggtacggataccaaaaaaaaaaaaaaccaccagaaatagttgtttgttgtgctatgttaaaactgttcctcttcgggttaagaaaccgtcacgttattatattgatatttataaaaataaaatataaataaactcgacacacttggctctttgttttc

SEQ ID NO: 256276 - DNA, 105 bp, Gossypium hirsutum
tcttggctgagcctagttgttatatttgtttgccggtggctaatttaccaaaactaatttcttacttctaccttttaggcctgttatgcgttgaaagacatggtg

SEQ ID NO: 256277 - DNA, 439 bp, Gossypium hirsutum
ctgagcttagtgtcaacaacaatggcatttgtttagatggtagtgaaatagaagatgatattggcagcgagataggtggtcgatcccctgccagcatgcatgcccgatgatggtcagggtgtaaagaccatgaggtatggcaatacattaattgtttttaattctacgatatttgacatttggcatagaaccaattcccaggaagaaccaccaatcgaatcattattctaatatcaatgtaaagctagttagatttgcttactgttttgtaatttgcaatcattgtattattagggaaaccaaggtagatgctagacatatttcttctcctattccgatttctaacacggtgggttgttatgaaactagctttgaaatggttaaatcttgtcaattgaaaaccagggtagatgctaaaaaaaaaaaaaaaaaagggcgg

SEQ ID NO: 256278 - DNA, 144 bp, Gossypium hirsutum
tttttagtctgtaaactcgataaattaagatgacctctttcatctcctcgattggtggtcgtctgggcgccgcgaccggtatgggctctctgttccgtcgcatggccaacaaaccgacgaaagtccgtcaccaccaggagctgt

SEQ ID NO: 256279 - DNA, 174 bp, Gossypium hirsutum
cgaaacccgaggttcaaaaatgctgggaagttcttagcattatccaagttttaaccatggcaagcaatgctagctctcttcaaggtgtcttaatcagcattgagaatgctcctttccttttagagcaaggatttgtcataaccgatgcagtgctcgatgctttgaccaaagctg

SEQ ID NO: 256280 - DNA, 458 bp, Gossypium hirsutum
tcgtgagcctctagagtcactatcaccaccagggggtgtcttacaagttcataattttttccctcatacatctttcctttgaaagagcatgagtagatccatttgttgatcaaggaacgaaggtaaactagacctccctaaactttctctgctcaatttttatgtcttgaataaaggtccatatttccgatctatccatagggcctgatttagctttcttgatcacagttaaggagtcaccttcaataaccacttctctcaaacccatctccactcccaacttgacagcctgaaggcatgtaagggcttcagccacgaaaacagatagtacatactcatttaaaatcacccttgtacctattattctagatctgtcgtctttaataactaaccccgaatatgattttgcgatgtgagccttaaaagctacatcaaaattaatttttaagaaatgagcc

SEQ ID NO: 256281 - DNA, 288 bp, Gossypium hirsutum
  unsure (1)..(288): unsure at all n locations
cgggcaaagaagagaagaggggggattttagtagnggtgatttttacaagaacgactcctcttctggcggtggagatgacaagggtaaagacaataaaggaagtggtggtggtgaaggaggagaagcaaatgtggccgctggaggaggaggagaagcggcggaaggtggggtggaagagactagagtggcggtggagctgtagaaaaatgaattctattattacccaccaaggtatgccactgagttctacgcttatcctccacagtccttcagtgatgagaacccct

SEQ ID NO: 256282 - DNA, 119 bp, Gossypium hirsutum
atcacgcatccgtactaaatggtcaccaaagctgtgtaataggcagcctgaacgaatccggcggtggagaaaaagaccaccgatgccacaatatccttggatggaaagaaaccgaaggc

SEQ ID NO: 256283 - DNA, 157 bp, Gossypium hirsutum
ttttcgcgtccgctttaatttattcgagcatagatatgtggccttgcgcatgattgatgaagctctttctatctatagtgggcatgcatttgctatctggcggataatttgatgtactatgggcactattagcaatttaagcatctatttgttccat

SEQ ID NO: 256284 - DNA, 444 bp, Gossypium hirsutum
tctcctcactttttgcaacaaaattcacggagagactacaccaacaaatggaggcattgaggatgagactatttttggccatgatggtggtgttgatggccatgtcggcggtccaatatgttgcggcagctgatgcaccggcccctactcctacctcagatgccaccgcattcgtgccgacggcgtttgcttcccttgtcgctcttgcgtttggtctcctcttttaaaatgggtgaattgtattagttgttgatatttcaatattggggtttgtgtagagttcttttgtcttcttttattctttctctctaaaggccatacaactttgattatgaagatggaaaagagatagagaaaaggtggaggaatttttctgttgttgttgggattttacttatgacaaatggtggatattttcattgtttcgattctaatgtatatctg

SEQ ID NO: 256285 - DNA, 107 bp, Gossypium hirsutum
tttgctcccagcatttgctgtcaacaggtgaagagaataggccagaatccgagatgcctgcgcgccgtcatgctttgcaacacggataagagttctgggatcaagcc

SEQ ID NO: 256286 - DNA, 321 bp, Gossypium hirsutum
gttgcctgcctggttgggattgtcctttgaaatttccagtcttcaatttataaagtactttcaggtcctatgaatgttcttaatcttttggtatgctctttcatttttcttcttctagctgggtgagtcatgtataccactatgtgtaaataccctttaaatggatttaggtaaggtggctgttgaaatcattgagtgcatgaccatagcaccctaagagcattggttggatatccaatcattactttgttttagatattcaacctcctacctcaatccagaaattgtaatgatgtattatcctacaccaacattgaaccc

SEQ ID NO: 256287 - DNA, 369 bp, Gossypium hirsutum
tttataggctcggtttcttccaaaattggtgggagaaatcaactaacagatgcagagcctgtggctttaatcgggaatgatgatgcccctctggtccaagaggatgttccggtggaaaaacaatctaggaggaagagaccccgtttaagatcaagccgtggcggtcgataacctagaccatctcagtatgaataataggttacaggcacacccttttctcctatcaatatgaataacaatttggtgcatcatttaggtttgttcatttataaatgattaaataatttaccgatttaggatttaaggtttaagtcgaatgtgaagacatttcgttaatactagtctttgcaagaacttatgacatttaat

SEQ ID NO: 256288 - DNA, 123 bp, Gossypium hirsutum
ttgtaaatttctgtatactaactcaacctaatcttatgtcgctgtattggttattccttgtcaatattttaactacttgtttgtatgcattgttaagattgtaattgaaatgcccttttgctc

SEQ ID NO: 256289 - DNA, 156 bp, Gossypium hirsutum
cataggaggtgctcttaggaatgttcctattggaggtggatgtaggaaaaacaagaactctactactactactactactactgcttctgtttcaacatctatgggaaaatcaagtgctgctaagatgaaaacagtagtgtttgatattggaagaac

SEQ ID NO: 256290 - DNA, 136 bp, Gossypium hirsutum
tgccttgaattgcaacgatatcttaccgtcctccacttttagatcgtcgcagttttctatctcgacccgtttgtattttctggagacccgaaatccgacccggaggtttgaaacgatgtttctcgtggattggttc

SEQ ID NO: 256291 - DNA, 328 bp, Gossypium hirsutum
tcgtggtccttgatgaatctgtagattacttgaagtctttaaagctcgaagccgagactttaggagtgaaccacttctaggttacactccttactttctagtaacttgttggctaagtggtgggaaaagaaggatgaaattgaaaaaaaagaaaagaaaaaaatccaacgtcttaaccaagaatgattgatgaatttgaaatcactacaccggctttagctctgtggggacggtttgtttgtcatcttttacattcataagggagccttatataatggggggccaacaaaggctgaaatgcagggtatgctataagttatttttgctt

SEQ ID NO: 256292 - DNA, 476 bp, Gossypium hirsutum
ctggattatcaaattttattcccgtcctaattggggacaaggacgtttgttctgagatgaaggtgatacagcagggatttgatgcctctcttttttggggaggatcacagatttctgccaataggtcgtcatgtgaaacatcaactttgcgacaaaaagcatattctgaacttgttttagatatagcatggttattgagggagcctaaatcggagaattttcaagaaactatggcctcttctcaaattcagagattcaattgtttattgaattttctcatacaaaacaaatcaactgtcattttgaagaaagtcttacaaaatcttaagaatgtgatggaggaggctgggtttaatggaaccgatgatcctgatacaaggttattaaagaagtatatggattacggtagagatatccttaataacaagcttcaagaaggtgaaaggccggtgcttctttcagagtacatcgagcaa

SEQ ID NO: 256293 - DNA, 314 bp, Gossypium hirsutum
gcaggtacaaagtagattgtgaaggaaattggggggcaactgaatatttgaatagagtaacaaaaaggttctgctttggagttcataaaaatatccagaggaggacatggtgggcacccgaattctgatattaagattcatacttcaattcttttttgacagttaacttgttattgcttggttttcataggatcagtgatggacatcattcagcttcattgtttagtttctggcattggtgctcatgacataggcagagggaacgaagacaaaataaagagtatagagggactaaatggcagatctttggaaag

SEQ ID NO: 256294 - DNA, 204 bp, Gossypium hirsutum
tccacgcgtccgaacactccctttttccccatttattctctgctagggtttcaaaagaaacccattcatgcgccgccaccatgaccgtcgctcctccgccgtggacggtggtcggagcggtaccaaaaggggtttttccttggtttaaaaaaacatgttttgaaggacatgccttctcagccggaaaacccgagagaaagggct

SEQ ID NO: 256295 - DNA, 207 bp, Gossypium hirsutum
ttcatcgtccgcccacgcgtccgattcattcaatcagcgatgttaagctacttgtggcatcaactgcatcgggttctagctgctcaaccgtgtcattatcatcttctgctgattccatgtcctctcatgcctgaagaggttgggcttcttcttcgtgcattgggttatccttctaaaacaattatctacctggcaggatctaaaact

SEQ ID NO: 256296 - DNA, 206 bp, Gossypium hirsutum
tccacgcgtccgcccacgcgtccggtcgtgtgtggaattcgttttcagttattgcctccatgttgggaacttcttatttggctttgtcccactccttttccttttattttttttcgttgaagaagctgagccgcacgaaatatgtaaatttacaagtaattttagtattgtagacaaattttaactatctatcttatgttcttcct

SEQ ID NO: 256297 - DNA, 191 bp, Gossypium hirsutum
gatacatcatgtgcatttctttattagtctcacatgattctcactctgtgcctcctttttctctccaatgttagatgaatcgatccaggacgaaaaaccattcttatcagggatggtggatggaagcaccaatttgccagtcaacctttcttgcttagagctgaataaaccaagcttggatgagaccaacc

SEQ ID NO: 256298 - DNA, 437 bp, Gossypium hirsutum
tttgttatttgaaagttgctgactttggagtcagcaagctgctcaaggttgcaaacagagttaaagaagacaaacctgtgacatctcaagagacttcttgtaagttttctacactgggcaaaactctttatcctccatcgttatctatttatacttggggttttgcttgtgaattattggactagccatctgatttggcctttgttgagaaaatcagaggcaggtagcaggatttgttgttttgattcctaattaactgtttgattaacttgtttactggagaagtgtgttaaaatgatgactaaagatgtttgtttcatgtcatctttcaaattttgcattttaatttgaatcaaataattgaaagctaagtatcctttcttttttaatggtaaatacatcatgatgtatcaatccttcctgagcagggagatatg

SEQ ID NO: 256299 - DNA, 235 bp, Gossypium hirsutum
gttcatatgacacaaaaagtaaggaaaaattcctctgtttttcctttctttccactcttcctttccacatatttcttcaacttatcaaaattcatgtcttgatttcccatctatttcctctttaattcttccactgttgtaattcagggaagatcagctgctaaaaggatgtggttttgctcctcatacgcctttcgatagtaaggattgtctgccccaaagtgatgcgatgcga

SEQ ID NO: 256300 - DNA, 141 bp, Gossypium hirsutum
gtcagtcatccggttggatgatgatgttgataatatcgagaatacactaacttctgccttggtggacactaaaagtaatgctgctgtggttgacaaaagcattacaacatttgatcccccggtctcaagctcgtgggaaca

SEQ ID NO: 256301 - DNA, 137 bp, Gossypium hirsutum
tcgctcacgcgtccgcttaattttaacagtaccaataccaattaccttactagatgaatcgtttcccatgcgcacaactctaccttcaatcgaactgtatgtggagaaccattctctattgggacacatgtggaaag

SEQ ID NO: 256302 - DNA, 336 bp, Gossypium hirsutum
ttgctacgcgtccggagagattgggaaaaaaaaccatctcttcgtggagatggaaaatcgattcaggctacgaatctctcgcatgtttcgatcctcgtttggctcctgccggacccggaacgtctccgacgttgctgaaaaagttgtcccctcacttgaaaaccacaacaggttccggtgcatggagtcatcgtcgacgccgccacctaaggttcgacccttaccttccatttgcaaacccagataccctgaatctcatcaaccaacccaaggcacaaggcgtaaagtgtctgcttgttaccctccttttcttctctctgccactgattttgatgg

SEQ ID NO: 256303 - DNA, 408 bp, Gossypium hirsutum
ctttatttgagcaaagaattagggttaacaaagggttttaataatggaaggcaataatttggagaaaatactccaagaagggaaccttttcaggcaactcaattgccttatcgttgctcatcttcgccatcacaatctcacccaagctgcaagagcagtggcttcagcaacaatgacgcctttagacgttgaagcccctcctaataagcttcttgagcttgttgccaagggtcttgcagtggagaaagatgagacattacgaggggttccttcttctacattgtttgatttagggactgctttgggttatggcttgaatccggatcctcgagtttcttctgttgatttcagtgccgtgcaagatacaaaaggctcatcaaagagcttttcaaagcacgagacaaggca

SEQ ID NO: 256304 - DNA, 165 bp, Gossypium hirsutum
aagtggaatttcttttcttttttcttttcttttttagattcaatatggcttgaaatccggggatcttaggtgaattgtcttttagatttgttttagttctggcgagatggagatagaggtaacgggttcgagcagcaaggaatcgtttgcgatggtagtaggggg

SEQ ID NO: 256305 - DNA, 406 bp, Gossypium hirsutum
gttctttttgacataggtcatgaggaggacatggttatagagctggcaaatgaagtaaggaaggtgcttgcaacattggggaatggggtttccaaggagaagcagctagtaggatctcctctgaagatgccactaaaatcccaaacccagacctacatccctacaagtcaattgcttctgcttcccaaagctgttgcaatggactcctagcttttcaaagaactctctagtctctaacagaagagaaggccagtaacttaacgagaagggcgaaccattatatttctgtttctaacctattccttcagtctaaatctagttcttctagtagagaagatttttttgtccaagtatatatccagagcgacatctttagggtcttaccagtattactactactgattta

SEQ ID NO: 256306 - DNA, 141 bp, Gossypium hirsutum
ttggataaagtacattcctactgtattggctagtgggattctgcacttggaaaatagatctttcgaaattgattcttgggatggtaaaaaggttcctgatgtgcttgcaaagtgcaatttgattccagaaacgggaaaagg

SEQ ID NO: 256307 - DNA, 254 bp, Gossypium hirsutum
ttgcctcacgcgtccgcttcatctgggcaaaggcaaatctcattaccaggcaaaggcaaatctctctttctaagatggatcgtaatcaagaccaaaatgcaattgtcggagtcgtggcttcagttttagcttttgggctctctggattaaaaattaaaaactaggaaggaaattgcttctcaccctcgtgtgaatcgagattatgaaaaagaaaattatattaatagtattttatatagtggtgaccagcattg

SEQ ID NO: 256308 - DNA, 317 bp, Gossypium hirsutum
tttgctactcggccgaccacgcgtacgcccacgcgtccggagcctcacactatataagggagcatcatgctcaaccaaggatataggcactcgtctcctggcatatggcccggcagcaatgcatgctattggtagtgatacattgccgcagttcgtattcttgtggtagcctgctagcgaatattcattaccgcttcattggctcgtcctctgagatcaaagcttccgaggaaggtgtggacgtgttatactgacagagataatgatgaaaatcatacttttttaatatattcataaaaaaaaaaactaggtagata

SEQ ID NO: 256309 - DNA, 397 bp, Gossypium hirsutum
cttgctttctttatcgttgaagtgcgccaaaatcgaagccttggagaagcgagttgatatggagatgggcaaacatctcaacttagtccaagtaaacaagaccctgactttaaacacatctaaaaaactagccctgccttgtgcatttcaggctttaatgaacttctcgaaagcttctgttcaggtctttgaggccatccatggccatgctcagccagaaatcccttgtaatgaagcatcagagacctcagcaaactaaatttgactgaactgtgaaatttgtatgaaatggctctttatttttgccgaaaactgtcaaatacttgatatctaagctgtaaaggaaacaaggactacaaggtttttctttgcatatatatagatgcacatttaattg

SEQ ID NO: 256310 - DNA, 431 bp, Gossypium hirsutum
gttttatagaataagaattgcaagtgttccagcttgtaattgtgatttccattaaatttacaagactttgatggaagtttgatatgttttgatataggtacaataatggatagcagcttaaggcctcatttctagctcggttgaagctcaaatatgtgcgtgcagctcctctcagctcgaaatagttcagaaagttcgtttccaactcatttcagctcagtacatttccagctagctcaatttcagctccaccagctcaactctagctaacaagtccagatgtagctggaaggtgtcctacgtgtcggggagtgtcccatacacatgtgacagcctaggtggcatcccagtatgtatagcacacacgtaacagccttgacacatgtgtgtgcatgtgtggccgaaatcagcccttttctctacatatgacg

SEQ ID NO: 256311 - DNA, 312 bp, Gossypium hirsutum
ctttcaccgaactttccaccatttttaagaaaaataaaagcttcaattccgcaaggttcggctaagccaattcccatccatggtcatcagaaagctcaatcggctggaattgtgtcagagcacaatcacactatccctcaatccttttggtagcctttggttaaattagtaatggttataaatggcatgtaataggttaaaagttattcaagtgatttggcttgttttgagtggtgccaagcttgttgtggttaatgatgatagatgatgacatgttttggaatggttatttgctatggttggcataggttt

SEQ ID NO: 256312 - DNA, 263 bp, Gossypium hirsutum
tggagaggttaccagtagttttgatgcttgaaagaaagtacgtgacagtttacctcaagaatacaacctattctcgttccaggacgaattttgctcaatacgagattctggtgagttttcgatacttcattttgaactaacaacagacattatagagtattcgaggaaccattgcatactttcttaaaagaatgtgtggaaaggctgtatgctttaatgacaaactaatttctttaaaaggatatgataattcaaacctaatt

SEQ ID NO: 256313 - DNA, 115 bp, Gossypium hirsutum
ctttgtcaacagccgaccctactaatggtactgtaagtggaccggtgaccgtagcaaatggagtggtatttggtggttcgacatacaaagatggaccagtgtatgcaatggatgg

SEQ ID NO: 256314 - DNA, 443 bp, Gossypium hirsutum
tgagcttgggcatattgttgagtctcctattattcgtacggctacttccattgtgcctcttggttggaatggtattcctggcgagaagagtacggaacaattgaaggttgatattactggattcaggttgcatatgtgcactctggttcatgctcaagtaaatggcaaatggtgttcaactaccgtggaatcatttccttcggcaccagactactcagctgggagtggggaaccacccgaattacaaaaaataagagtcttagtaggagctcccttgaggcgacctcctaagcatcagacactagctgattctttgatgaccatgttcccttcaattaattcagagacagttaatctcaataaagaacatgatatggcatcatctcatcaagaaaaatacgtaaggccagaaggtttgagtgactttttcattttctgtacta

SEQ ID NO: 256315 - DNA, 128 bp, Gossypium hirsutum
  unsure (1)..(128): unsure at all n locations
ctannaacagtgacagaggacaaattatttcatatctatttttctcagcggagttgttgttgaaaattacatcgacaataagccatacaattatcagagcatacagaatgaaaagactgacttggatt

SEQ ID NO: 256316 - DNA, 412 bp, Gossypium hirsutum
tgtcttttcttgtgtctgttttgttctacatcgggtcagggtcttgagactgttgagatgagccattttatcacccctgaaaacattgaaagacttaagcaggcacaagaagctgacagagttcaagtatttttcttatacaaactatagtcttggtctgttcaaacttcaaactgtctatttcttttacgattttcgaaaatataacgtataaaaccatagaacatcagacctcaatactgcttgaaatatcttagtatggcatcgaaaaaaattcttctgcttgtttatccttgtgttggaaaatgtttccccagcattcaacttattcttgtccaaagtttgattttgaaccgatgcttcaagttttatgtctttggtctttgttttaatcttcagcttgattacactc

SEQ ID NO: 256317 - DNA, 386 bp, Gossypium hirsutum
gtctagatcgcgagcggccgccctttttttggggttttttttttgaaaaaaagggttacaaaatttgaccacgtttatttcataaccatgttgaacatctgtttatccttttgatggtgccaaacctttaaatcttacatttaccatgcatgatgaaagccaaatcatgcatgtcccatgcaatctaagcacgacgaaaaccatgtcatatattttcctttcccttttccgttcacatattatgaacattaattccatgcaaggaaggcaataaaattatactacgcaaacaacctcaaaaatgaccagctcaaacttggacctgttatgtcccatggtatcatcatcccatcttttttttttactttgattttttatcttccctg

SEQ ID NO: 256318 - DNA, 245 bp, Gossypium hirsutum
tcgaatcatcaacctctcgatagtgagaagaggaggctgtgacacgcattgagttgcctatcttcggtttccatgcggcaaaagtcctcgttactcctacaatcacccttaagaggctgctttccaccttgggattcgaagaaatcgaacaatgtgtcatgttgaaaaggtaagacaaccaatcgggttttaacattcatctgcaatttgagattttctttcggggtttgtcgccttaattgtgg

SEQ ID NO: 256319 - DNA, 176 bp, Gossypium hirsutum
tgtccaaacactagaccagtggtcctgaactgggaaaggatataagacttcgaagccttttcaccatgagagctaagcggaagaagaagcgtatgaagaggctgaagaggaagagaagaaagatgaggcaaagatctacgtaggctaactttatcttaaagccagcaattcggtct

SEQ ID NO: 256320 - DNA, 447 bp, Gossypium hirsutum
tttacgcgtccgctttggtctgggtaccaactttatgttttctttctcctttcagaaaaacacttccttcatcctaagtaatttgtatctgtttcagacaaagagaaaatctctagttttgaacaagggctgtgaaaaggagaaatagatggaaagaaagggcttagttttatgcagtgttgtcgcctttctgggagtattatcagccgctactggttttgctgctgaagctactaggatcaaggcttcagaagttaagtttgtatccactacacaatgttcttatccccgaagtcctgcacttggtcttggcttaactgccgctgccgcacttctggtagctcatataattattaatattccaactgggtgtatttgctgcaaaagaaccagtcgaagttggaactcctactggacaaaagctcttgtcttctatgttatttcttg

SEQ ID NO: 256321 - DNA, 310 bp, Gossypium hirsutum
tccgatcgcagtgcaatgaacaacggtggcgccgagtcgtccggtgcgttaagttctcttcatgaacttcgttccgctttagcaataggattcaaaatccgagcgttttgttgcacagtttgtttttggacttcctcaaattacctttggtcaattttaactgaaatttagacctgattttgacttcctcaaatttattgttctcttatctttgaatttttatgttcggcgctctacttgcctaatgcctttctcggacctttcatttcatttttgttaaatttgatagtgtattttgcttttcattgag

SEQ ID NO: 256322 - DNA, 100 bp, Gossypium hirsutum
tgccacgcgtccggtttgtgatcatcaggcggggaattctgaaataacaagctgtaactattttgcttagaataaaacacttctgagcttaattattatt

SEQ ID NO: 256323 - DNA, 383 bp, Gossypium hirsutum
tttctcgcgtccgatgaaaaccaacgggaaagaagggccaaagccgaataatcacctttgcaaagttttgatttcatttctttgtattaagtatgcaaaaatgtgcgtatattcctctttttcgtaacctcttacagagattaagaactatggctttatatccgaaaaaaagaaagaaaaagaaaaaaaaaattaaaaatacaattttcattcccttctatttgctattctgccatttttgtttgtatttgccgttgtgttcgtccttcttgcaggtacggggtgcgctggcatcgtacggaggctgtgctggcgtggttgctggagactgaaacatacggaggagctgagggggctcggttgcggcgcaaagcgagggggag

SEQ ID NO: 256324 - DNA, 204 bp, Gossypium hirsutum
ttgatcctctgctgtagtatgtatttactatgcgggtattgtgtaatatcatgcttcctattctgcattacagatatttttcagttctgggctggagcttatggaactgttagatggacattgtgatatcctcgcattgataggataccagcgaaatgtttttttatttttttatttgaagccgtgacttaagatgagtttgaa

SEQ ID NO: 256325 - DNA, 150 bp, Gossypium hirsutum
agaaacacacacactccttgacagagctcaactatatcaaattcacggagaggttgacaagtgtggcagctgcgattgcactgacaagagccagtgtgtgatgaaaggtaacagcttggtcatagagactgaggagagctacatcagtac

SEQ ID NO: 256326 - DNA, 428 bp, Gossypium hirsutum
tcttcgcgtccgctttcctcattgatccagaagcattggcatcagagttgcagaagaagtttgcttgcagtacaacagtggcagaattgccaggtaagaaagggcttgaggttcttatccaaggtggggtcattgatgatgttgcgagacatctgcttgagcaatatggaatcccaaagagatacattgaagttcttgataaaaccaggaaataagaagtgataaatggttagtttctcttctgttaagtattatgtcatccataacttgttaggacaaagttgctaaggttggtgcatgtgttttgtttatctattttgtcaatgtgtacgcgtatcttttggtggtggtttttctttttctcttagactactcctactgatgatgatgatgttgatgataagggaagttaaaggcttattttgttt

SEQ ID NO: 256327 - DNA, 257 bp, Gossypium hirsutum
ttcacgcgtccgtccaagtcatatttgtatgcgaatattaatgttttgagaggaattggagtccctgaatcgaatatccttatgctgctttaccgtcatcctcgaaaatttttgtatagtccggttcgacttaaggagattgtggaggaagtcaaaggaatagggattgattcttcaacgaagaagtttcttgctgcggttattgctttgagatcaatgagcaaatccacactagagaagaaatttgatgtatatag

SEQ ID NO: 256328 - DNA, 333 bp, Gossypium hirsutum
cttacgcgtgggggagcaggagttttcttgacactttttcttaggtcaatgcaaagggtgaagaagcttgataaattcgagaagatgatatgatgttaaaactcacaaggcaaaggatttatttcatgtatatgctcattgatcagtcagttaactgccttattcgcatcaaattaaatttatatgtaatttttttccctcatatttgaggatgttccatttgactttcatatcaagcacccgaagaagaaaaaaagacgagggaaatgcctccctgctgggaaatatatagatatgtaataaaagatgctttcaacagtagaaaaggaaaat

SEQ ID NO: 256329 - DNA, 192 bp, Gossypium hirsutum
tccgaaaatgtgaaaacctctgcctgatttgtggggtatatttacatatccatgcaattaatggaccagcttttaatggattcttgatatattttaagacttgtgtttcctctgcaatgctgttatggtatattgagcaataaagctggcgggtgctggcttagagttttaaagagtagtgtggaaatgctc

SEQ ID NO: 256330 - DNA, 293 bp, Gossypium hirsutum
ttttgagtatactaggttaaaggcattgaaaatggcttttagtttctttcgttcatttccaatttccagttttcccgtacactcaaaatcgaaacgcttctcatatgatgggtcaagctttcataggttaattatttcttttgcctcacaatgtgaagctacaaacaaaatttctattgaagatgatatcgtaattagacgatcggctaattacgacccatctatttgggattatgattatattcaatcactcagaaacgattttgtacaggatgaatcatacaaggaacgag

SEQ ID NO: 256331 - DNA, 175 bp, Gossypium hirsutum
cctcactcgtccggcaaaacatgtcatagacatgttgtgttggtgcatcatgggaggaaacaataaaataaagagcatggacaataaaatattagtgttagtaggatgagaaacaaaaaaaaaaagaaaggatatgtgtgattgtacccccccttgccgtgagttgaaggaaaga

SEQ ID NO: 256332 - DNA, 119 bp, Gossypium hirsutum
gtttgtttctcagttaaaacattgctgtctgctcttaaacatgtttgttgagaaaacaccagacaaacttgatgttgttttaatgtttcctgatatgaaaagcaaatatttttagtttc

SEQ ID NO: 256333 - DNA, 297 bp, Gossypium hirsutum
caacgagatacctgacgtgaatgaaaacgagaatctgacaaatgatgttcatatttcaagtgatgttcacatttctaatgatgttcacatcgatgggaacggtcaaaaaagaaaaaaccctgagaaaaatacacaaagtaatgcatatgcactctgacagtatgagtcaagccacatctagtttgactcttgttatggatccatatggtattccacaagcagtcaatgtgcttgacagcatgtctaacgaagatccagaagctagtctgctatactttttcgcacttaaattattgc

SEQ ID NO: 256334 - DNA, 445 bp, Gossypium hirsutum
cccactcgttcggcaacactgttagcgtacctgttggaggatgggctgtcatcagattcgtagctaataatccaggttaattttccaacatccatcatttacttttttcttttcaactagtttttgtcaacctagtactctgggaaaagcaaggataattttttagtgttgaataaaatttttaatttttatagtttatatttttataaattttaaaggattaaatgaaatttttataattttaaaaagttaaaatataattttattttaattaatttaaaattttaaaaaaatttaaagaacttaaatgagaatttatcattttaggggcgggcccatgccctagaatcccctctgctagtatttgaactcaattgtttcaatgcatccgaaatgaacaggtgtttggtttatgcattgccactttgacgggcacatgtcaata

SEQ ID NO: 256335 - DNA, 289 bp, Gossypium hirsutum
cccatttttttggccaataggaatggcaacacaaaaaaaaaaattattttttttaaaactaacaatcattagtatgataaggggacagaactatttaaggttaaggactatttaaatttaatttcaaaggagacagaactagcatgcattggtacttccatgttgacaggcaacacccttttttcaaccaatctataaagggtaattgctatatcaagtccctgaacattttatataatcacacttcaattcagtaccgccaatttatcaagtgacaccactatttttt

SEQ ID NO: 256336 - DNA, 261 bp, Gossypium hirsutum
cttaattccaaggtttcattccaaagtttcaaaggcctcgtctaaacttcgattacaacgaagtagctaggattcgaaggagccgatatgaaggtaaatctcttttccttactcttttttttttaacgaatatcgatcatgaagaaagcaaaaaagaaaaatgaatgagacgttagacttaaatcaatcaccttttcgatttgtgatttctgctttttctattaatctctttgctgtatgtgtgtaaccttatagataatt

SEQ ID NO: 256337 - DNA, 397 bp, Gossypium hirsutum
ccaaatccataatgataaaacatttctttggtggaccttaagcgctccccaataaattccgtgaacttttttaaattctttttaaaattaagagacaaaattctgtaattaaaataaaatataaatacctcaaatataatacttttactgtttgaaatctaaattcactgttcaaaagataacactctaaaaatttctccaaataataaagtgaaacccctcaacacctacctaaagagttgtaatcatggttcctacttaaagaatgttattgcgactaaactggataacaaatatttgttattttaggtggccatacaattggattggcaaagtgtgccaccttcgacaatagattattcaatttctcaggaactggtgctcccgacagtacgat

SEQ ID NO: 256338 - DNA, 287 bp, Gossypium hirsutum
cccactcgatcgcccacgcgtacgcccacgcgtccgagcgaattcgtatttggtcatggacgcaaaccggagttcggacgacccggatccgaatttgaatctgattttggccgaagacctgaattggagcagcctcctgaggagagtggatctgggcatggccggaggccggcatatgagcattcacatcaaccggatttcggatccggccgtagatcagaatttgagcagcctccgccgcctgagtttggaactgggtatcgacggagacccgaatttgagcagcc

SEQ ID NO: 256339 - DNA, 299 bp, Gossypium hirsutum
tttgctccaccgcacttactcataaaacaggacacccgtgatttttgagtccggaaggtgaaggaggcacacaattcatgctcaagacgggccagcggcttcataatctgaccaggtgggcggcttacattcctttacatcgggtactccagaccggaactctgaagaggctgacaatcctctatcaactcgggtccatgcttgggaaagagatcatttgccttcgttttcaataaaccaggtcgacagagactcagcatggggtgcctttcatcaagctgctggtgcaccagatcctg

SEQ ID NO: 256340 - DNA, 230 bp, Gossypium hirsutum
  unsure (1)..(230): unsure at all n locations
gtgggtactgaagcaaaatctgaaatgacagcatctatggcaaacaaatattcaaatactatagtttcaaataggttcagtgagcaaaaaaggatttaggttacttgttcgttttgtgacggttaggttgttagagcttgtggttttgcatggcttccactctgcanagtgttagggttccttggacccccttctgcggtagcttgcttactgtccttagcgtataaaac

SEQ ID NO: 256341 - DNA, 338 bp, Gossypium hirsutum
ctctcaccatgtgtccatcttgtgaaagaatcggcggtgttagcgatggcagttccaagaacccattttcagtattgccttcaaagcctcatttctataatcgcttcaccaatccttctgcagcatgttgattccaagttcgttaattacaacttaaaatcagtagccaaagaaaggacgagaatagaccctccccataacccctctattttttggttaagggcttgtagtaaatcaaaattagtgtggactataaattaatttgtagaaaaccaatagtaaaaattactgatcaatctcctcatccatctttaaatgttttttgtaaatattcatta

SEQ ID NO: 256342 - DNA, 245 bp, Gossypium hirsutum
ctcactcgtccgaaaagaggaaaatagagggcctttgccccctctcttctccctttcctatttttctcctttggctaaggttaggaaacccatcatcgccgctgttaccacggcaacaccacaagcgaaggtcgacgacgcgaatgggtgaggtcatttagccccttttcaaggcgtccccgaaggctacgccttctcggtcttcccccatttggttcaaccccgacaacggaagaggaaccccg

SEQ ID NO: 256343 - DNA, 223 bp, Gossypium hirsutum
gcagatgttttgacaagggctacttcaagatggaaatgggcaaaaacatgtgtggagtggcaacatgtgcatcataccccgctgttgcttgatctgagggagaaatcatgaactagttcaaagtgccggcttaacagcctacaataaggtccaagacatgtaaaagaagcaaatgtattgtacacaacaaagacaatactgcaaattttcttccattaaatgc

SEQ ID NO: 256344 - DNA, 356 bp, Gossypium hirsutum
gtgaatcacagcttcaacagcttatgctcaaatatgtgcaccgtatcacacatgggcggtttgacaaggaactgaacaaaaaatttagggactgcacgacttgtggttgatttcgataggtggtggactggtgaggaatctgtgaatgttctcttagaagccgcaggccaaggtccaatctacatctgatggagctgattccactctttcaaaccccctgtgtgaggagtctgctcaaaattcttcaaaatactctaacagacagagcatacatccaccacctgcctttggctcatcgcctaatcttgaagcccttgcacttgaagcaaataagtctaaggatcaagatggagata

SEQ ID NO: 256345 - DNA, 360 bp, Gossypium hirsutum
aaacgaggatggaggatgatcaacagacgtggagttctgtgaattggccataaacaacaaagaaaacagcagcagacatcgacacctggaggaactaggcgactgataccatgttaagtgctaagtagaaaacatagcaagactacagaagctcactgcgtatggacttggaggaaataaaggtgcgtagggacctagatattgagttagaacattaatgttggagatgcctagtgctatttgtgtttcacttcaggttctactcttgattccaccaatactggtagcaattctcctatcaccaattggtgtatctcaagctttggttattcaaaacatgcccgctccctttggattact

SEQ ID NO: 256346 - DNA, 300 bp, Gossypium hirsutum
cttgctcgtcccttctaactttggttcttaacacagctcaaattatcaatcaaatcatgtaatttatcccaatttcagatttcaggcaatctttgttctaatggccgcaatcaatgtctctccactcttcacctcctcttcttcacttcgcactttctcttcttatgctccccaaaatacccctaccctttccttaaactcacgctttgccccttccctgtctttcccttccttttctctgagacctcccatttccacaaaaactcgctctttaataatcgcttctgctgtcaagaacct

SEQ ID NO: 256347 - DNA, 109 bp, Gossypium hirsutum
ttttatacactatttgcggttgtccgaggtgtggggcgtctacttgccgctccaaattccggtcacctcgatccgccgctacttacacttcgcaacaacagaaaggatc

SEQ ID NO: 256348 - DNA, 414 bp, Gossypium hirsutum
tttctagctgacatgaaatcagccgaaactgaagagagcatgatggaaaacgaaggatgtctagcagttgttccatgggttccctctcagattgcttcagtagaaagtagagatagcgaacagcaagttccagcgttgatggaaactgatgaaatggatgtagaagagagctgtagcaacagtggaagtatgcaggaagagcatgggtatgaattggatgggttgaagccaagagacgccctccataactgggcgcagcagcaacattgcatgcttccccagcctcctcaaaacccttttactccaatcacatggtctgattgataactggggattatagtgttgccttttccttttgtaaatggttttgtcgtgtaatgttaggggttaagaaatgagatggacagagcctga

SEQ ID NO: 256349 - DNA, 280 bp, Gossypium hirsutum
tcgccctcgcgttcgcccacgcgtccgcccacgcgtccggttcactgattcttttctggtttcctttacattttttacatttgttaatttcttggtgttgttacctgcctatgtgtatacatatacatacatacatacgtacatggttagttttttagacttcgagttattttatttactgttgttatgtgatttgacattttatacacagcttggtctaaatatatattataagcgattttacttgaagcaaatacatgaatatctttcagtttttccc

SEQ ID NO: 256350 - DNA, 414 bp, Gossypium hirsutum
ccttctcgtccgcctctctaccagccgcagactgggtagctatgagctctcttgttcgaaatgccacatccaattttagccgtagagtggatgggtacgaactgttggatcaaagcggcgaaacaagggaagaaaatccctctcaatataggacgtcttccaagaggagacctcacagcgtggtggcttccctgagttacaggcgagatcgagctaagaaaaggcagattttcttgaggtcatacaagttatcagccatggacaacaactggggacaacccaagccaaagtcgcggaaactgaagaagatggtgcttaaggttaagaccgtggtggtatcactggtgtcgtttatgcgaattggttccttcaaatcttgtaactgtggatcagcaatttgtgcagctgctccta

SEQ ID NO: 256351 - DNA, 432 bp, Gossypium hirsutum
ttttgatatcagatgcagtagccgatggtgatgatgcggaaaaagttccccagtcgggtcattacaaggaagaaagcacgcgggtggctgatcttcttgagaatgaaaagaaagcggttgaagaacttaaagtgcttgttcgagaagcgcttaacaagcatgagtttggtgggtttgcaatgccgcagcaacagcaacagcaacagcaacagcaacagcaacaaccaaaggatgattctgccaaagaagaaccaaaaccaaaagcagaagcagtcacagaaactgtggccgagacaaaggaagaaagcatcgctcaggctgaaacaggagatgatgaagagaaggttgctactgctactatacgatctgacgcagtggaagacgatggtgccaagactgtagaggccattgaagacactattgtttcagtct

SEQ ID NO: 256352 - DNA, 412 bp, Gossypium hirsutum
ccctcgcgtccgcgacaaatatgctgcggaagctggtttttcgacaggcttccagagcttaccgatccctgtctactcagtcaacgcttgctttactcagcaaatgctctgttttctcttattgttcatcatcacgacctgaaatccctcctagtaattccatcgaacaccttgaagatcaacccaccaacaccatttccattgatcgttctggactatgtagtccccctgagcattctcatgaaccttcctcagactctgaactggttaagcatctcaaaggcattattaagtttcgtggtgggccgatatctgtggcagaatatatggaagaagtcttaacaaatcccaaggctgggttctatattaaccgggatgtctttggagctgaaggtgatttcataacatctcc

SEQ ID NO: 256353 - DNA, 444 bp, Gossypium hirsutum
tttacgcgtccgaaggaaggccgtgaaccctggcgtttggaatagtttagatttcaacatttgcgcaaagatgggagtgaaaaattgagcagtgaggcagcaaaacaagtttatgatgaagcatgcaagatggttaaagactctatgccaacacctgagagctctttcacacctcaagataatattgcattagaaaacaaggtctatacacaagtgttcggctctgaaaaggatggaaaaatgttgggatatggacgtgggatgaccaaatccaagttgtttggctatgggtcagtcacccgaggaagccaatctacatcggctattagtacattgattgaaaagatgagtgctaaacatgtcgagcaaatacaaacaattcaagccgaacaagcaattcgagagaaaactttactcgaggaagcataatctcgattttgtacg

SEQ ID NO: 256354 - DNA, 318 bp, Gossypium hirsutum
tgcttatttacaccattgatggttatatgcggagagagacttggatacaagttcagttcatgaggttgcattctgaaaaggccgttcaaattttattaatatgaaatattcaatcaacctgtaggacttggttttatgttctatgaattcacattgggtttctgtttttcgtctgattgctagtgttactatggttccattttgtcaagctgttttccacaaatggttcctgacatttcttgttattatgtttacttctctcggggattgtttaacagctttttcaattagtttagcatattatgctatttcctggtt

SEQ ID NO: 256355 - DNA, 285 bp, Gossypium hirsutum
ctttttcgtccggaaacttgcagcataggttactgaggaatctggtggtctggcagtgtagtgtactatttggtttctgctaagctgctgtgttcacaacattgcactgttttagaaaataatgaacggctctattggctggccgggctgggtacttgttttgttcatcatagcatccacaacattgactttttggcccattacttgtaatttcactgttcgcaacatatcatgatctatgtattttgctatatcatagatgtcgcataaggataaaaataaatg

SEQ ID NO: 256356 - DNA, 448 bp, Gossypium hirsutum
ttcatcgcgtccgcccacgcgtccgggttgataccggaaaccgacctgtgacaggaatacgtttatacttggaaggtaggaagaacgaccatctagcaatccatcttcagcatctttcaactcttcctacaatccttcagctctcggatgaccacaattacgagcctaacgacgagccacttggacgcgggtacttcgagccagtcaagtggagcatattctcgcatgtatacactgcacctatacaatacaatggaagccactttgatgataccgctgccatcgtaaccaagggtgggtttgaggtaaagtctgtcgggatgaggaaagttctattcctgaggctcggattctccatggtcagtttcactaagatccgtcgatccgaatgggacggaccctcgacattgtcacggaaatcaggagttttctcgatgttgatcagcac

SEQ ID NO: 256357 - DNA, 306 bp, Gossypium hirsutum
gtcctagatcgcgagcgccgcccttccttttgtgttttttttttttttttttttgttttttttttttttcttttttttttttttttttgtttttccttgtttctgaaaaaccccaaaaaactccggagttatttttattaaaaatcggggcaacttcattggagggacaagggtctaaaacccaccgaagtggggacaccccccccaaagggctcccggaaaagaaaatctgaaccgggggggtcaagaccaggggggggggaaaaaaaaaaggccccccctccgaccccaaggaatcaagggggg

SEQ ID NO: 256358 - DNA, 284 bp, Gossypium hirsutum
tttacgcgtgggcggacgcgtgggcaagcacagaggcaacacccaagagagttttcatccgattgtagtcattggtgcctccctggggtgcctgacatttggaatgagatgttaagtgcaatggtctaagaatgtcaccaatggtgaattggctttttaactgtttctaccaaaaatgtagtctttaagtttcatcaagttagattagttgaggtttatgcattggttttggtctgaaaaagttttagagtgatggtatgtatgtttggcatattcaatttagt

SEQ ID NO: 256359 - DNA, 360 bp, Gossypium hirsutum
acgggtcgaatcttctaaactatccaaatacctctaacggatactctttaatatttaagcttcatattccggctttggatcctagggttttcttttttgttttctttttctccagcttcgtctgtaatggctcaaccaacagggaggggaagagtggtaggggactatttagtgggccggcaaatcgggtcgggttccttctcgattgtctggcatgcgaggcatcgagttcatggaacggaagtggcgataaaggagatcgtaacgagtcgattgaatagaagttgcaggatagtttgatgtcagagatctttatcttgaagagaattaatcatcctaatattattcgactgcatgata

SEQ ID NO: 256360 - DNA, 371 bp, Gossypium hirsutum
gcattttcttgtttgtgttaccggctgaggatcctcaaacctcgcagaagaaagaagaaagagaagaatcatggaacacgataagttggattacgtactggttccattgggactgctgctgctttctctctatcatctatggcttctttgcaccattatcaagcatgctacaaggactgtcatcggcttaaatgcccattctcgtcaccaatgggttgtctccatgatgtctgatccgttgaaaaatggtgttctagcagtacatacaatacgcaacaacataatggcgtcgacacttttggccacgatagcaatcactctcagttcactgattagtgttttcgttagcagcagctcagactctggcaaca

SEQ ID NO: 256361 - DNA, 321 bp, Gossypium hirsutum
ctactcgtccgtgataaatcatccccataccgtgagctagcagatttgtcaagttctagaagcctgaatttgagtaggagcttgagttgtagagcagatgtcatgaggggtacatcttctccttatgccgaccgaaaacattttgaaagcaccccgcctaatggatgggagaaaatttttcctggaagaccacatggttatggaaagaatttccctttattaaattatggggccaataatggagtgctctcaaggaataattctcaatcttctcttgggagtgcttccatcaagacttttgtggatgaggatataactagc

SEQ ID NO: 256362 - DNA, 292 bp, Gossypium hirsutum
tttttatggactttgatcttgccagcacgagcactggattagagctatggcttgacagtttattgatggatcatattgggtatacctgcaactgcttgtaaatgcatatcccgtgcatgataatcacccttcctagtattcattgcttgactgaattactgggttcccacggtgtttgcttcgttcgttagttcatatactactcaaggccactacacttgtaaatatgctgtctctgttatcagactggaactgtgttctcgactcttttatttggaaaattttcatgcca

SEQ ID NO: 256363 - DNA, 187 bp, Gossypium hirsutum
caacatatgagtgatggaaaatattccgagactgtcgggagtgatcttgctcccccattggctcgggtggtttcaacttctgttcctactaataagccgaagttggttatgtcacaaaccggtcttcaagctcctaacactcacactatgcggaaacaagaagcttccacccaagaaccttatcaag

SEQ ID NO: 256364 - DNA, 321 bp, Gossypium hirsutum
ggtaattacagggcattcaatagagaattgcgtgtgccttcatgaaactagttgaaagattcattaaaataggcattgtcaaattcgatgaggcctccagtgtagaaaatccgctactcaatcatacggataatgaagggaatgcgatgaatgaagaaatgttagaaaatgttcacatcagtgccgaatacgaagaaacaactggagaagagatcttattagatgttcgcccttataaacttgggagtgttctgaacaattgaactgcagaagaaattcttgtagagtaatgatcagaacatttttgtttttagcctaaaa

SEQ ID NO: 256365 - DNA, 117 bp, Gossypium hirsutum
cctcacaagcctcgactggatcagatccgggggcgggtttttataacaccgttctgtggtcctcccttacgcggcttacgctcggaaattgaagcttgaaaactcgaagctcgttag

SEQ ID NO: 256366 - DNA, 171 bp, Gossypium hirsutum
ttgttgccttccatttttcattttgctgggcgtcactaatctgtctctcgtttatgctatcaagttcgcccaggtaatgcctgacatacctagcagcctcttttcctaaaaaatccttaccttcatgtaagttcttgttcctgtccatccaaagaacccacataccataga

SEQ ID NO: 256367 - DNA, 208 bp, Gossypium hirsutum
ctgctgaaccctaggtcctcccttctcaagcgcgaaaccttcatcaagaatggcgtctcgcccttctggcttcgacttactgctctttggcctcaaaacccccctttagcttcgatttcgacgaagcaagagtggatcgacggccaaatcgcacggtatagcctctttttctctctttctttgctttctattataacgatgaatggat

SEQ ID NO: 256368 - DNA, 284 bp, Gossypium hirsutum
tcccacgcgtccgcccacgcgtccggaagctagactgcatgaaacagtgggtcccacgtgattcttctgctcctataacgcatgcaacgttctcatgtgatagccaactggaatggcttttgaagtatgtcaagtaagagtctcattttatgatgctggattatttagaattctgattgcaatatagtctgtgtttctgtagaataagagtgaattttaatgcattgtgctttattatgtaagatggaatgctatagcatcaagatcacaaatggtgtctatgt

SEQ ID NO: 256369 - DNA, 241 bp, Gossypium hirsutum
tcccacgcgtccgcccacgcgtccgcccacgcgtgcgtccacgcgtccggctacttgagcgagtcggcgtgcatattgtggagtgcgcttgtgttatcccaatggtccggaattgtttatggattatggtaaaatttgtattggaataccaacagtgagttgcttggaacatgactgctctccaaaccttgtaaaaatttgttaaaaacttcatttaaatgaaccttttcttttcttgttc

SEQ ID NO: 256370 - DNA, 293 bp, Gossypium hirsutum
ttctctttcaatcctgatcgtgcttatgtttttggttatgagccacattccgttttgccgattggagttgttacactcgctggacatacaagtttcatgcctcttcctaaaattaaagtccttgcaagcagcgctgtattccataccccatttttgaggcatatatggacatggttggatgtggcaacagcatcaagaaaaaaattttattccctattggatgccggttatagttgtattgtagtgcctggtggagtgcaggagacatttcacatggaccatgattctgagat

SEQ ID NO: 256371 - DNA, 330 bp, Gossypium hirsutum
tctctttcgtccgctttgttacagagatgatgtatagtcaatatcagtgatgtttaccttttacttttcttcgctttttctttcttaatggaagcgatcttttatacttttattatatgtatgggtatcctctttctttctttctttctttcttttctttttcactttatggttttgcaattgtggtaatttccgttatcagtatgccccttgttgtgacgttgttcctctgccatcgccagcattagtgattctttcatgtactttgctgtcacccacattaccaaaagtcatcaattactaatatcatgacagctttttggtcttttt

SEQ ID NO: 256372 - DNA, 289 bp, Gossypium hirsutum
tcccacgcgtccgctctaaaaaaaggtaaaaaggccgtctcaaaactaagaatagtgttgtggccttttatagccatttttacaatggttacttgctatttctttgctcacgtcgcaggtcatgaagacgtggaggaggaacgggcgtggggcgtgctacacacgagctgggacgaacgtgcgaggtggagtgcgtggtgactgccggtggctgcgttcgtgcggcgcatggagtagcctagggttcttttttgatttgggctattggagagttttgggctttagaatt

SEQ ID NO: 256373 - DNA, 322 bp, Gossypium hirsutum
gtttgggtgtgaaacccaatgctaagtcatatgcgttgcttattgatgctcatctcatcaatcgagatcaaaaagctgctctctctatgattgacaagatggtgacctctggatttgtaccatccaaagaaacactaaaaagggtcagaaggcgatgataaagttgaatctctggctaagaaattcaggatcaggatgggctctgaaaatcgcaggggcatcctttttgatcttgactatggcactgaatatgcatcataggcaagttatgcagtcttaaggcttgggactacatgatgcttgaaattatcaagagcgacaa

SEQ ID NO: 256374 - DNA, 200 bp, Gossypium hirsutum
tccacgcgtccgatagtgttcacttttaaggggaatcttgtgctaactttttgttctactactaaacctttgtatcaggttttggaattaagcaagaaataataatacttaacctcttaaacaaaactactttcattttgcaccaatcacaatgtatttggaactataaacattgcttttggaaattaattattttactc

SEQ ID NO: 256375 - DNA, 309 bp, Gossypium hirsutum
  unsure (1)..(309): unsure at all n locations
tancgcttttttctattctctatgcgtgtgtacagatattatatgcgtaaaaaatcaaggtacaaataatggctttttatagccaaatttatagaataaatggaaaaataaaaatacattttccctctgtcatttggctgtacatgctgttgttgcttcttctcgtatattcttttgtaggtatggagcaacggtcgtacggagaaagccactcatgaaagccgtgcgtgagttcgattgctgcactggtgtgttctagaaacccttaggtttctggcattttcaagcagctgggccttttgggccatt

SEQ ID NO: 256376 - DNA, 256 bp, Gossypium hirsutum
tgaaatttcttctcttttttccccattttatgggggcccataccatttccccgctaccccgattccctttattttttcccccaatttccccaaatcggcagccctctgcatctctgtcagtagcccgcttctgtatctccgtcgagatatgctgtcaagtatactgaaagaggacccaaggatcttcaaaatctgagagaagaaattcaatcccaaaaaaagaaaaagaaccctaaaagatgaggattaatgggag

SEQ ID NO: 256377 - DNA, 174 bp, Gossypium hirsutum
acgcccaaattctcttttgacgaaaatgaaatgactgtccaaatgaggtgttgaaatgcaataattggtgtgtataaaatttcgtttcaatgcatatttgctcaaccgctttttttttaatgaaaaactaaaagctacaaacactcacaacttgcaggaacaataaactcaaag

SEQ ID NO: 256378 - DNA, 119 bp, Gossypium hirsutum
tttactcttccgcttagctccatattggttacccgtggggatcatattacaaggtctaaatcccatggagggcggctaagttacaatgaccttaataatgataggttagaccttttatt

SEQ ID NO: 256379 - DNA, 131 bp, Gossypium hirsutum
cgccgctaatcttagggtttgacaaacctctcacaggcggtggccttttttattattcacttcggcagattccatggcaccaaagaaagacaaagcccctcctccttcatccaagcctgcaaagtctggag

SEQ ID NO: 256380 - DNA, 99 bp, Gossypium hirsutum
ttttaatgcgatgttaattggagcaatgtttctcagtttgaaaatgccatcttgcaaaggttaacctgcaaagaagttacatctagaggcgatgactgt

SEQ ID NO: 256381 - DNA, 276 bp, Gossypium hirsutum
tgacaattttcttcataaatttccaccctgagaatggtggaaacgaagaaccccctccatctgatcaacctgttgaaaatgacggaaacgaggaagttcctgcttcaccaaatcaaaatgaggagcaggatccttaaagtttctcatttacagacatggctgttattcaaaatagataacctggtaactatttcggggattgaacctgaaatatgaaccacagtttggcaggggacgaagatgcataatgaagtaatgattcagaaatgctgggtt

SEQ ID NO: 256382 - DNA, 401 bp, Gossypium hirsutum
cttgaaacagcagcaacagcaagtggaaagaggagagttctccccttgtggtactccaactggccttgattctagagatccatttgaccttctgctagggtcaaggatgttttacaatacccaggacttgttatggaggagaaagttggaggagcaagctgatctccagcaagcccttgagcttcaaaatagaaggttgatgggcctgcaactccttaatgtgaagaagcatcaccatcacagggctctttctagtggaagtcccattccatcacctacccactcaccaaacccgttcagccagtcacttgtacttactcaatttcacttcaatcagaaccaccactcaaccgttacttgtaatcatcgtcaatactatacttactaccatacaaaatgcg

SEQ ID NO: 256383 - DNA, 212 bp, Gossypium hirsutum
ttttatttatctttcgctccactgcactatccctattcttccacctttttcttttctttttttttaatgatcctttcttgccaaaaatacccaataattcctctggggaaaaaaaagattagttgagttcacaatcatgtcaggtgatattgccagagattctgctgaaggctcctcacggttctccgtcagccaccacattcaacctcaat

SEQ ID NO: 256384 - DNA, 425 bp, Gossypium hirsutum
ttcaattagcagtgaagaagatatgttggcaacgccagttattcaaatgcccacaattactgcagttaaggctgtttccctctcaaatccgaaccaacatccatttcttcgcccacatttggttggtttttgtttgagaaaacccaaaatcccttccaccactcgaacagcccttttttgctgcaaatctcagcttcaagattttgcccctcttacttccgctgcctatggaacccttcttttctccggcggtctctttgcctttactaaatctgggagtaaaggatcgctctttggaggcctcactggagctgctcttatggcatctgcttattatcttatgcagtcaacagagacaaaagcaattggtgatgcccttggttttgggtctgccttccttttctcctgtgtatttgggatacgat

SEQ ID NO: 256385 - DNA, 235 bp, Gossypium hirsutum
cctacgcttccggggaaacataggatacaagctgaactcaaaaggctagaccaagaagctagattcttagaggaagagctggagcacttggaaaagatggagaaggcatcaactgcatgcaaagagatgctgagtaaagtggaaagtacacctgatccactccttccaatcacaaatggtcctctaaatctgacgtgggatagatggtttgaaggtccccaggaatctcaaggct

SEQ ID NO: 256386 - DNA, 140 bp, Gossypium hirsutum
ctttcttgacttatgtaaagaagactgttgataaagtatcaggagctatgaagaaccaccagatacccaaatcgcgtgcaaagattgatcactatattgagtcatctcagcggaaattgacaaaacttgtgatgggttat

SEQ ID NO: 256387 - DNA, 193 bp, Gossypium hirsutum
cccactgctacctctccacgcgtccgcccacgcgtccgcttttctctgcatttttttgtttctcttacctatcaattgtcccttttttgcttgtaatttatcttcatggttgccatggtttctgcatatttcttcgtgtttctagctctatttggcatggttgcatctgaccctgatcatctacaggatcttt

SEQ ID NO: 256388 - DNA, 170 bp, Gossypium hirsutum
cccacgttttctcccacgcgtccgggaaatcaacaaaggtggggcttacactctttaaaggcgaatgacaaaaccaaaccattcttcatcatcagaagctgaaagctggagcagcaacaatactaataactccaattcatcattcccaacatcaacttctttggaaactg

SEQ ID NO: 256389 - DNA, 153 bp, Gossypium hirsutum
ctcacatcctatcaactggatactgaattcaactcaacggtggattactttgatatctggaaacaatcttatttgaaaacttatgctgatgttgaccttgagcttaagcaccatcctggcattgatgctttccgtagcggcactacagctttg

SEQ ID NO: 256390 - DNA, 137 bp, Gossypium hirsutum
ctacgcttccgcccacgcgtccgaccccatatcctctgtctctgagtaatacatacagaagaaaaggatgctgaattcagcccaaacatcttcttctcaatcctcagttttctgggttctggtttagggttatgggc

SEQ ID NO: 256391 - DNA, 293 bp, Gossypium hirsutum
tcgtcttttttgaaagaaaaacccatccttgttggtgtctgctaaaccagaggcgttattcaacctccccttcgcctccatatcttcgaatcagatccccgaatcctcatcaaagcttcaatttcagtgaagcaaacaaagattcagaggctccttcaacaacagataagtctccctttccccttatagattcattttttcatgcaatagataaaaatgatgaaacagaaatgaaaatcaaggaagaacacgatctaaaatcaccttcaaactaatttcaaaatgatttttct

SEQ ID NO: 256392 - DNA, 107 bp, Gossypium hirsutum
acatcagatggttgtctgcctctttacctggttggagttaaatcaatagatgtcagtcgaaaattccgattgtatgtatcattcattttgattttactattagttct

SEQ ID NO: 256393 - DNA, 105 bp, Gossypium hirsutum
ccctcattgcatgcctctcacactggaatatgggaacactgtctcgcttgccccgacaaaggattatcaagccaacagattggttcctggagttcttcagctacc

SEQ ID NO: 256394 - DNA, 172 bp, Gossypium hirsutum
tcgtccacgcgtccgtgttaatcaggagcgagagaaagttgaacagttgctacttgaatcaactacaagttatcccatcatttgtgacaacctcaaaaagatatatccagcaagggatggaaatcctgcaaaaattgctgtgagaggattgtctcttgctttgcctagaggg

SEQ ID NO: 256395 - DNA, 146 bp, Gossypium hirsutum
gtaatttgggacaccaaaggagcacaggaaagctaaaccttatcatgatcacgtctttgttttctccattgctgatgaccacatatggttccgcaattatcagatatctgttcctcacaatgaatcagacaaaatggttcgagggg

SEQ ID NO: 256396 - DNA, 138 bp, Gossypium hirsutum
tcttcttcttaatcatcctgaagccatgcataaagcttggactgaaataactgctgaagtgggacatgacaagtttttagatgaaacagacctgccaaagttgaattatctacaatccataatttcagaaactatgag

SEQ ID NO: 256397 - DNA, 99 bp, Gossypium hirsutum
gcctgccacatctcgacctctttatgctaatcttcttcaagtagccccattcccacctactgcatcttcaggggtataggaattgcgatttcaatccac

SEQ ID NO: 256398 - DNA, 237 bp, Gossypium hirsutum
gcctcattttcacacttgtcattctgtttgcttggctaatattagctgatggaatcagatttaccgaggaaggtaggctttccaagttagacaaagatgagtactactcgggagaactggttacaaagaccctgattggcagccgtaataagatcaaagatagccggggcacacatggagcagatgctgctgctgttaccaccattttcgcatccaataccaaggatttgcacgcca

SEQ ID NO: 256399 - DNA, 155 bp, Gossypium hirsutum
tctttaattcttctgtttgatgatccatctgcttgcttatacagcttcacccacagacggtgtctgctcaaggctgcagcaattgaaatattgtttttttttttttttggttctgtaacattccaagtcataaattacgtaaatgattcagttgt

SEQ ID NO: 256400 - DNA, 131 bp, Gossypium hirsutum
tgcacattaccgtaatttgcatattagtaaccatgaattcaattacttggcatctctagaggatacatggctccagaatacgctgttcgtggcatgttgactcaaaaggctgacgtttatagtttcggtgt

SEQ ID NO: 256401 - DNA, 101 bp, Gossypium hirsutum
ttaggtcaagatggactgaagaatcctttggcggttcatttagcaatctatcaagcagtgtgactactcattctgtgcaaagttttaatgtagaaccattg

SEQ ID NO: 256402 - DNA, 202 bp, Gossypium hirsutum
cctcgcgtccggctttaaatgaaatgtgggacattttacgcttcctcttccgcttaccttcctcagtctcctcttccttgctttcctcgtcatcttcttcattatcttcactttcgtgttctttgccctcgtcatcaccaacatcttcattttcatcttcatctctcatcctcatctttcaacatcatcctctcctttttct

SEQ ID NO: 256403 - DNA, 173 bp, Gossypium hirsutum
tcgcccacgcgtccggaaaatatctcaaatctcctcctcctcctcagtcgtgctttacctccgtcgccgtcggccattccccctgcctcgccatctctctccggcggccttcgcttcgcctcctcatctctggctctgtccgtccgtcggccttgccttgcctcctcatctct

SEQ ID NO: 256404 - DNA, 277 bp, Gossypium hirsutum
gttgttttgtatgggatccgaaaatcgtccacttctttggtgttttcccttatgtcaaaattcaaaaaccaaagagccagtgaaaaaaggcatgcttgcttcacaaggcaattcttttttacccagaaaagatgaatgaaagaaggttgttttgtcccatattttaaaattcatattagcttcaaaacccccatcacttgaatcttgtaaggctttcatggatttggacttgcagaaattagtttcctgtatttgtgatagaaataggggggggggg

SEQ ID NO: 256405 - DNA, 417 bp, Gossypium hirsutum
  unsure (1)..(417): unsure at all n locations
atcatatcttgctacacccttttggctctgctatttctattcattaaagcaaagctatggctaaattactggccacccttttcatcctaaccctctttgtttccactttatcctttgcagctcgcactgctccacctttccctgcaaatacccaacaacaacaagctcagggtgttgttgaagttgaagatagctgtgaaggagttgcggaagaagagtgtttgatgagaagaactcttgctgctcatactgactatatctatactcaaaaccacaatccatgagcttcaaatttcttgtttttctttagccatcaacccactacatatatatatgtactgtatgtatatgcttgnttgntgntgattatgatataatttaataacataatcaatcagaggctttttttttccccta

SEQ ID NO: 256406 - DNA, 430 bp, Gossypium hirsutum
ttggtttctaagatattccttccccttcctttcctttctatttcttcttctctccctctctttcaaccttcttctccactttcctttgttgctttttcaacaatggatgcatcttctacaagctcagtcaatgggttctataccttcttgactcgtggcatagatgatcttgaacgtgtttatctctctaataacttcatgtccatacaattccttcaaagggttctttcccttctccgatctttccactcccagctactcctcctcgtccaaaaactccaccttcccgtcggtgataagtggctcgatgaatacatggatgaaagttctaagctctgggaagcttgtcatgttattaaatcaggcatctccggcatcgaaaattattactcggctggctttaacatcatttcttcttttgataatcatc

SEQ ID NO: 256407 - DNA, 397 bp, Gossypium hirsutum
ttgttgttgcgctagggactattattttagctgaaaaaatccaccttggaagcatactgggagccattatcatagtctcaggcctttacactgtggtttggggcaaaagcaaagatgtgaaaactccagaacttgaagagaaaagcaacggcctgcaggaattgccaatcacagacaatggtagatcaatgaatgttgttgatggagctgcgaaagctgttaacattccggattcaaagaacactttcagcacacgaggaacataaaacaatatagatatttccttcaaaatgctgatatatttcaagcagagtttgttctttccaaggcgataaaaactactatgtaacccacccctaccagaaactattttctacctttaataatcatcttttga

SEQ ID NO: 256408 - DNA, 298 bp, Gossypium hirsutum
aatctacaaagcttgtgcttcaccctaggtcccaaaatttgaactcttctataggcctcaactagtttcgcgaatccaatcgtctgctaaaatcttcacagcatacctcaggacagagctcctcagctgccccaaaagaaggcgagggcctccgctgcaaaagccgagccaacattctcgtgtatagttgatctagaggaaaccaaccttcctcttccatttctggcaacaaaccctgaccctgattaaatagagccctgtcaaatgccgcgtcaaagttgatcttgacccactccct

SEQ ID NO: 256409 - DNA, 384 bp, Gossypium hirsutum
tcgttcacgcgtccgtcttcctatcatttctttccccctcttccctctctacacgcctaagatacctgaagatggaatctttttaattagttttcttttttaccgtcagcaagtgtttggagaaatgccagaatcatggccaccttcacctcctccacctatacttctgtctcgcctcattcgtttttaacgcacttccgtgctcgggttttcccatcctgtttctgcgggattaacccagggaacaaagggaattcggtgtctctgaagctgaatcttgttcgcgggttggtgtttggggaagataagaaaagggtttcttggtggtcttgttgttgcaagaaagggtgggacaacgacggggatttagcattggaggcagat

SEQ ID NO: 256410 - DNA, 378 bp, Gossypium hirsutum
cttgagtccgagattatagattcatcactatgggacaaggagctagaaaagcagctgttggacatgctcgaaatcgcctgcagatgtttagaccaggatccaaggcgaagacccttaatcgatgaagttgtttcatggctgaatagtatcggaaacgaggttgtttgtcaatgaacatccatcgatttgaaaaatcttagctgggagggtatacctgtaaagcagacaccgtcaaagtttcgataagttccgaaggattactgaccgaatcacttagaacaaagcattgcccatggtgtactaacgtttgagagtttgtatgcttaggctctttaagccattttcttctgtctgaaataagcaaattatagaatatct

SEQ ID NO: 256411 - DNA, 416 bp, Gossypium hirsutum
  unsure (1)..(416): unsure at all n locations
atcaaacagaacctcccattacattttcctttattttccttctttattacaagtgcaaaagaaatatgagtcagatttgttcctgaaggtaactgcaaaaaaattggaggattggccacaccaactccaggaaaatcgaagaggcctcatcgttttcgagcaggaactaggtctcttcaagagatccggaaataccagaagacctcaaatctactcgttcctactgccagcttcatcagagaaatagagccaatcccaagtggaaatctgcctcctggttttgatcctattgaaggttgcaagcttatcagaaaggaaaatgtattattttcaagattttccctcttctttttttccctttatgaagctgtgagggtgcactataatgaatattntatatggagctttaattctct

SEQ ID NO: 256412 - DNA, 123 bp, Gossypium hirsutum
tcgtttacgcgtccgtaactctattttcatgttatcgtgtttaggccagagcattacgccacacggcataaaatatgcatctcaaagactagatacatttgcatgtgttaggtatagaaaaag

SEQ ID NO: 256413 - DNA, 510 bp, Gossypium hirsutum
  unsure (1)..(510): unsure at all n locations
ttctttttttcttcttcctcttcctctcttttcttcatagccgccacaccttccaccatctttggaccataatatttttcatctttcttgccaaatcttcaacgttcgaattaattcccctgtcactgttgcatcttacatcatcctcgagtcactgatttcactctccttgtcgatttacctctattcatttgaatcaccattgacgttgagattgtcgaccttagatctatatatattcgctgtagatcgtttgaagcaccagatctaggagaatcttatcaaaattgatccgaaagagtgtgccgaaatagtgacagggtcgtacgggcgtgtagggtgacaggtgtgggccataattatgtagtgtgtgtgtatgtgngtcgtgtgcttcagtcgattgtgtgggcgttacaatgcttattcagttttttttaatgaatactgaataaaatcgatctgtgaatctaattacaatgagaattatcagatctaaaaaggataacatct

SEQ ID NO: 256414 - DNA, 260 bp, Gossypium hirsutum
tttattaccaaaaacagttagacaagttgaggaagaacccattcctgagcatgttcagaagatgtttgatgaagtaaaagacactgatcatcatcaccaccatcatcatggtcatgcccatggtcatgatcatgatcatgcagctggatttatggatgcatacggtcttggtcacacatggggaagttgagatgtgtttttccacggtcacggcgtgatcgcatggcccttggtcatgatcatgcatatagatttatgga

SEQ ID NO: 256415 - DNA, 507 bp, Gossypium hirsutum
  unsure (1)..(507): unsure at all n locations
aattaaccctctaactatatcgtatttatcacttaggtgcctaagatttttttttttgcaaaaatgatatttaaacggttaattttatcttattttaccaaatatagcatcatgttttattggcatcgtacacttttttagataaaatttaacgaaagtaatagtttaagcatatttttgaccaaaaaaattatgtacttaaattgagaaaattgacatagtttagacagtaattttgcagttaaacctttttctatttatttgatgcatatgaagattttcccatttattgatgttttatatttatatttatttatttatatcagtagtgaatattatttattaagtgttgtatttagttgataggggtggtactgaggtgctcatgagtcaggtcgagttcagattgagtctaagcgtgatattaacatatattatgcttgtccaaatccggccatcatgataaacaattntaatctttttttattattttaatatcttacatat

SEQ ID NO: 256416 - DNA, 414 bp, Gossypium hirsutum
cgtagattttcacaccgagagctaaaagtacttcatcattacctggtacaccgattgcacattcaaaccccgagtccacgcacggggggcagaaaggagggatcaccggaccacccattcatcgttcgcattcagtgcctacacttaacaaagatggaagcataacgcaattggattcttttggcggtgtatttcgtgtaattcctacaactccacgagtagtcaaaggaacagttgtaacaacatcaaacatagttatcaaaagtgatatggatggaaacggtgatgatggtgaagatattcccgaagaagaagctgtttgtcgaatttgcttgatcgaactcggagaaggagccgagacccttaagatggaatgtagctgcaaaggtgaacttgcccttgcgcaccaagaat

SEQ ID NO: 256417 - DNA, 232 bp, Gossypium hirsutum
tttgatcactctctgggatatgaggggcgatgatgaggatcagctagcctgatgctgatgagatgtctactttcttgaagcgtggtagagagatgatgttgacatcaaaatcgaattagggtttggaaactcgtgttctttatcgaaggctttcaaaatttgaactgatcaagtcactgctttgttagtccaataatttcgatcagtttatttaaataaattatcaaaatca

SEQ ID NO: 256418 - DNA, 426 bp, Gossypium hirsutum
cctactcgtccggggagacagaaaaaatgctgaagaatggatgttagattatgcacttcaacaagtggttgctaaactaactccagaaaggaagaggcgagtagggctgcttgtcgaagcatttgagaccgtcattccggctataagttgaaatcatcaaaagtgctgatatacctcctccagcaacaaccagtcaaactggtgtcagtttacaaggtaagaccaaaagaagtggccatttcatgcggccaatctgaatgaaacagaagcatcaattcgttcgggtgaaacatcacagtaggaaaagaacagaaattaggaggtagcccttaagagtctgagaagttgcaagttccatattttttctgaaacctcaaagcatattttgagcatgcttatgatgggaaaaaaaataagaataccata

SEQ ID NO: 256419 - DNA, 469 bp, Gossypium hirsutum
cccacgcgtccgcccacgcgtccggttacaaccagtttctggattattatcggctttactagtaaaacaggttacagaggtttcacaaacaggttacagaggttacagaggttacaaccattgctgtacctttgagattattgggttttgagggacgataatggggaagttagaaggaagatatcagcagtgtcaaccagagctcacaccagaaaatctcatcaaagttcttcttttaagctttctccaggtgaggaaagaaaaattaggagacagaattacagcacttcaccagcttgtttcaccatttgggaaggttcatggagactatgcgagttttgggtgatgagatctgctatcgtgctaaagactatcttagtatccacaagttatttgctactcgtgctgatctttagcgaactgtgtacacccactctaaagtgaagttgtgtaggcttcttatatgaaa

SEQ ID NO: 256420 - DNA, 323 bp, Gossypium hirsutum
ggatagtttattttattcgtgttttttaattaatttgtaaaaaaaaatagagaatatgatatgcattcttttcatggagttacctcatacactatcatccttttggtggaagctctccatcgcatgggggactccatggattcatgcatcaactattgtatttcctttttttgtctttccttacattcataaagtgtaatgtgagggaagttaaatgttggtagagcactgctctcgtacacaagtatgtcattgttggttgtttgtattgtttattagggctttgtaacaaaaaaaaatattagttccgaatttttaaccct

SEQ ID NO: 256421 - DNA, 448 bp, Gossypium hirsutum
  unsure (1)..(448): unsure at all n locations
gagcttcctcttaagttttcattcaacatatatatatcttttagttccaaattttgatttttgatccatttttttggctttgtaaaggaagataaattctgggttttgtttgttctgattccaagtttcaatctttcattaagttttttttagcaaaatctgcttgttttcctagcagatttcaagggtttaaggtttgactgtggtgagggcttctggctattgatgaaatgaaaaagaacccattttgtgcttgtgatgatgctgaagatatatggtgttgcaagaacaatttgtcagggttcttggtagctctgctatgtgtttcattgacttgcagctctgttattattatgctgtgctaactactttgtttatgttcatcaattgccaagcttccagaaaaccagactgtagatagactnttaagactctatgaatttgatat

SEQ ID NO: 256422 - DNA, 319 bp, Gossypium hirsutum
accacttttccgattctctttccctttgtaaagaaagcacagtaaaaagaaccctcaaagccattaccaccattaggctagtgccaaaacttgagcaactctaccgccaccactgcgattagatggagactcacatgctcgcgcttcaactagagacttaactcaagacctatcgagttcagcccttagaaatctcatcccaaacttggattacagcgagggagacaagaattccactggcccattcacgacagtaaacacttgtcttcatatactagcctatatccgagccacatgcaagatccacagacagaaacac

SEQ ID NO: 256423 - DNA, 189 bp, Gossypium hirsutum
aataggatgaatttgcagcattgtaaatttaggtttccgtccccacgaagaaactatgttgttgatttataattggaaatttcgttttttttgtaagtttaggtttccgtctccgtaaagaaactatgtcgttgatctataatcagagatttcgattttaaaagtggcaacgggaacttgcattcatgc

SEQ ID NO: 256424 - DNA, 483 bp, Gossypium hirsutum
atcgcgagcgccgccctttttttttttttttttttttttttttttttttaaaaacaagtgtctctatagtacattaaaatagaaaatacctttgtttctagacatggcataaaccacccaatttattggtcgagaaaaagaaagaaattatctccaaaaaccatgtactaaaaagaaaaatcaccaagttggttccattgacacccttccctggtccatactctttatttctctacttcaactcatctccattcttccacataaaaaattaataacagtgtacagtttacccgaattccatggctctatagggcaagcactgagcatagaaccccataaaagtagcatactgcatggcataacataaacacgcatggtttttaaataattaagtcataaaccattgtcacgcgcaaggagatcaaccatgcatccatagatgctcaagtttagtaatttttccatgactgaactcggaatctg

SEQ ID NO: 256425 - DNA, 310 bp, Gossypium hirsutum
atctaattttacttaaaaaatctaaagacgagagaaaagggagagggtaaaggaatcggaatcggagccggcgtcgtcggattgggaagctttctttaagagaatcctagttaactcgacgcgtttacccggaaagaggtgaagatgtcaactactgcatggaggactgtgccccttgagaattggtacaaatagggtgagccttctgcaggaattagtggtgcacctcaagataacagacattatgcttaaggaatgctgttatatttggacctgatgacaccccatgggatggaggtacgtttaagct

SEQ ID NO: 256426 - DNA, 221 bp, Gossypium hirsutum
tttgacgcgtgggtgcgataggaagaacagatcatcaaacgatgtccaatgtttgtcctatgtttcttcggatggtaacctatgttaccatgtggcatgtatgaaagaagcatgtcgcgataactggaataagggttattttcgacctggttctgaaactaatgagcagagtaaattccttgcactacacaatctagctccaaaagaagtactatcaagcg

SEQ ID NO: 256427 - DNA, 160 bp, Gossypium hirsutum
ttctgcgtgtttgggaggagatgcagagagatgggctggaaccggatgtaatggcttatgtgacattagctgcagggttgcgtaagggaggaagagcacaggagagggtatgagttgtttaatgagatgacaaagaaagggatattgatagagagggtaa

SEQ ID NO: 256428 - DNA, 482 bp, Gossypium hirsutum
tcttaatgttcgtcttcagaagacgttatgattaaagaatcagctgaatgggctaagttggccattagccgtgccatttctgtttgatgaggttgccattcagcttcagcatgtttattttcttacggaagtccatgcatctgggtgtgttgagttgagggtctgggattgcatgtgtcaagtcatagccgttgtccgacaacagaaattgtccatcttcaagttgtcactaactcttgcatcatcatcatcatcatcatcatcgggtcggattccatcactgatcatggaggaagtcaatggagatggagaagttcgtaaacctctgcttgtcattgggagagattgctagtcaggtaacccggtgacttgcagtttgtataagggctatgtttgaatagaagcatcattttctgccatgggagtggttttctgcggtgaaattgtaggttactcataaaagatgactaatgatgagaatg

SEQ ID NO: 256429 - DNA, 492 bp, Gossypium hirsutum
tttcatttccttactccttacaacaaccctgatcatcgccgtgttggccgccgaatcaagtggtgtgcatcacttgagctgggtgccgactacggtgaacaagtccggtggctgcaaggactcaacggcggagtgcatggctaacgtggacgaggatgagttcgacatagggtccgagatcaagaggcgcatattgcaaaccaccacttacataagctacaaagcacttcagagggacaccgtgccgtgttctcgaaggggcgcttcgtattataactgtcggccaggagccgaagctaacccttacacccgaggttgcagcaccattactcgctgccgtctttaaggttgttcgccgacgtccttttttttaaaaaaaaaatttgtaagatataggtatgtagcagcaataagtggacgtgttagaattatgtagcttcccctctggcgtgatgaatatatatgtatatatatgtatgtatgtgtatatat

SEQ ID NO: 256430 - DNA, 387 bp, Gossypium hirsutum
cggtctatctgttgttttacccattggccaattgccatcacctaaaaatttactaaaatttacaaccaatctctcctttttttttgaaaagaaccatggaatcgcttttcatcatgattgtttatttatgcccatcattcctaatcttccagaaaccctaattttattgttttctcttacgatacctcgtttcgttgttgaccctgcagttttcttaacccatggaccttcaacagcttgatcccttgcaaatttcaattccgaaagcctcggatccctacagtatcatgaacaattcctccgtatggcttgaaatccgtctcttttacgttcggatagcgccctgcgtaatcgatagcgcgccggaccacctcaccctctgctacc

SEQ ID NO: 256431 - DNA, 397 bp, Gossypium hirsutum
tctataaaaaaaaaaacccaagtttttttccttttcccctataaatctcctatatcttctctttttgttcaatcttacctaaaacagttgatctaaacaatattgaaagctgagcaaccatgggtggttgtgctaccaagcccaaggttttgaagggtgacgaaccggagatccctgctccagcaccgtcgaaagaggcggttcccgaaccaaaggaggctgctcttgctgttgctgctgatggtgaaaagaaggtggaagctgatgaggttgctaaggataaagatgttatcgatgatgatgccattgatgatcaatcaaacaagagacgatctcttagtaacttgttccaagagaaagaaaaggggacagctgagagtgaaaccacaccatcaga

SEQ ID NO: 256432 - DNA, 456 bp, Gossypium hirsutum
tttttccttttcacccattatggcttcaatattgagttcacaaggagtggtcttagcaacagctatggcagtttctggtactgtaatcctccttgcttttcgtcttcaaaaatcttaccttttggatcaaatctcacagccttctcaacaagctctccgttcctgcatatcttctggtacataacagttgcgtgcatatgtttcaaaatggggtgtccgtgttcctaattgtttttaacaattttttctttgattttttttttaaaagaggggaagaagagggaggaaaaaaagaagaaaaaagtgcactttgctgaagatgtggttgatccaagaaaggacggagaagaattcagaaaacagctgaaaaatcgtgttagaatcaacaattcagcagctttgaattcatcgactaaattcaagaaatttggtggaggtaaagatagaggaatgcct

SEQ ID NO: 256433 - DNA, 207 bp, Gossypium hirsutum
tctccggctcggtgtctaggattaggattatgtttagaatcaatcttatccagatctgactgtcagatatgagtatgtattctaaggatgccactctttatgtgcaacttctatgtttatttgcttcatcatcatgagtaagtctattagatgatgtaaattacaacttaatgcgtgccctcattatgggcagtaaatgcatgtgat

SEQ ID NO: 256434 - DNA, 379 bp, Gossypium hirsutum
tcttggacgcgtgggttcctctctttctctcctacctttaatttgtgttgtggatctgaatgggaaaggaaaaaaaaaggtacgtggagacgtgaagagggcgttcatgggcgtggacgcgcgaaccagggggtcgtgctcggtgtgccgacgcacgtggtggagggaagcagcaactgtttccttttggggctgtttgggctctagggttaggttcatttttgagcttataattggatttgatgtttttgtaatttttggatttttttgtaatttttagacttttttggatttttatgtgagttttatttattggttttttgtatgtgtatgggctcgggccaaaaattgagtctataataatgatattagttagtcc

SEQ ID NO: 256435 - DNA, 443 bp, Gossypium hirsutum
tttacgcgtccgctccaaacccttgagcgccgtcggtcagccttatacgcacggcctccgtcgatgcccggtctccaatcgcgacggagagggcaccaactcggcgatttcagcgaaaaggtatgaaggttgctgaggggtgccgcgcatgtggaggcgcaactctcgcggaggaggcctctagctccgagttgtgcgccgatcgggactgctggaggcggcggctactgctagggtttctcaacccttccattttccattagtttcgggcctggattgggaattagctattgggcccgtttattgggcttgtattttttctttgggtttattcgttaataggccaggccaaaattggtattacacataatatgtttgtattatattgttttacttgtagtttgaattgttatgtaattattgttttttggcaaaaaaaataa

SEQ ID NO: 256436 - DNA, 531 bp, Gossypium hirsutum
ttttacgcgtccgcccacgcgtccgcccacgcgtccggttggctcttcacgccgtcaacgaatattaccggctgccgtggaagccatcggtcaccaccaatcttctcggcgccaacactctgatttatctcaggccttcgttcctagattttttcctctcttttgttgatgaggtttggttcaatcctcatatttttctcaaggtatcttaggcacttgaatattccaaagttttccttgttcatctgctgattttggattctcatcgttaaattcaaaaaaaaaaaaaaagaaaaaaaagagagaaagggtaaaatgaaaatggcgtcggctcaggccttgccttcttcacggaaacaagagcatctagaagctgggaagcaccgggtacatctttttgttcttaattttttccctttatcgattaatttgatgttttctttctgttttgaaatatgattttcaatctagtaaatggtttgggtactatataatcagctattttggatattgatttcggaataggactag

SEQ ID NO: 256437 - DNA, 463 bp, Gossypium hirsutum
tttttggaactttgatgatttccctgccatggcggagggtgttttctgaacgaactttccataataactagtgtttgtaaataaagcaacatgaatttggtcaaaatctgttgtgaagttgaagtaaaaaccaagctatatgcatgcataagccttgcctgcactgctttcagaggttcttaaggccggtgttgtgttatggaaattggtgcattatgttggcaatgtgcagcagcagaggcacgtgaagtcatatgcgtggcagagcaatgtgcagctgcatgggacaggacatagataagggtcatatggaaagtaggaaaattttacagtctttttctgatctgccctgccttccatttagggtcgtagagcatttggtggagcatggcgaagttattatcgacaaaggaacgtgtcgataaggtcacccatgtatgatgggattttgtttggtagctga

SEQ ID NO: 256438 - DNA, 328 bp, Gossypium hirsutum
  unsure (1)..(328): unsure at all n locations
gttaaatctgtatatttcatccatttgctatggaaggacagtttcttgaagtttattatttggaagaaggtaacctccagttacaagtaaaactcgaaacatattggtatcttaaatcgagcttgaactttaaaaatcgaacttatctgagttgtatttttgagcttcgaatttcgattcaatatcaaagctttttatagtctatatttttagtgttaaatgaaatttaatggctaagtttgtcgcttttttcatttaatacggtatttgtattattttttatcaaatgtgatacttgtatttgataaaaattatacattttgatnaa

SEQ ID NO: 256439 - DNA, 343 bp, Gossypium hirsutum
ttacgcgtccgcccacgcgtccgaaaaaacagagagaaggctttcaaatctctttcccttttcgaccaaagccaccttcatcggagatccggcgcgcccagactaccaacgacgggaaaaaaaacttaaaatcacctttaacgagttcatgggtgtgcatgtctctaacgtggcgtggtggagcggcgcacgttgtcgggaggtggcttttggtgcgtgaggtaggcgtgcggcgactgagacctttaggtagattagcgttttttcaaaaatgttaaggtgttgggctagaactttgggctagggttaggtatttggattgggtttcagggtttgggcctat

SEQ ID NO: 256440 - DNA, 414 bp, Gossypium hirsutum
tccaaacagtccacaacatcctcggactcaggccgagtgccgcctctctgttccgattacgctccgtacccgaaattagaccccaagcacgtcgcttctacaccggagaattggactaacgattccatgggttcccagtcgcagcctaatcaagggccggcgacgttctctggcagcgctgctaccaccatgccggctgagtcgaatccttacgtttctcctgctccggttcgatcatctttcgtcaagacagataagatgggagcagtgaaagaggtgttagggaaattgggaaagaaagcggcggaggatactaagaaggcaaaagagatagctgggaacatgtcgcaacatttgaaaactgggccaagttttgctgatgctgctgtaggaagaattgctcagggtaccaaa

SEQ ID NO: 256441 - DNA, 397 bp, Gossypium hirsutum
tgtttctagtgcacaatccactgcaaagcagatattagatgatgatgagtcgtgcaggacaacattgactaatttcagtaactcagtgcaattcagttctccaacctttggccgggttaatattttcaatcaagtggaaagggagttacatggcggccttcctaagtcgtcgtttaaagggggaactccttcatccggttcttttcgatctggctgtagcaaggatgatgctgggacttgttctcaaactacttctctttatgggtctcaaatcagttcattggttgagctgggtcatactacaaggcacaatagcagtctctcgaccgcatattcaaagaggaatgatgaaacaagcaaaccgaatcgcaaaaggctaaaacctggagaaaaccct

SEQ ID NO: 256442 - DNA, 377 bp, Gossypium hirsutum
tttctcctcgacctaaaagaaagccagtacatccatatccccgcaaatctgtcgatttggtcaaaggaaaatcaccatcatctcaaccagagagatctccatcccccaaccaatttttcagagaacaagataacaaatcaccaacgtcagttttatctgatgcagtggggtcttctgccttggagcaacagaaaggatgttcttccccaacatcttgtactacaaatttgcagtcaatcaatacatcccctgttgaaaaggaaactgactatgcaacctctaacttagctgctgaggaagagaaaccctctttgtcatctgtgaaaatatttggtcaatcagatgcggagaacattctgtccatgaacctcaataca

SEQ ID NO: 256443 - DNA, 168 bp, Gossypium hirsutum
ttttttctcctttttggtggtagcaaaagaggcattttttggctgctaatatactagagactagagaaagggtagtctaagggtttcatgaatatttgtatttttattatttcctttccatttccgaattgatctgagtatatatatgaaatgatacacttccatgtc

SEQ ID NO: 256444 - DNA, 265 bp, Gossypium hirsutum
ttcacgcgtccggtaaagatcattaacaaggttggtggcgttggtggtggcggcgacaacggcggcggtagtggtggtgtgctccaggcttgcaaaaagttttgtttaccatagttttaaattttaataaataaaaatgatgtatctttttatctgtcagagtcttttgtttttaattatatgaaggaattcatttgacatcataaaaaaaaaaaaaaaaaatataaaaaaaaaaatatatataaaaaaaaagaaaataataatg

SEQ ID NO: 256445 - DNA, 451 bp, Gossypium hirsutum
ttcacgcgtccgcccacgcgtccgcccacgcgtccggtggatattccggttacccaaattacatggcgaatactgaatcatcccgggctaagtatcgatcccagagtgctccaaggcagaggctggagttagacaaatatggttcaacccgaagaacttatcaggggttgtgggattcaggtaccaactcagaaagagattttcctcatcatgttgattttaggtacagggcacatccgacttccgattgcttgaattggcctagtagtgctaaccgaggggaatgatcgacgatcctcccttcgcctctcctattttccttttcttgtgtgtgatagcaaccttgtctgctggagttgtaattagtttaccatgatgtgaaaaactttgatcctgcttgatcaaatttagcattattaatattgaaaaaagaaaatctagtatgattgcc

SEQ ID NO: 256446 - DNA, 379 bp, Gossypium hirsutum
  unsure (1)..(379): unsure at all n locations
tttgatgatggtttatgtcggccaaatttgtatttaagtatatacgatcaacgtggcggccgtgccccgacgacaaactagcagccaagtgggaaactatactgcaattcatttcaccccccactctctgtttatggttttggtcttttgggaggattccggccatggaaggtgactgttgttcttcatcgacgtcgagttcaacgagcggtgagaagccgaaggcggaaaggacacaacaaaaggagaaaccatatagagggataaggatgaaggaagtgggggaaatgnggttggcttgaaataaggggaacctaacaagaggtctaggatttggctcgggtcgtataccacccccgttgccgccgcccgtgcctac

SEQ ID NO: 256447 - DNA, 519 bp, Gossypium hirsutum
tgtacgcgtggggttaaagattttttatgaactaaagctaaagaagactaatacaaagaggagcaatttgatctgtcaatcgccgcaacccattccacttcctctagtgcatcctcaatccaaaattttccttcaaaaaattggcctccctttttagccaaggtatgagctgcgttgtttgcttctctcctaatatgatgaaaagtgatttgtttaaagaaccccaacttatgtttgatatctgctaagatcaggctgaggactgatctatcatttgtatttgcatacaacttttttatcaccgtcaataagtttccttaaatctggacgcaatgaaagccaatctcctaagcaaaccaaatcacctacttgcacgctcgggcttctgcaacaaagtgtcgacaatattaaaatgaaggtaagtacacaccaccatgatcagtctattttcatttctttttataacacctaagatagatttcttttcttgtaaattaaaagctgagtcaaaattaattt

SEQ ID NO: 256448 - DNA, 253 bp, Gossypium hirsutum
tctgtttgaacttctcctatctaaggcacctccaggtaagcaagaggaattgaggagcctgattgacatttgtgttcagaggggtttaaccaacaagtctatcgatccactagaggatccctctcagttctgtgctgccacgctcagccgtctgtctactattggatatgatgtttgtgatctttgtggggccaaattttccgctctctctgctcctggatgcatcatctgtggcatgggaagtattaaaaga

SEQ ID NO: 256449 - DNA, 376 bp, Gossypium hirsutum
ttcacgcgtccgttggaaaacagggttttctcttcttcttttccttctatttaattgattaattttctgtttgaaagatctttagatttggtttgtgaaagtattgttgaatgctcagactgctcacagtagttctctttcaccttagtattggattataccatcacattcttagctttttaattacttaaagtagttcaccttctccttaattgctattatactgttgaagatctgtgttttgtcttcattagcatagattacttgttacatatgtaagttgttagatgttttctatggtcattctgtgcaaagaatgctattgcagaaaagatatttgtgttatatatttgataatagagaaaaactatttgct

SEQ ID NO: 256450 - DNA, 323 bp, Gossypium hirsutum
tctcccttgaccactcttagcatcacagtaaccgaatcagggccttcttctccgtccggttccaagtcgtccggtgactctatgatcccatcatgggtcgatggggcgacacgtgggcctagaacaatcgggacgacgcaaacaacagcccaagtacatcctcaattattcacaagaactctgctaaacacagccgtcgagaaatatggtgttgaggtggtgattgggaaactggagcagctacgtgttgaggaggggagagttgtatctggttgtactcgaagggggacgaggtattgagtcggactcggtcgttctatcac

SEQ ID NO: 256451 - DNA, 390 bp, Gossypium hirsutum
gcatatgcagcaatttggctggatgatgatggatttgttgctgaagggcctagtatgaatgtggctttcattacaaaggaaaaggagatgctgatgccccaaaatcgacaaaattttgaatggttgcacggctaagagagttttgactcttgcggagggactggtgagagaggggaagcttcgcagaataagagtggataacgtgagcgtcgatgaagggaaaagcgcagacgaaatgatgcttattggcagtggggtccttgttcgccctgtaatacagcgggatgaacaggtcattggcgacggcaaggaaggtccaataactaaaactctcttgaattttatcctggaggacatgaaatccggtccttcatcagtccgagtacctgt

SEQ ID NO: 256452 - DNA, 257 bp, Gossypium hirsutum
tgcaaatcttcagtgtgcaaaatttcaggatgtggatgccgagggctccatctttcacaatgcaactttgcgtgagtgtgaatttactggtgcaaatcttcgtggggctttactagctggtgctaatcttcaaagtgcaaatcttcaagatgcttgcttgataggttgtagcttttgtggggctaatctccgttctgcacacttgcagaatgctgatcttactgatgccaacttagagggagctaatcttgaaggag

SEQ ID NO: 256453 - DNA, 302 bp, Gossypium hirsutum
ttctcagacaacaacgaaaggaaaacccgatccaaaactctctccgaaaaaggggaaaaaggtaaaccgcaaaaaatatgttgcagagacccgctcgacgctgtgaaggcaccgctatgggcgccatcgttctcgacctccgtcccggtcttggcgtcggaccgttcactctcgggatgcctatatgtgaagcttttgctcaaattgaacaacagcctaaaatttacgatgttgttcatgtgaagtattatgatgaggagccattaaagcttgatattgttataagttttccagatcatggc

SEQ ID NO: 256454 - DNA, 376 bp, Gossypium hirsutum
tttcacgcgtccgccaccaccaccgccggcggatcaccaccggaatcatactcatcatcctagacggcggccaccgcaatattcacaaaatcacaagcctagtactgggaacaagctcaatactgggaaaaagcttgggcttttgttcatcggcattgttatcatcctgcaatttggtgttgctgggttcttggttttcaagagaaggcagctcttgaaagttaatggcacatacgaggcttgctcttcttcttcatgaaatcaccgccaagtttttgggtctgcaattcaattcattttagggagttcttttattggattgagaaaaaagagttatctgctgagcttagaaagggattacgtttattttggatat

SEQ ID NO: 256455 - DNA, 501 bp, Gossypium hirsutum
  unsure (1)..(501): unsure at all n locations
tttctcgtaagcccgtatatgggacagattgtatgtgaaaagaaaagtttttaactatttgagatttcatggccctatttagtatgaaagtgttagtaaaagtcaggtaccacctcgaaccccgtcccggcgtcggatgcaggcgaggggtgttacaaaagaagctcgaccagatctaaaaggacttggtaagtacttttccccctttcttctttatttgaaaagcaactcaaatctcatgttattttcttaaaaaaaacaagaagaaattcataaaatacaaagactttcaacattgcttggcctctcgccctcacatccgcatagcaggagtatttggggctctcatcggctttcaatcgcgtaaagaaaatgagcaaactaagaaaatcaatttagaacagtaaaagaaaagcaaaaaaaagtgaaatcacctctattaatnttctattgcttttcttctattctttgtaagtgtgcacaaatacagtatgcatagag

SEQ ID NO: 256456 - DNA, 385 bp, Gossypium hirsutum
tctgtttccggcgatgcgccccggtcggatgtggaacggctagtgttatatccatgggtacctaatggaacagattttagccactagccgtatctctctgaggaagcaagagagtaggttggcaattgtagtcttatcttcctgaggtagcaagaaagtacactgaagattgaagatttatttccctaagtagttgtggagcatcgaggctggcgaatcttatcttcatgtattggcaatggaacagatttaagtcaccaagcctatttccctaaagttacagtcgagattcagcataaccgggcaaaattggccctatttgaagtctttgctctattcttgttgcacgacaatgagcaaagaggggcaactgtaataggcccat

SEQ ID NO: 256457 - DNA, 303 bp, Gossypium hirsutum
cgaagccttattctctgtggtttaaggcgaattgctaacctttttctgtttgaaggtggctttatgattctgatgactaagggtagaggtaaaagttcctttcgttacatatcctgttcttttagattatggaagaaggctctctgccacgcactaggaagtttttggcttttttgttggtcttaaaatttagagaggaagaaaaacccttgcttcttttgatctctgatgtggaaaacattggcctttcaactgagagcaattaatcgcttcattctttgactttttttttatcctaagatt

SEQ ID NO: 256458 - DNA, 406 bp, Gossypium hirsutum
tctgtccacgcgtccgcccacgcgtacgtccacgcgtccgggggaagatgaggatgaggatgatgatgaagatgatagcatgagtgcagacatcgcggcaaacatgatggtggatgtaccaaactctcagtcaagtttgaatccagtcagtatgctgacagatgagccaaagcaaaaccagacagctgaagctgaagacggttgggttgtagtctcatcccggaaaaacaaaggtagaaggaattaagtcgtaatttttgttacccctgttccctattcctggtatatacatcttttctcaagacatttttggtgctctaattatttctgtttgtaacttttttttaaaatcttatatcgaaagaaggatactgtactggaatgttactggattgaaatagatatg

SEQ ID NO: 256459 - DNA, 218 bp, Gossypium hirsutum
tgcaggcaccgattagtatgtagttgagagaaagcttcacatagggagcttcattgtcattgtgtcttacatttttgtttttggttcagtgtgtacattgatggaataagtaggaactttagatgagatgtttggagggtgaattttcaaattagggctaatttttagcgatgcttatagctcttgttaaagacatttatgtatcagatatgccaccc

SEQ ID NO: 256460 - DNA, 161 bp, Gossypium hirsutum
acaaattatagcctcccataaatacaaatcttcctctttaaatactcactgcatagatcaaatcagttttcttcacttttcgttatcgaaatcatctgcttctcccttctccctttctctctcggtgacccctttctcttctgttttacttggggtcgcct

SEQ ID NO: 256461 - DNA, 209 bp, Gossypium hirsutum
ttattgggtctcgaaagatgctccattgcagaggatggtaggtatggtgttactgaattgtagtatattatacaagcatttcattgatttgagtacttaatagtgttacagcattttcacactgagggagtgcgtatgatgtgatccacttcgtggttgaaacccctaaaacctgaattcttttgttgtgtttgtaaatcagctgacca

SEQ ID NO: 256462 - DNA, 168 bp, Gossypium hirsutum
tgtgatgatgaagacgcgatatgagtaactaatatgggtataactcgatcatgagaacttcaagattgatcatggatcattccttaatgccgtctgttgagaatttcagaagccactgacatgtcatttaaatacagagtttactgatataagcgaatctaatgatgt

SEQ ID NO: 256463 - DNA, 357 bp, Gossypium hirsutum
ttccactcgtccggtttctacaagcatacggtcaagccaggctcttatgcatggaaataccacaggccacctcctcgcagatccaatgttatagatatggactcaatttttgatgtcttcgagcacttaattgcagaagatgaaatgaatatttttgatgctgaagatttggaaaacgatgatatatctatggagatggccttatttttaatgcagctagattatgattcaagtgactcctcaagtgatgaggagaattttcactattaaattcctaaattaagttttgctcctttttgctcgaattatggaaatgttggagtgctttgggtgttcatgtaggctaccacctttttc

SEQ ID NO: 256464 - DNA, 491 bp, Gossypium hirsutum
tgaaaactaaaaaaacctccagtcagatatagccaaagaccctaaatcatttcccaagcattctccgatggtctccatttccaaaagccgcagttttctaaaaaattaaccagttgctgcagtcatcatcgtaggtcgtttccctcaggctcagtccggttctcgtggccgacctcctcgtctgggatcagtggtggagcctgggacacctcccacctggtttcgttgtgccgctcactactgttgtctccttctccgctccaatcttcaactgtctccgtcccgccgctggtcaatctcatccaattccaattagcatcattaacattgagaataagttgagtaggcaactgccagaactgtatcttcatctatttgaaggtttaatcaattatgcaaaaaaaaaaagcagggacccagttttttcgaaatcaattatttctgaagatatatgaaaggtctcggatgggagctttagtaaatacatggtc

SEQ ID NO: 256465 - DNA, 421 bp, Gossypium hirsutum
tttttatgactaacgcttatctctatcctcattgctcatcatttcactttccctttttcttgcccttttcaaataacgaaattgttacaatggcagaaaggaactggagaaaaaaattcatgatgcaacaagatcaggtgtttcagcctcaattgataaccaagcgttatgtactttgcgggtagagccatctttgtatgattcctttagtaggtattgcttgatccttaaatctttgttctgaaaggagcggctcatgtactaaacttttcactttttggcatttgttggatctacaatggcactggaatgcctgaggatacggttaaaaccgcaaacatcatccttatctttcattttgtattgggattattcattagatacaatcagatatgatccacttttatgtggatgaaagtgc

SEQ ID NO: 256466 - DNA, 505 bp, Gossypium hirsutum
tcttagcaattcgagtctctacaagcaatgatgccatggtactcggtcggtcacccttccatgattcaaccagcggtgatgaggtacatcaaggaggtgtggggtttcaacaagaagcctctgctagtggtgttggaccctcaaggaagagttgtgaaccctaatgcgatgcctatgatgtttatttggggaagcatggctttccctttcaccaagctcagggaagaagctctttggaaggaagaaacatggaggattgaactattggcatattccattgacccctccataatcaattggttaacggataggaaattcatttgcttgtatggtggagaagatatgaattggatccggaaattcacaacaactgcaaaagccgttgcgaaaactgccaatatcgaattggagatgctttacgtgggaaaaagcaaccctagggagagagttcgaagaaacatgaccaacatcgagttagaaaatctcagccatacactgtcagaca

SEQ ID NO: 256467 - DNA, 457 bp, Gossypium hirsutum
tttggttcccttgctgggtatttggggagctgctggatatgccccattattggtactaaggtaatataggtcaaggcaatttatacttgcgacccaagggatagctgattatgaatttttgtacaaggatgatggttatagaaagaatattcaagagatgtctagtgcgtgaaaacagactcgccgaatgaagaggctagctgtgggtcctatgacaactcctgagtatcatgaatggtgggctaggaggattaatgataatacacctaagttaaatcaggaagacagccagtcaatagaagagtatttgtgaatcattccttctgagttggaaatcataaagcaagattttgagaggagaaatgcggatttggagaaaaagatagagcaaatggaggcggaaagtagttaataagggagataaagttccagcgaagacaatttgctttctttcata

SEQ ID NO: 256468 - DNA, 410 bp, Gossypium hirsutum
ttctaaaaagaatagtgagagcagaagaagacaatgggacgccctgatacagaccctgaacaaatacaagccgaatacgagcttcgccctcaagaatacgacccgacccatgaaccaactccgaatgtggccgatgaatatccaccgccaccaccttatgaaaacagaaatcaacaaggccaacaacaacctcaattcccgccgcaacaaccaccgcaatacccaccacctgctcagcaacagccaccgcaatacccactacctgctcaacagcagcctccgcagtacccaccaccatcacaacaacctaaccaagcctatcctccaccgcagcggcccgcgccgtacccaccgcaacaaaacatgcaatacaatccagcgtacccgaacgggacaaaccagcagccagc

SEQ ID NO: 256469 - DNA, 487 bp, Gossypium hirsutum
tcctttttctttcatctttttagcccaaaaattaaaggaaaaaaatagagatagaagattatgccttcatttccacagcctggctctgttaccatctgcgaaattaaccgagatttggttacagccgatgccctttctgatagtaaagctaaggatacttatggaaagcttcttggaatggtgttcaatccagttccgtttcagtccttagaggatcccacgcaacctccaccagcttcaaatgctgccgtctctcaacccaaaggatttggaatgataacttcctccctcaaacacatttttctacccaatgatattgatttgttaccagaagttgctctccaaggtgtgagctggcatcagcacaaacatatactggcatttatatccggttctaatcaggttacggttcgtgattatgatgattcagggaaggagccttgcattttaacaagtgagtcacaaagagatgttaaagttctagagt

SEQ ID NO: 256470 - DNA, 370 bp, Gossypium hirsutum
tccatccctaaagaaatcctaaaatttcactggaaatttcttctctttttttccccattttatttttcccaaaccatttctcccctaccccgattccctttatttttcccccaatttcctcaaatcagtagccctctgcatctccgtcggtagcccgctgttgtatctctgtcgacatctgctgtcgagaaagagaaatggctggaagtaatgaaatcaacctcaacgagtgcaagctattggtttcaattagatgaggctaacatatccatcaccagtgtatagaggtatctttgccacgttcctcgcaggttcaagacaggtttcaggaaaggtactgaagcagcaccaagacagaaggttgcagcag

SEQ ID NO: 256471 - DNA, 458 bp, Gossypium hirsutum
tgtgaaccagctgcttatcgagaaataatgaaaaaggccaaggaatttgagaagcactttaagcaacaatatgtcagacaagcaccagcacagaggaaagagacctcttctctagaaactgctgctgttttttttttcatccttttaactcagtccctgaaaattgagccgttaacgtcaacccgattcaggcggaaccgtttcctcactcaaaatcctcgcacaaactcagcagttaattaaacacttcataaagttgagtcgctttattagcacagttgccgttatagtgataatcaaaggtgttgattctgtaggaagaaggaaaaaagtaatggagaaatctgtttttgttaaagatgtacaacaactcaatggaaatctccaccattctttttcctctgtttctcaaagagatgtaacttacagctgtggttcttgtgggtatgagctaaacc

SEQ ID NO: 256472 - DNA, 538 bp, Gossypium hirsutum
  unsure (1)..(538): unsure at all n locations
ttcacgcgtccgatttacaattaccttctaaagatgcaaaccctttaggattgcctcaagaacttgcttcaacaaatcctaccattcaacaaccagatcgccattgtgaagacatctccaaagattctggcctggaacagcatgaaacaacacctaaaaatttggttaagaattctggccaacgcaagggtggaaaaacttccaaacaagtacagaaaaaaaaatctaagagctttgagaagcagtgacagggttttgcgctcaaaatcagaagagaaatctaaagctaccgagtcgagcaagaaatctactgctactgagtcgagcaagaaatctactgctactgagttgagcaagaaatctactgctactgagtcgagcaagaaatctactgctactgagtcgagcaagaaatctactgctactgagtcgagcaagaaatctactgctactgagtcgagaaagaaatctagtgctactgagtcgagcaagaaatctactgctactgagtcgagcangaaacctactgctactgagt

SEQ ID NO: 256473 - DNA, 427 bp, Gossypium hirsutum
ttttcttcatttatcatatttcataatattttgctaatttgtgcagtattctttttgtgactgtttgagtgaaaggcatttgacaatttcaagaaataacatgccggaaaagaggaggtaatttatctaattgctttacacttttaaatcaaaataatctcataattaatgcttatttggtgactgtttgaccctttgttaaacttgcaatcagaaagcatagacaatggacttgaggttggccaccatttgtgcacagaatatgaagtcctgccctgtgaaagtaattgtttctacataaataaaaagtgtcgataggaatagtaataatgcggctgatttgttgtgtaatattgctaatagcaatttgctattaataaaaagtgtaatgtgtgctttaatatggattgcccagtggaaacccatg

SEQ ID NO: 256474 - DNA, 409 bp, Gossypium hirsutum
gtatctattagcctccccccttttgctgtccagttaacccccagaatgctcccttcgtcatttatgcgccaccatgaacggcgatctgcgcattcgaactccaaaggagtgatttttcagccttgagaccccatttggacttcgatttcaacgaagcgaaggggaaacgatggctaacttacaaggtacggggcgtgtgctggcactaggcgtgagggtggcgtacggtgctgtcgacgtacaggcacgagcggcgttggggttgagacgttggcatcgtatggaggcattgtccggttgcggcgcatgcattaggctagagttttttgcttgctttaaattttgggccacttaggcctattgcatttgggctcgggcttatttgtaaatgggttgatttgggcttgta

SEQ ID NO: 256475 - DNA, 357 bp, Gossypium hirsutum
cccacgcgtccgcccacgcgtccgcccacgcgtccgcccacgcgtccgtgcatggacacttcagtctgtttgtagggctataatagctttgatggctcatccggaacctgatagcccacttaactgtgattcaggcaatcttttaaggtctggtgatctcagaggataccagtctatggcaagaatgtacaccagacttgctgccatgcccagaaaagggtgaacatttatggtgctatgaaccgccttaaaactgtaagagtcaattatcgtcagcaatttacttttgccttttaaacttcattgtagaaattcaagaatatctcttacttttctgatccaaaaatatcagttccc

SEQ ID NO: 256476 - DNA, 326 bp, Gossypium hirsutum
attgtcgcatttcgacaccaaagttcgtgcccttgcaagaaaatatctatagactctccatagttgaagatttcatatgtctgtttcatgttctctcatgtatgctgaagagttaacccttttttatgatatcggcttgagtgttctttacattattagcggctctgtcggaatttcatgggtccagttgcctgtaggaacgacagagacaaagaacatctgagattatgttttctttattggatgtttttaaatagaatttgggaaggaagagttttattgtttagatctgatttataaataagggatgtctaatgtggttatca

SEQ ID NO: 256477 - DNA, 188 bp, Gossypium hirsutum
tttcacgcgtccggttgaatttagccattttcaaagctttcttattttacactatttacatttggatgacaccaggcaatagggatatatttataggttcctttgaattatgatgtggttgatgtacgccatggctaaacttgggctacaccccttgatatgataatataagaattgttttggatggt

SEQ ID NO: 256478 - DNA, 470 bp, Gossypium hirsutum
  unsure (1)..(470): unsure at all n locations
cccacgcgtccgcccacgcgtccggttgtaacgcttcgctggaaaaataacaccggaaatcgagtttcttcaaagtgcatctcaacctggtgtgaaggtgtcctatgtattttcctagtggcatgctgtggttttgctgctggagttctttatcgttttggcactcactttatttttatgattgttgcggtggttatagccataatggcttgtgctgctctttgtttccgtcaggcttattcagatcctccagggttttcttgtccatgggttccgattgtgccatctgtttgcatctttttcaacatatacctgtttgctcagttgcactatgaagcgtggatcagattcatcatcctcagcatagtatctgtaggtatttatgcattttatggacagtatcatgctaatccccgtttagatgagacaattatttaccatatggcgcctgangaagatagacactgagc

SEQ ID NO: 256479 - DNA, 527 bp, Gossypium hirsutum
ttgcataaagtctaccgagaaatgcgcaaaccatgaaaagcaaatagaagctagctttgttgaagcctctatgcctcctagaattccttctgctagtcttcaaaaggggatccttaaaagaaacccacgtggatgcagaggtatttgtacttgtctgaactgttcttcatttcggcttcatgcagagaggtcatttgaattctcaagaaatcagatgcaagatgctgaagaagtgggtttagatttgattaaagagttatcttacctacggaatatgttggaaaaatctgctttcgttgccaaagatcagaccaacatttgcatcgatcaggtcaaggaagcttggaagaaagcctctgatgctgaagaacttgccaaaacccgactcagtgaaatgaactatcatctaaacattcactgcagaatcccatgtgagcagcgaccaagcgtgagatttgccgattatgttgaagaacacgtcatccatccaatagcagactcatcgaacaaatagtttcaacataaga

SEQ ID NO: 256480 - DNA, 252 bp, Gossypium hirsutum
cccacgcgtccgcccacgcgtccgcggacgcgtgggtttttattttctgatggaaaaataagctgggaattatttttttctgctgcgttgctttccattttcttaggaatcaaacatagtagccgagaatccgccatgttcttaaatatttatccagtttgttttcgaaacccttagtttgttctgattcttattttattagttgattctttgtttttgctgattgaactttccttttgatttttttggttt

SEQ ID NO: 256481 - DNA, 476 bp, Gossypium hirsutum
gtgtttttgaagacaatccacagctgagcttcatttatcttcctctcctctaatcaaacggcaagattataatagcaaccaactttggcgcaatggtgattgcttctagattgccagcaaattgttcaggtttgctttatcctagttatcataagctatctgttcagcttaacaggtaccaaagaactagatttgattgttataatcctaatcaacaattttatggaaaggggcttaagatctttgtttgtgtttctggttgagcaacctagtcaactgaaatacatagaatggccgagctttgaagcacgctgaagactgctattttaactcttgttcttgtagccgggctcattgttgcactgtcatcagttgactccatcctctgctatattttagctttgttgcttaggaaaactccatcataattgaactacaccctgaaaagaacaccttagatgtatatatatatgcat

SEQ ID NO: 256482 - DNA, 365 bp, Gossypium hirsutum
cataagttgatgctgtgatggctttatccaatctctcaacgtacaccgataatctcactgtcattattgaaaccgatcccgtcccttccgtggtcactttactgaaatcttcaaagagatcatcaaaaacggctgaaaaatgttgttccgtcatagaatccatggtggggttcgatgaaggaagaacagctttagcagctgaagatggtgggatactagcagttggtgaagtgctcgaaaacggcactcgtcaagctagggaacatgctgttggggctttattgacgatatgcgagagtgaccgatgtaaatatagggaactgattcttaaagaaggtgtaatccctggattacttgaacttaaa

SEQ ID NO: 256483 - DNA, 304 bp, Gossypium hirsutum
ctttttcaagaagtcatctgctttagctatcacttgccgtttcacttccttcccttcaaaccctttcaatccgggtttcttggccatcttcctcctgcatccagagtttctctcgtctcttccaccaggtaacttccctccccttttcttagtgcctcctttgccaggtcatgcgctctaacattctctgctctttgtatgtatcgaaaagcaattctttgaaatcgggttttattgatctgaatatcgactatcatcgcacctagaaccgattcatctctgactcccattttgcactttttga

SEQ ID NO: 256484 - DNA, 317 bp, Gossypium hirsutum
cttaattctaattggtatatcacaatctacagttctttggatccatatcatagtgaagttacaagtaatggttgtttattctttgttgttctttaagttaattgcagaatgctcaattggagttgcttaaccactacaaatctagtattagaaaagaaaaaagaaaagaaaaacaccaacttgggcgatgaccaacaatacaggcggcacagttccatatattcaacaattggtatggtcattttggaggttctagggtccaagtaatcccaaattttttgtgggttttcaaactagtcatcacctttttgaagggg

SEQ ID NO: 256485 - DNA, 239 bp, Gossypium hirsutum
cttaatggtccagaaaaacaaaaaaagagaaaaagggccttggtgtccctgggttgaacttgatccaactgttgactgccaaagccaaaacaaaaaaagagaaaaagggccttggtgtccctgggttgaacttgatccaactgttgactgccaaagccagcttttggatctgatcaatatataaaaacttcgtctttcagttttatcagtcaatgagacaaagatgtcaatttcacttt

SEQ ID NO: 256486 - DNA, 391 bp, Gossypium hirsutum
tttacgcgtccgctgaaactgagcttgggcttgcagagcatcagggaaagtacatggctggtgtggtcaagaggctttgtcaagcttgacattccccacacttgagggtcgcatactttgttgattgttcattaggtgaattgtgtttgaatttgtccttggtcttgccatttctcagcatgagagatgtcacttatattggtatttatttcaccatttctttttgtcaattccattcagttgagaaagatgtacatgatttgatcttcttgtgtcttgtcttatcaaataagatgtatcatatgtggccatggattttttgcgtttgtataatttccattgggtaattcaccacaagctttgatttaataaaagaaatttcatttgtctg

SEQ ID NO: 256487 - DNA, 170 bp, Gossypium hirsutum
ggtgaaaatggttaaggggcatgtagggtacgaaaccaagggcccgtaaatatgtttctaactgtgcaccggcaatggcgcgcggcaaagtggtaaaggaaactgagggagctacccatagccagccattgagagaatgacgatggatacgtacgcaggaggtggaagct

SEQ ID NO: 256488 - DNA, 387 bp, Gossypium hirsutum
cccactcgtccgcccacgcgtccggacgaaatggaaggaggaaaagagcaaggaatgttggtggtaacagggttgatggctcaccaaaacccactggagcaattgcaagccaagttcaaggaagttgagaacgggttcaaggcttggctagacaaacagtccatgccagtcgaggcggccgtggtaaccgccacaggcgccgttcagggtgctgctattggtgctttaatgggcaccctcaccaaagatgtttcctcttcttttccgactcctcctcaggcttccctcaatcatcaggcaatggcttctctcaagcaagcccaggctctatcaggagctccctgggtacaagctcgtaattttgctgtgatgactggtgtcaatgct

SEQ ID NO: 256489 - DNA, 489 bp, Gossypium hirsutum
ggtaaaaataattctgatgattcttactatatgtctttaaacttttgaacatttcaagaatttgtactcaaagataaacaatgatcgtttcagcatttttaaatacccagactatcttcacagtatcaatatcagatcttcttatggcatgcggttcttctaggaaacatacacttcttaattagactattcatctttttacccgtgaagaaataaaatcttattctcaagcattaacatttcattatattctaaacacatattccatacagattgaacaatcaagtcgaccttattcatctgtaattgatatttcaagaaattctctcttctagtcaacagaacgattcaacatgcatcattctaaattcactcatcatgccaattgaagaccataacatatgcattagcataagtaatattgatacctcatctgagtacattaactctgattaacttacttgagaaaggaaatccaccatacacatt

SEQ ID NO: 256490 - DNA, 382 bp, Gossypium hirsutum
  unsure (1)..(382): unsure at all n locations
cgtctctgccctgctgccctgctgctattatttttttttggcaactgctttgttgcttcacgtctctgctctgttgttattttttttccagcaactactttgctgcttcaattactctacttcacatctctgccctactgttattttttttccagcaactgctttgctgctgatttgctttggtttctatattctctaataaaaattctatcttcacgtctttgccctgctgctattaatttttttcggcaactgctttactgcttcacgtctctgccctactgttatttttttccagcaactgcttcacaactgatttgctttggtttttcggcgtggctgctgcaatttattttacatngtttgtcttaacatttgcact

SEQ ID NO: 256491 - DNA, 425 bp, Gossypium hirsutum
atgtatgattacttgttggatctctttgagggatctcaaaaatcattgcataatccccataggaggtgaaaaaaaccaatgatactcaaactcaggttttagtgtcggatatggatatgatctgaaaaactatgttacacgaactcgagtatgattagatttttttaaagttttaccgaaggtcatattctcatactgcatgtacgtatgatagcagagtagttatatatatatatacatgtttgtaatcttctatgtatgaagggcatttgtgttgtatttttagccctttttttccctctttagtttgatgaataaatggattggttaaagccattgctcgcctgttagaagtttgggtcttcctgtttgcttccaaatatatgaactgatgacttaagtagagcagaatttttaccgtttgt

SEQ ID NO: 256492 - DNA, 149 bp, Gossypium hirsutum
ctaacatcctcggctgttcaaggactacgagttcatggatgccttcctttttgccttttccgacccagcaaagcacatcgacaacggggaggggctccatgtcttcgctggcctctcatcaccagtttacaatgaaaatcatgcccata

SEQ ID NO: 256493 - DNA, 282 bp, Gossypium hirsutum
ctgccatattggttcaaagctgtttttctctttgaatttcctatctacaaccgttatttaaacagaaaccgtacaaagcaaggataaaacagaagttgagtttgtgcttccttatctttggattcacgagttcgtagacgaggttttgaaactttgctggcgcgtttctgatggaggcaaataggatcttaaaggtaatgcagttgtggtaatggtcccattgttgctatgttttgaactttgtatttgttactttttctgtgcaaatacgcatgcatattc

SEQ ID NO: 256494 - DNA, 198 bp, Gossypium hirsutum
  unsure (1)..(198): unsure at all n locations
cggacttttgggttgntcacgagtccgtattgggggggtcttatgataagaatggtgggtgcaacattagtattatgtaaacgcattcgagaatgcggccagcaccatggagacgggtgcggttgcagctgagaatgtagcaaggctcatattgtctagatattttggtgaagcatccctgcagtcatcaaacttgca

SEQ ID NO: 256495 - DNA, 482 bp, Gossypium hirsutum
ttccagaactatatgcacatgatatcaaatatgccatacaatttcaagtttaaacaaaatatattctaccttaccgccacacaccacattgggagtttccaagaactctaaccaccaacataccaaattgtggattaaccattaatagtttacagttttactactgataactgtgaacacacaacaatacatcgcaaatggaatctactatggttgtgggtgcacgacaaagtattgcaggtgaaatttgtcaatggctgtggaaacacaacatgctcataaatgataactatcagagggttgtgattgcacaacaaaacatcataagtgaaatctgctatggttgtgggtacacacaagaccatcgcaattgaactctactatggttatgggtacacaacaaaaataaatgcagatatactaccgattcttccttcgatcatatcgtcccaatcccatgcaatatgcaatatgaatgacaa

SEQ ID NO: 256496 - DNA, 353 bp, Gossypium hirsutum
cattcatggcctaattagcatcctcccatgctagaaagagagaggccttgttttaaagtggtagttcttttcttcttcttttttttttctccattagtaatttgctagctcagtttcattaaatattaccattatggaacatacactgtttcaataaaaaaaaaaaaaaaaaaaaaaaaaaaaaaaaaaaaaaaaaaaaaaaaaaaaaaaaaaaaaaaaaaaaaaaaaaaaaaaaaaaaaaaaaaaaaaaaaaaaaaaaaaaaaaaaaaaaggggggccctttttaagggtcccaatttttcttccccgtctttgcaactaaaaattttttttttggggcccccaaatttaat

SEQ ID NO: 256497 - DNA, 132 bp, Gossypium hirsutum
ttttatgtgctcaacaaaaatctgtcaactttattcatgtagtatttgagtatttgaatgatgatagttcatatcatatactcgaatatatgtcaaatgcagctattagatacctctaaaaaaatagtgtct

SEQ ID NO: 256498 - DNA, 178 bp, Gossypium hirsutum
aaaaaaaaaaaaaaaagaaaacgaagaagaaatatggcatgagagaatgaaatatatttttgttggagtgaaaacatgttgaatattgagatgcatacttctaggacgaacttttgttattacgcagtcattttcatgttgttagctctaaaaacaataacatatgtctacattttgc

SEQ ID NO: 256499 - DNA, 433 bp, Gossypium hirsutum
ccgccgtcttcttctccgaaaccagctcccaagatctctccgaccaccgctcccaccgtttctccaacagcttctccgccttcaaccgcctctcctcctgctcctcccacctctcccactggttctcccggcgctacttctcctacaacctccataagtcagcctccggcttcgtctccaactgcgccaagtgcggcggccctgaaaacagtcactctcgccgggtctgcatttgcagtcgttttagcagccgccgctttgttgatctagatctgaatttgaggagaattttagatttgatgatttttaaatttttaggcccttttttaaattcttatttttagtatagtagtagtattttatttcttctttatttgatgtttagttaattttatttatttattggtaatttttatttacaagtgtccggcgg

SEQ ID NO: 256500 - DNA, 262 bp, Gossypium hirsutum
ggtgtcttcatgtacctgtcgataatggcacagagaatggaaggacggcaacatcatcaaccactaacacttcagaacagctacagcgatgaacgttaacgtcgctcccaatacctaacttgtaagtcatggatgtaaaatttgtaggtggttgaccattttgtatgtgtctaatcatgtatttgaacaaatagggaaaaatgttgagatgaattgaacaaggaaaatatagaggtttgtatgaaaaaaactagtaataaaa

SEQ ID NO: 256501 - DNA, 321 bp, Gossypium hirsutum
ctttggtggcgaccaaattggcgtagctgaccttgtttttggaatggttattcatatgttggcacccatggaagaggtggtggggggagtaaagttcattaaagccgatagcttcccacgcctgcatgcctgggtcaggcatttcagcgaacaccctgtgatcaaagacaatgtccactattacactagagttgtggatttcttgaaaaaaagaatagaactttataggaaatctcaacatagtcactaaaaaattaagcactcttgatattgagaaataatgcataaggattgggattttcttttcgtacatttctatgt

SEQ ID NO: 256502 - DNA, 462 bp, Gossypium hirsutum
gtgaacatgagttataggatgttcaacttttatcccaattgacatgcaataatcattgaaaacttgggatgtaaactcaccaacattagcaagatgaattattttaactgcataatcaaaatttaatcatttaaacaagcaatcttgcaaatgacaggttgcgagttgataacacatatgtgattattttctagatgcatctaccaaaatcttataatatcaaaactatccacatggtggatgaacgggcccatatttgtttcagaaatgcaagacattaaatctcaactttagctagcgagtttctaattgtaatgccctaaaatacttatttatgtttctgtaaaattgtgacacaaatgtgtatctgcttcactggttaagtgttctgggagtgtctgagaggtcttaagttcaagccctagctttagcaaatatttttatttttggaattaagcacta

SEQ ID NO: 256503 - DNA, 469 bp, Gossypium hirsutum
ccctacgcgtccgaagagatacccattattgatttgagttacctctttcattttctctgttgattttcttggcatccaagcaagggagactttagccctccactgctccttcattgatgccaccaccaccaccaccaccacaactcctttctcactttaatttcgacatttcccttcatttccgctctaaacccatatccaaatcatccccactatccatttttccgccgtcttcttcatttctcgccctccaatcccctctccccaaacaaagaaaccctgtacttttccttacccgtgccacttctcaaaacgacaatgaccaaccacctcaagggacaccttctcctcctccactgccgcaaggagctaaactcctccctttcctcatctgaatttcaataggcagtagcagcaggggaagaagaataagaacaacgagagagcaagaacttgaggcaaccctttg

SEQ ID NO: 256504 - DNA, 423 bp, Gossypium hirsutum
attttagtaaaaatgagaagttaattaaattgggttgatattgttaaagcttgtagcaacttatatgcatgtagtttaacaattgatttgtgataaattagtaaaatttaactattttaattcatgtatttactaacaactgaactaacttgtcagtttttgtgaagtatgacaaccattgtagagattgatgcattagatgggtgaaaactgtctgttaaggatgttaattaactgggaaaactttgatgctgatctgtaattttaaaattttcttttatatggtttttggctgcaaattcagtgctaacatttggctactggctaaaaacacgcattaattatcaatctaacaaacaacaatccttcaactaaagattggttattttacagtgtgatccacaacagtatggtgcgtgtgac

SEQ ID NO: 256505 - DNA, 413 bp, Gossypium hirsutum
gggaaattaagttgaattagaaagtttgaaacattgacacttatgcttgagaaaatgaggaaatgaatttaacttttagattgaaacaagaaagaatctttcgaagtgttaaaaaaaggccatacacattgcttcgcggtttgcactgaaaacttctttgatgaatataaccttcatgaattagattttagacataagtatgctttttcttttaccctatttgatctaagtaagcaatgggtttcaaagagggattgatttacatgctctaggtcaagaaagcagtcaatggctgaagatgatgtgtaagctgatccttggacaccaatttcgaggaatctaatgtttaccgtatgggtggtttcctgcatttccattagggatataatcatatgctagaacctgcaagcatt

SEQ ID NO: 256506 - DNA, 475 bp, Gossypium hirsutum
cctacgcgtccgaggggttctgctgctgtgaaggaactcacttggggagatgaccctgacaatgacttgattgaacttccacctgattatggttcagatgtgatctatagtgaaggagcagttgtggatttgttggactcccttacacagctatgcaggccacaaacaacggtgtttttgtctggggaacttcgaaatgatactgtccttgaatgctttctagaagctgcagtgaaggacttcgtggttgggcgcatcaatcagtcacagtggcatccagattatcgtagtccaagggttgtcatgtacatcctagtgaagaagtgaggtcagacgggaaaaaaatcactgcgaattgtgagcagataaagtcggatattcattcagccaaattttgaacatgtttgagtaacctatttcaatcttttggatacagaatcgaaagaccatattctggcgtgcttaatgatgcttg

SEQ ID NO: 256507 - DNA, 441 bp, Gossypium hirsutum
cccacgcgtccgaaaaaatctcagagaaaagaaaaaaaacattctgctcccttttccttggccgaacgaaccaccatcggccccgccgtgtgcagtggtcagaggctcccaacggtcggtttttcaaccccgtttcagggaccaactgaaggcccaactttcgtgggctcaggactatggagcggaaccccaaacgccaccctcctagtccgatttcggtgacccgaaggaggacttcggcgacggcattggcggggcgattcaggtgtttggtggcgggctacaaaggcagagggtatgggcggatgggacacgacgaacggtggtggcagatagggtctaggatgcggggtacggcgccagaaaccgtagggtttctggcattctgtaatgattcgggctatttggggctgattgggttttgggcttatttcattgggc

SEQ ID NO: 256508 - DNA, 467 bp, Gossypium hirsutum
cccacgcgtccggctaaattgaaatttcagtgcctgacccaaagccagtcctctctcgccttcaggtttctgacagaccatgaaattaaatcaggccgattccactgcggatgatcttgagcctctgttcgattaccgccgtgttcagccgctgaacattgtttgcttagacgatgactgttcagatacttcaccagttccatcaccaaaacggaggaaatttgctaatcccgatgttgcggaagtagatttggataaagatgttgaagtgataaaagtggtgaatgttgaagaggaggattggttggctccccctcctgtggtttcaactaaagcttatagcaagattggcgaggattcaaccataaaggagttaaggcgaaggaaacaggaattgctttcgtttgcacaatctgcaaaaatcatgttgcaagaagtggaggaatctgcaaagcaagaaccgagtg

SEQ ID NO: 256509 - DNA, 466 bp, Gossypium hirsutum
tttgaaatacaaaaagtagagcaactaaattcttaaaaataaaattataagaactaaattctaaatttataaagagtacaaggacttataacatatttgtacctaatatttttagagacttttttttaataatttaattataggctttgattatatctgccttttttgacacaataccaaaaactaaatatgatctctcatcaacctataaataggagtacaattcatttttatttctaatactcgtattagaaagtgaagaaagtgaggtttttatagttgaaataaaatgagttgcatttttagttgttttgttaattctttcttaatcattttttttgttgattcaggaaaaagttgggtattggttcttgaaatattaatgatatatagaagaatatccatgtatatctttttaatgaaaaattttataaaaaaatagaatttccggattaatcgaatattc

SEQ ID NO: 256510 - DNA, 250 bp, Gossypium hirsutum
tcgcttacgcgtccgtccactcgtccgcagagtgctgccgtcggtgccatcaagagtgttgagaagaaggacccaactggtgctaaggccaccaaatctgctgccaagaagaattgagagatcattggagagagaattatatcaggtttcattacagctctggacaattatcttaaatctggactttagaatttacttgctgtgagactttgtgatttgctttgtaaacaaatcctagttttatatttca

SEQ ID NO: 256511 - DNA, 417 bp, Gossypium hirsutum
gtgtgatgctgcagctcctccagcacaaacccgtggtgctcctatcgatgtgtcggcccctgctgctactggctgggaatgagagggatttattatgattttgacaaaaaatgttttggtttgcttttaaaatatgagctatgtcgaacaatggaattgtgtgttctggcacgatttagttaaatagtttttttttatagacattatttagggatttttgttatttttgttttggaatcaaaagtgatgaatttattgttatatgcggcaatggtttcttgatatcagaaatatgctttgcgtttcttcctactgcataagttagtcttctcgtgggaattttttaaaaaattatagttatctgttttcgcaagtatattattttggtcaaatagagttaaatttaagtatttaatg

SEQ ID NO: 256512 - DNA, 392 bp, Gossypium hirsutum
aatcttcaaaacattcattggttgttataaataataaaaggggatttagagacattgtagataagagtgttttgaaaatttaatctcaggaatgaacgtagtaatgatgtggtaaatttttagcatctaatgcattatgcatctaacaataacaaagattgtttgacatttgctttacattcaaatgcatttccatggatgcataagatgtcatatggagtttggacattttactttaggatatatgttcataggttttgtcttgtgctggatgtccactatgttaattgtgtccttcattttttataaagtatagtgttcaatacttgtatttgatgcaatttttggatatggatattcggatatgatcatctaaaataggggaatttttt

SEQ ID NO: 256513 - DNA, 404 bp, Gossypium hirsutum
cttttaccgacaacctattgatccttccgaaggcatcaaaagagtacaacaacccgtgacaatttacagtccagtttccccaccacaatccagcagcgacgtttccacaagcgaaaacaacagcaacagccacaccttcaccaccaacactgaaaccaacgaagacgtctctgaaatcgatgaaaacttctggtccgaagtattatcggctgataactcaagcatggccgccgatttccgagtggttggttcggaccaatatttcccaagctctccgtctcctccattaccagcattggaaacagtgaatggctgtggttccaatctttatgataccgatgctaacatggatttttggtataatcttttcaccagagccgcggatttacctgaactacctgaat

SEQ ID NO: 256514 - DNA, 306 bp, Gossypium hirsutum
cccacgctttcggccaattgaaagaaacctaccttagggccaccatgaggagaatatgtctaagggtctgtcttccgtattttgaaaactttaccaaccgtgtgcatgttctagataaataaaaccaagaaactcattcttgttatccagctgcttattcaagtgatgtttcctattaaaccctacgcaaggattctgcttataaaactacccatactaagggagacaatggatatgatgctttttgttttatataaattatggaatttttttttcaacttaaatcatcgtatgttttttaggatt

SEQ ID NO: 256515 - DNA, 473 bp, Gossypium hirsutum
cccacgcgtccgatctgtatttgcataaatatatatatctatatttgtatctgctactgagactgtatctattctgttttgttctgtttgtttgggttgagttacacactaaggttgttagctcaccctttttcttttatcccttcgggtgatcagcaaacctaggattagacgacgtgtagaagctttggattctctgaaataaaatggttttaaaagtccttgtgattgttatagaatttgtggactgtaaattattttgggactttattctccatttttgagttactttaacggatttaaccactactatatttctaaactgtaaaattatttgttttataaatcaaaccaagattttcaaaactctataacttagaaaatttctgctacaaaatgagatggtcactcaagtatttttctgtaataaaataaatagttttatttggtaattttcttaaaaattggaaaac

SEQ ID NO: 256516 - DNA, 365 bp, Gossypium hirsutum
tcgttttcgcgtccgcccacgcgtccgctgaaatattagcaaaaaagaaaaaaaaatagtgtaaacatgcatgtgaagaagattgttctactttttgtcatggtttcagcttttcttttatcaacttcaatggcaggtgggttctttcttcaatgtctctttttttttttgtgctgcagctttaatctggtgcaaaagtcatgcacgctttgtccacgaaatctttgtatcgggttacttaatgatcaatcgatttcatcactttaaaactacaaaaaacaagagttgtttagggtttataatacataaacagtttgacgacaaaattttacaggtcgacgacccaagttcctgaacttgttggc

SEQ ID NO: 256517 - DNA, 190 bp, Gossypium hirsutum
ggggagcccggacaccttccggacgtgggaccgtctcctgctccggcgcacggtggctggaaaggagtagatgaacggtggtggtgatgggggcgcaaagggcaggtggcccgtgctgcaagctttggtggtagaggcagcacaagctggagccgaatggggctagggtatttggtgggcttggctggct

SEQ ID NO: 256518 - DNA, 365 bp, Gossypium hirsutum
gcttctggatgcaattagcaagttagaagtttatcttaatcgcaacctggagagggctatgaaggaaaatgacagggtttatcttatgagggttccttctcctagttccttacctcctctccctgcattttcgatggtgaagtcgatgcagatgaatgatgtgttggatgcaagcaaggagaagatgtttgcaagtcttgttcctgacagcagtgcaaaggctctttccaggtatactgaaatggttgatgatgtcatcaggacacaggctgagaaattgcagcaaggaagtgagctaacccgtgttaggcttaaggaaatggacttgccagattcaattcttgctctggaagggaattttagtc

SEQ ID NO: 256519 - DNA, 267 bp, Gossypium hirsutum
gttgatgtgataagagttggaagacaatacatattttttctgctatatttgagaatttgaactgttgcatcctactgcaaaatgagatctgatgcgaccttaataagtcaacagctttgaatcttaagatgctctcaacttgtagtttgaccaagtatagatacatgattggctatttatatatacaaaaaaaaaaaaaaaaaaaaaaaaaaaaaaaaaaaaaaaaaaaaaaaaaaaaaaaaaaaaaaaaaaaaaaaaaaaataaaa

SEQ ID NO: 256520 - DNA, 435 bp, Gossypium hirsutum
  unsure (1)..(435): unsure at all n locations
cacgcgtgcgcccgaagacgtggggaaactcctgactccgagacacagttgcttacagttcagttcgaatggaatggggttcttaaatccgtgtcacgtacattggttggggtgagtcctgagtttgaaattgctctctatactctgtgtttcttcgtgggtggagaggataactatgtacagctgggtccatactctgtgaacatcaagtgctaccgatttggaaataaaatcggttctgtatttccaatagcagaatgttgattttcagctctgngtgttattattattattattattatccagaagctacagaaacactatagatatcatgttcatgttcatgttcatgttcctgtctagcattagtttatgatatatcataacatatcttttacttggatcttttaacttacaaaattgataattatgata

SEQ ID NO: 256521 - DNA, 202 bp, Gossypium hirsutum
tatctttccacgcgtccgcccacgcgtccgtggttatcttaacagtttagaaacaagttctgcaggtttgctgtgggtgaaacgggaatcattgtagcggccttgtagtctctttcaaactcaatatatgcttgaggattttcttcccttctcttttccaaaaactaaagatgattactttaggaaatgtgtatgtgcaaag

SEQ ID NO: 256522 - DNA, 302 bp, Gossypium hirsutum
tttgttattgctggttcaaagtgattgtacggagagggcgaagaggaaggcccaaatgcttcttaagttgcttcgggattcgtggcccgaagattccatcggcaattcggatgattttgcttgcagtgaaatcgtacccttttgaccatccctctcgcctcacaccgaaaagtttgtaacagaaaaatataagccttttaaatttcgataatacctacaacattttttaagagatgggtgtatataaacaaggattgtaatttttgttaagcaaagcaaatgaatcatacatctgttttcct

SEQ ID NO: 256523 - DNA, 350 bp, Gossypium hirsutum
tttcgtgctaagaacaaggccagcagggagagaaagttggccagaagagaggaacgccttgcacagggacctggtgtgaaggcaacacccacagcggcaccccaacaagccgagggagttaagaagacgaagaagtgaataaataaggaagatggctcgacttaatatgttaatggcttttgttttctttataggagtttgtttgcaaaacgctggttccatttatgttgactcacataactataaattagggaattttggaaacccgggtgctgttttatttaatcaggatgcttatgatattgagtgtattattattattcaatgacgatgcatgcggtatgaattag

SEQ ID NO: 256524 - DNA, 484 bp, Gossypium hirsutum
ttccacgcgtccgcttacacattgcttcctttggagcggaaggagttgtcattctaataatcgtcaagtactaatacagattattgtagttcttctataagaatgattatggttggaaaaatttctgagactgtcatgtttagacttttgtcaactcctaattcagtctcgttttgttagttcattggtagttggttagatagtgatggctgggttattcacttcttggtatcatttcacccttcgggttgtttcttgtattgtggctggttgcagcagttgattcactccttcctctgaatttctcgattagtggtatggaagggggcatttgatcatggggaaagattttgatactctgcgttatgcaagctatggaaaatactattatatgacgcttaacccaaagccgatcgggtttggggtgtctccttccttcaaaaggtccattcaagtgccttaaccttttatctttacatgcatt

SEQ ID NO: 256525 - DNA, 434 bp, Gossypium hirsutum
ttcaatctctgttatttgcttaagaacatatggggggagatatactgccgtatatcttaaacaggatggtcaatcccttactttgaagatatcaagtaacaataggagagtgtatatgcatgtgctgtcattataagttaatatagtaagtagtattgggtttaattgaggcgtgaaacttggtctatgtgtgaaggagctacaccctccaatgaagatgttgcttcccatatggaaggccttgtgtgctagcattgacaacaaagaaggtccagacacatgtggggaaggtgaaggtggctgatgtcaaggccgtgaaagtagaaagaggaatatatgaaaacacatcaattagcaaagaaaacgtatgtggattgcttgctgcaagcgtagagaagagataggggtaaaatgcattctcgtcagagtaaaaa

SEQ ID NO: 256526 - DNA, 419 bp, Gossypium hirsutum
ttagaaatggcatcaaaaaagggttctgaagaggtttcgtgtgtctttgaaagggggacactgtgcaacttttgggtggctcctaaattttgcaaaggtttagacaaagtagaactagatgaggtgtgctctttccatggcttggttttcgctcctccggcgccatttccgccatttattgtagctgctgatgttgcctatgcgttctttcactatggtgataatataggttccagttgtggtttttcctttgttattaaagaaaataatctagagcctgagctaaagtggattattgcttggaaaaatggaccatgcaatgacaacaaggtctatacaaatatccttcctctttcagatgacgttgattgggatcaaatcaaatgcaatttgaagtcggagaattgtggacccaaaag

SEQ ID NO: 256527 - DNA, 439 bp, Gossypium hirsutum
tgttcttccacgcgtccggtacttatgtgttgatgtttcatattttatatactgctgatgattatggtacgaacttactaagcttttgaaagcttactttgtgtgtgtgtttgcattgttttatagatattaaagctactgtcagcttggggatcgtcaaggatcatcaccacactatcaaacctaattttggtactttgaaaatgtaaatattaaagtatggcatgtataggctagaagttatggaattatgttttgtgatgtatatatttagccatgtgatatggcttggtatggttgtggatatgtcatggttttggtataagatatgtgatgcaatatgatatatttgatatgttttagttggacaaaagaaatggtaaatgttggtaagttttggcaagttttagcatgaaattgaatgatgtatagaaataaa

SEQ ID NO: 256528 - DNA, 190 bp, Gossypium hirsutum
tttattggtggcatcacgatagtgaatgacgctttcaatgccaatcccgacagcgtcaaagccggcatcaacacgttgaaaaacatccattgcgatggacaaagagttgctattcttggggacatgtatgaactctgtactcatgagatagagtatcatgaggaggtattaaactattgtcttgatgcct

SEQ ID NO: 256529 - DNA, 328 bp, Gossypium hirsutum
ttttctttactcccttatgacacgcgccgttttgatcggtttaccttggaacccatacgatcccttccccttgccctttccctttcaggcaccctttggatttgaaaaaaacccaattattatattcattattgtgttcttaattgcggttctcattttgctatgatctttcttcaatacatcatagaagcatttggtcatctcgtctacttgtctctgcaacctattgttggtaactcggtatggagagcggagagtggagaatcggaaatggctttttagggcttggcctaaggtgaatcgccatgctttaaacatgctttcacag

SEQ ID NO: 256530 - DNA, 473 bp, Gossypium hirsutum
tccttcgcgtccggagccttttgctctctccccctctcccttcttcctttcggctagggtttttaaacccatcatcgccggcagtccttcattcatccaccatggacagtggtcgtggcagcatcaaacgggcttttcagcccttgatcaagccacgtttgaaggccaagccttcaaggcctgggcaatcgagattgggaggcttccccctctccctttggagtttgaacccgatgtcggagggaggagttccggcgacgcgatttgattcgagcggtgtgaacgctggtggtagcagggaggcacatgggtggtacggtgcaaagcagaagggctagggttagggtttccaaaaattttaaaaggattgggcctatcaggctctattttgttgggtttgtgaaattaggtagtgcattgggccatagagtatttgggctttgtatatggactttaaacaaattttttatgaa

SEQ ID NO: 256531 - DNA, 466 bp, Gossypium hirsutum
tcttgtttcatgatcttggaactgatgggaatcctgatgagaggaggaggtatggcgatagacgtggacctgtacgttcttttaggtctccttacggtgttgctgatagtgaaaattttcatcttaatgctgagggtggccctagatccttcaggttctgtcctgaagatgatccagagttgcatgaaagagggaatatgagggaaagagagtttgatagacggatcaaaaatcgaccagggaatgcccctaggaggacaagaaacttggaggagcaggaaggaaatttcaggcacggtggtcaggtttggcatgatgatgggtttgatgatatgtcacaagctaagcgaaaacgattttgagtaggtttttttatgccattagtctactgtcaatggtgtaagttatcagagcagcagggcagaatctgttaccattctctattttctgcaaacgcagtaacccc

SEQ ID NO: 256532 - DNA, 383 bp, Gossypium hirsutum
ttcaatgtctcgtcgagagggtcgtgattccgactctagacgacaccgttctgggttcgaccgtgaacccaggtactccctttcgtttcccaatccttgatttcaaacccaaatgatgccttcaattctaacattacccccatgtatttcaaatgggttttcaatcttgtttaattttgtctaaagatttaattttgtttatgttgtttagccctaagaggtctaggagagatgggaaacctcagactgaaagacaggtctccagcgctgacgtcggagacaggcccgaccaggaggagaaacagcgccgtcggttgcaagatgctgtaccccttgaggcggccccgacacctcctgattcttctaagattgaaactgtgatt

SEQ ID NO: 256533 - DNA, 387 bp, Gossypium hirsutum
tcttctggttaatttccatgctgttggtagtatttaaaagtaagacaaattttgtttataatttcacaaaatttttcaaggaaaatgtcttcatatggtgccattttctgcagattgaagttgtcgatctagtttctgaaggatgtactggaggcaagttgagttcaacaacactaaggaagcttgaagctgagaaagccaaaaaccagtagtctgccacaagcttgatggtaacaagctgatatcatatcaatggctgcaagaaaggtggccatatttcgatggttctttttttttttcctttttctttttgtgaaactccaacagcaaaaatgtacaaggacacctgaaatttaataaaattaagcatgcaagtgtcttcttatt

SEQ ID NO: 256534 - DNA, 463 bp, Gossypium hirsutum
tttcgtccacgcgtccgcccacgcgtccgcagaaaccaatgtggagctacctgttcttgaagcaagatcggttgaagatattgatttggcttttaagcaacttcatgaaggagtggatgttgaggaagtaattcttccaagtatgattgagaatctgccagatcatacagataccacttcagaatttcctgttgtcgaggcaagatctctggatgatatacataatgctttcataaaaggaccggaacctaatccagctgagctgccgcattcagcagacttgaggcatggatcatcagaagtagagctgcatgatgtggtttcttctaatgaggttgaagttgggcaagcagtctctggctttgaagaacatcttgagaatgttgctgctggtgaaccgaaaaaagaatatgaaaaaaaggaagaaaagaaagaggaaaagaaagaggagaagaaagaagag

SEQ ID NO: 256535 - DNA, 416 bp, Gossypium hirsutum
tttttgaaatttattaacaaacatttccatggctttaacaaagagaagatttgtttggggggggtgatgttttagataactccgtccattaaaaaaaaaaagggtttcatgatcgttggctgttctactttgggtgttgtttggattttgcattttgattacaagatacgaagatcatctatgcgcttttgagctttgaagaatatgttggatgaatataaagcctctttgaagaaacttttttctttcaggcaatgggaaccgaacttgagcactgtggtataaacccaataatagaaagctcagaaagtaattccacggaaattagggttaataacatggaatccatcaaagagacaatgcaaatgcatgaagacatgttcaaacaccaggtacgagaacttcatcgggtgtac

SEQ ID NO: 256536 - DNA, 350 bp, Gossypium hirsutum
ttccacgcgtccgcccacgcgtccgctcaccctctcttttgcactttaaaatgaacttccctttcacttcccaatcccattgtgaaataaaaatggctacttcaaaattctttttatcttctcttcttctgttactttttgttcatggagttttgccaagagcagaatccaagacgtactggggagatgttgatgccttgaaacaactcaaaaatggagtccagcctaattctgtgagcccgggttcttgcttgggttcttgggatttcacattcgacccatgtgacagcctcttcagtgaaagattcacctgcggtttcaggtgcgaccttacagtttctgggttgagc

SEQ ID NO: 256537 - DNA, 182 bp, Gossypium hirsutum
cctctagactcttccctagacactggcaaaatctctgtcactgtgatcattaatggccaccgctaaacctgaagttccagctactgatcaagacactgcggaggcagaggagccaaagccggagccaaagcctgtgaaggagaagatacccaaaactccacaggagaaaaagcctaagcaac

SEQ ID NO: 256538 - DNA, 478 bp, Gossypium hirsutum
tcgtctgttacttataattcactcaaatattttaggagatatttacctgttacttataattcagaatatttaggaaatattcacctgttacttataattcgaggagtatcttctttttctttgaatttggttttcaactcatccgttgcttttctcaatctgcttggatattatcaaattcggttactgggtagtctgtttcagggtaggttcttcttttcttttgaactttacttcaaaattttctaagtaatgcttttgtttgcagtctctctttgcaacattttaacttaagataattttgatgcatcattaataagcatactgtgcatgcccatattttagcttctaggaatacatggctgctttcaacaaatagagaccaaaaagaaaaaaaacctttcttagcaagatgattgtaattacttaatttcttagggaatgtcatgaatgcattgcacgagattgaatcaatttc

SEQ ID NO: 256539 - DNA, 333 bp, Gossypium hirsutum
tttcttgcgtccggccacgcgtccgaccacgcgtgcggccacgcgtccgtccacgcgtgcgtccacgcgttcgtccacgcgttcggccacgcgtccgaacttaattaatggatagaccatggcaagaaaatcccatgtcgaatcgtctgctattactattactatcagtactgatctaagaataaaactggcagctttgtactgagtttgcatttgaatatttgtatgctaggtttgattatgctgttatgagtgggggagcgcattgttttgtttttatgtaatgaattaaatctactatgtgcttttatttgagtgatattatttatatat

SEQ ID NO: 256540 - DNA, 445 bp, Gossypium hirsutum
tccactcgtccgcccacgcgtccgaatttctataagtcctttcccatctgcaaactggaagcagaaaaagggaaaataatcaaatattattagtaaaatcgccaattttgtcacagttctccattctgcagtctctatccatagctttcggtgttaaaggagtctttaatcctgactggtgaagggccataagaggaaatttatgggttcaggcatttcatgggagtagccgaagatagtgaaccacccttgaaacgtgtgaaagggcccttggaagaatccaagagcttgccggaggatcattcaaccacaaaatctgtttcttgctctttgggagatcagatggctaggcctctaacctcccaaggggatggggaaacaattggttcacacggtgttataagaaaagcagaatttattaaaattataactagggcattgtact

SEQ ID NO: 256541 - DNA, 165 bp, Gossypium hirsutum
attcctttttccttttttggttctttccctttggcttttattttgagttattatgaattatatcactgtccaaaagaaaatcacacagcgggtaaaggtggtcatttatgaaaattgaagatattagtaattcttttgcattgccaaatcttttatctgcagatt

SEQ ID NO: 256542 - DNA, 373 bp, Gossypium hirsutum
tcccagttagaggacatcctcgaagaaccattggtaggagccctgtaaggtcccggtcccgaaaaagcccaagtaggagcccacccaggtcaacattaaaatcaactagtagaagccctgttagactttcaaaaagaagcacaagtaaaagtcctgcaagatcttttcggagaagcattagcagaagccccataaggtctaggagaagcactagcagaagtcctgtaagatcttctaggagaagcataagtaggagctctgctagggctcctcctaggagaagcatcagcagaagtcccttaagggaaccaagtaggaattatcgtcgtagttattcaaggagccccaccaccgtgcggtgggtaaggtcacc

SEQ ID NO: 256543 - DNA, 353 bp, Gossypium hirsutum
tcgttcgaccttacaacacttttgttatgggagctgaatggaaatggtttttcagtcttctttcccttacattagtctgcgtcctcctcctcgtactttactcgatctcacctttcagctcccctagacctttcccttcactagtccaactcggccttccatatccaccaccttttgggtattatatattcggtggaaaaggtgataaagatcggatctttaggttactccttgctgtctatcaccccaggaatcgttatgtattgcatcttggagctgatgccactgatggcgaacggtatagtttggttgtggctttgaaatctgcgcctgctattaggagcttttcaaat

SEQ ID NO: 256544 - DNA, 400 bp, Gossypium hirsutum
tcgtttttgaagccttcgtaaatgatccgttattgaacaatatggagtggtttgggtgggaatatcgatggaaaaagatggagaaaaaaatgaagaaaatggagagatttgttgcggctacgatgcagttgacacaagagttggaagtgttggcggaacttgagcaaactcttaggaggaagcagagaaatcccgagttagatcgggtgaaattactcgagtttcaacagaaggttatattgcagcgtcaagaagtaaaaaacctacgcgagatgtctccatgggttagaacttataattacattgtccgatttctgttgagatcactattaacgatactcgagaggataaaaaatgtgttcgggaccaaccaaatggtaccggttgagaggaatgatga

SEQ ID NO: 256545 - DNA, 504 bp, Gossypium hirsutum
tgttccttttaagttttgtctttcaaacgatgaagcaaaagattgtagggtttataagctttttgtcgttagcttttcttcttctttgttgctcctcaacatctgctcgtttgctcatgcagatcaaccatgaaacaggtgaaaaggaggttaaagcaaacgagatgatcattcaagcagatgctaaagatgatttctcaaatttgattggagcagaaaagtgttatgagaaagatgaagaatgtttggaaagaaggatgattgcagatgctggtctggattacatatacagccaaagtaataagccttgaacgagtggcggaggtcggatcctcgttctgggtataaagtagttttaaaattcgtaaatcaacatttactctattaatggacctacagaatatgaaatattaaatattgagctcgctttaatagatatattgaaaaataaaaaaaataaaccttaaaattatataataaaaattagccataattaataaaaca

SEQ ID NO: 256546 - DNA, 466 bp, Gossypium hirsutum
ttatttttatacgtaaaattctaagagaaaaaagaaatgagtggtggaaatggtcccaagctggagttgaaactgaacctatcaccgccgagggttaacccaacagaggaatcatcgacgacggcggagaattcttcttccgcaagttcatgtgtgctgtcagagacgaaccagatgcatgaagttgacacttccaccgatgctgcggcggatgtggcggcggcgacacccatgatgctagttgggtgcccaaggtgcctcatgtacgtgatgtcagagaatgatgaccctaaatgccctaagtgcaagagcactgttttgcttgattttctccccgccattaaaaattagaaagagttcgagatttatggtttaattatgatatcagcccctgtactttttaattttataaattaagtccatttttcttttagttaaaagaatctagtcctttgctaaattagat

SEQ ID NO: 256547 - DNA, 320 bp, Gossypium hirsutum
tgttctttgctgcacaaactctagagaaattcttccatcgaactttgtccatgtgtcttttatcataggactcttcatcaggcaatgcatcggtgggttcatcaacaagtcgaaagcttgtttgtagagaaaaaaggtgctgcatgtaaatggccaaccgattgcttcttttgccttcgagatagagcctaagacctgtaactggtctcatacctacatcaacctggcatagaattggtaaccccacaaaagaacttttgcagcaaaagaaacaagaaacagcagaagcattgaagaggatgaaaaaagaagtttactgg

SEQ ID NO: 256548 - DNA, 294 bp, Gossypium hirsutum
ttccattcgtccgcccacgcgtccgcccacgcgtccgcccacgcgtccgaatattttcatgtcttattatatgtttcttttaataatttatggtgttttgctggttcatgaagatcataaagacgtgtctgaggttagattattttaatagatgtcgatgaatccacgaacgaatcaatgtagtacgatgttgtgattttagttagttcataggatcatattaattgtgcgtgtgtgttttatttttcttatttcaaagctaagcttgttttgtatgaactttgctttattttt

SEQ ID NO: 256549 - DNA, 421 bp, Gossypium hirsutum
attattattaatcacgaggatttagtaacttagctgttgccgattagctcacttctttgttttccttcacactcttgcttttggatattattatcaagcatgaacgactttgatatctgggctgtgggtaatcttagctcaaactttctccctttttatggcctttttggctacttggtatatgcttttcaagcccaaatgtttgttcttttttccattagcttgagatgccatttcttttgctattttgagtgttgattttgctccgaccatatgaatctgtggataccattactattactcgcttcagtagacagccctgtggatagaacttgtctttcattgcattatgtatgttgacattcatcttcaattatatgtttatttattcatttgcatcttggttaagagatactgtttg

SEQ ID NO: 256550 - DNA, 453 bp, Gossypium hirsutum
ttcaattacaattacaattaaaacagtttcgaagtcactttcaagaaaccaaactcttcaacacaaccaaacatgttcatctttgcagtcgccgcgtttgtttgcattggtgccatagtggcccaaccacctccaactcaaattccacaactcaacaatcgacctctgtttgaggctcttgaaaagagagcagacgcattggtggcacgcgctcgtgcggtcgcacaagagcaccgagttctgggaggaagcaacagacttttggactctttggatcgacaagccactctcgtggaggcactggcacttgatctcaaggccaaactgtatgtacctgatgataagcgaccccagcctgatgtgcatcacattcacgtaatcgaagaagagttgctccacctcgagaatcgtgtttcagaagaaattgaaattctggaacacattcgcaatggc

SEQ ID NO: 256551 - DNA, 384 bp, Gossypium hirsutum
cttgccccagcaattgtaatgggcgtggaaagtgcctgccaaatggggtatgcgaatgtgaaaacagttgtactggcattgactgctccacagccgtttgcaatgaacaatggagtgtacacggcggtgtctgtgacaatggagtttgagagttccaatgctgttactattcaggctccacgtggcagaacagctcgactcttttctcgagtttttcggtatgcaaagatgtattagagagggagttatccgggcaacattgcgccccaagcgaggcaagtatattacaacagctagaagaaggtgttgtcatgcctaattaccaccgtttattccctagcggtgctcgcaagatgtttaatactggctttgggagcagctact

SEQ ID NO: 256552 - DNA, 316 bp, Gossypium hirsutum
ttgttcttacacaccgggccaaaaagtaaaacattttgcaaaacaaaaaaaaattaaaatcatgtgttgtgatggagattgcaggccactgggcttcctccttggccttccctttgcttttctttccctcatcatctccattgttggcgttgttgtttggatcgtggggttgttgttgacactgatctgtccttgttgtttgtgcgtgacggtgctagtagagatggcgctggagttggtcaaagctccaattcatgtcatggaatggttcactgaacaaatcccttgttaattccacactcactgctttgttctg

SEQ ID NO: 256553 - DNA, 373 bp, Gossypium hirsutum
ttcttttcgtccggtacgttttgcgtatagtccggctgtataaattattaaaagtcaaaaaaaataaattatattttagtttggttcaatcatttcgtattagttcacaagtcaactggtttaatgttttcttttggaccgatactctggccggttcaaacaatcatggctttaagtctctacattttgtacaattgaaatttagtcctcctagttttatttccaagattttaatctctctactttttgaatttataaatctactttcaaattatatataaccacataaaattttaactgaaaatataaactatttgaactaattaattacattataaaaatattaaattaattaataacattataaaaatat

SEQ ID NO: 256554 - DNA, 463 bp, Gossypium hirsutum
tccacgcgtccgcccacgcgtccgcccacgcgtccgaatcactcactttcctctcctgcgccatttcgggcctctattctccatccgactctgattgcaatggagcagaaggaagatcggccaccaggtacagccagcctggaacaactgacggaggcacccatggggaaaaggttcacgcgcttgatagtgatgcacgcgcggagtctggatccactgttgcggcaccaacgaaaccctagaagcttctagggtactccactgattcgggctgagcttggaagatccgggtttggggtctgttggttctagtattttggggttttggtattttgagtcttggtatttagtaattgggcctattgtatcgggttaggtgttattaggctgttttttaattattttttggactattggacttttggactattattttattttatttagtttatatatatatttt

SEQ ID NO: 256555 - DNA, 350 bp, Gossypium hirsutum
tcgctttattcattggccaaaatcattgagaaatgggacttcagcaatggcggcaatggcaatgttggaagagagaatcaaaacggcggtgttttggtgggtgaggacactcaacatgacttcaacaacctgttgaaggttttaggtgaagatgaagagttatatgattgtattgatggaattatagggtatcaaataatggtgcttgagctacttgcacaatcctcatttgaaactcaatctataaacaattccaatcatttacatgaatcaatggaatgtcagcttttagaaattcatcctcctattggctgtgaccttttatcaaacactgaatatgcatctcaagc

SEQ ID NO: 256556 - DNA, 427 bp, Gossypium hirsutum
tttacaaacccttagaaacttaaccaattctttcctaattagaattcatatcttacctttcctcaaaatcctaatagaattagaattccaccatttctttctcttcttttcctaattagattttcatattgctccttttcaaatcccaatagaatttgctctccatcttgctatttaatctctctattttctttcccttttctttccatcatattttcatcctaattattgataattattttgctttcctgaatcaaatcatcctccattcgattgttccttctattggtttttctaatttctgtcaatagcatccctattcttgccaataatcgataagtacatcttgtttctgatgtttagatcccgaatttttgttatattactattctgtgctaatcttatgttcgattaatcaatctttttc

SEQ ID NO: 256557 - DNA, 341 bp, Gossypium hirsutum
tccttcgcgtccgcccacgcgtccggtgatacttttttggtgacagatttcatcacgtaaatagaatccgtggcaaggtttggttcgttgacaagtatgatgcaagcaatgaatgttgatatgaatttgtgatggatttaaaggaggttgtatgttgagatttctagcttccaagtatatgtagattcgatatgcaatttgaattctccgttaaaacagtttcagctttctatttggtcataataatgagcatagggtttaggcaattctggtgtgactgtctccttatgtttattatattatgcagcatgattttagttggaaagactgcaaattatatg

SEQ ID NO: 256558 - DNA, 174 bp, Gossypium hirsutum
ttttcttgtacattagattaagtaacaaacaagttttttcttttaaaatttttatttatttctactattaaaaattgacatggccaatagaataactaaacagtgacatgtggcattacatgtcccgccgtgaaaatagataaaacttttttatagaaagactaatttactttt

SEQ ID NO: 256559 - DNA, 482 bp, Gossypium hirsutum
ttgaagttttttttggaacaaaatggatcgtagaagcgcgtttgctgttgctttgatctgcattgtggttgctggtgtcggtggtcaatcaccgagcgccgctcccactaaagcacccccggctgcgactacgccttctactgcacccgctactgctcctgtgagtaaatctaagtcaccagctcccactgctgctccaactactttaccaccggctgcggctccgtcagagtctgcggccgttccagccccatcaaaatttgctccagcttcttcccctccggctgctgctccagtgagtaccccaccggctccagttactgtgagccctcctctagccaaatcgccaccggctgctgcaccaacaactcctccagagagctcggcctctcctcctgctcctgttgcggctccaacaactgccgaggttcctgcaccagctccaagcaagagcaagagcaaaaagaagtcaaagaaacacg

SEQ ID NO: 256560 - DNA, 205 bp, Gossypium hirsutum
tttagtttcaaatttaagtagtttcaaattcatttattgcaaatcttagatggaaccataaaagactttggtagttctaaatgcggttttgatgttttatttgggtttggatagaaaaaagagaataacaatataactagtttcttgttgtgctatggattactgttttgcttttccttttcaataatttttattatctcgtctt

SEQ ID NO: 256561 - DNA, 151 bp, Gossypium hirsutum
tgacagctttaggttctatctgctgctacctgtaacttgcttttctttttctttttctttcctgaatttgtaaaattattgtgtacagagttttaggtctgtaatctgtaactttgtttcagtaatactagaattacctcccatatcccac

SEQ ID NO: 256562 - DNA, 288 bp, Gossypium hirsutum
tgtcacgcgtgcgcgtgtgatgtgggcttgttcatttgtcgccatgagaggcagaagatgtagattttgcatgccatgatcaaagcaggaacattcagacagttcttataacaaagcagagtgccataaaaagttcgacaaaagtgggaaaaaggaagggaatgtggatgatgctgattatcagggtgccactactactactacggcagccagcagtgatgctggaatggctgctgctgtagcagtgggtgccactacagcacatgcctccgctgtggaatgaagtgg

SEQ ID NO: 256563 - DNA, 248 bp, Gossypium hirsutum
ttctttcgtccgcccacgcgtccgggagtttaaggttgaattaggagtgtttccattgttgtctggtaactgttctcagtattgggtgcttgacagacggtggcatatctatgggtggtctctagcgttacctggttttgattaatttactactgtatcttgtcattgtcaagaggtgcccccttggttttccaaggtggcttgaaacttttgtttatgattttcgttgaagttgcggaattatttat

SEQ ID NO: 256564 - DNA, 148 bp, Gossypium hirsutum
cgcgtccgcccacgcgtccgtaaagtactaaagtttgaaggtagctggatctgccacaggcattcttgtgctgaatgtggtggcccccctcagttttattgccttgcttgccctgattctgtctgtaggctctgtgttggggcatatg

SEQ ID NO: 256565 - DNA, 241 bp, Gossypium hirsutum
tataaaaaaaaggaaaatgaaaagtgtgaatggaaaattcttgaagaagctgaaatcaatcaaaccagttggttacctaaagccagatcgtgttcttcaagtgtttgccattgatgggtttattgattcttatacgaaaacacccaatcccaatgaacaagccaagttgttcaccaaagaatttgaggagcaagaaattattaaagaaaaccagcctgaaatcatcgatgtagaagagcta

SEQ ID NO: 256566 - DNA, 169 bp, Gossypium hirsutum
ttctatcgcgtccggaaaaaaaaaagtccccagaagcaaaagcgaaaagtttggtgttattttgtcataaatactgtaattacataccatttttttaatttttttttgtgtatgaatcattgcctcttattatataatgcataatgataataaatatgaacaaccttgg

SEQ ID NO: 256567 - DNA, 215 bp, Gossypium hirsutum
taatttgatcaccaactgtttaaataaggacttgccagccatgtttgagaaatccttaaagaaggaaatagctgcagttggccctgttgtggctcgtgctattagtcccactctggagaaaagtatatcttctgctattacagagtcattccagaaaggcattggggagagggcagtgaatcatttggagaagtcagtcagttcaaaacttgaag

SEQ ID NO: 256568 - DNA, 136 bp, Gossypium hirsutum
ttgaaaaagagaactacaccctgaatttagattccgaagtgtttccggtgtcggaaattgtagagttttaagattagaggtggaaagcctattgaattgaaaatgaaattcttttactacatattcttcattagtc

SEQ ID NO: 256569 - DNA, 280 bp, Gossypium hirsutum
ttctacgcgtccgcccacgcgtccgcccacgcgtccgggaaaaaaaaataaaaataccatggcaattacatctcatctgccaaacctcatcaatgttcctctagaccgtcctgcctctttctcacaccttccttgcaacgaatttcttcgtattcaaagcaacagagcttcaacatcgaccagcttcagtttgggcatcaatgtctccaggaagcaatgtaaacccatgttggtgcgaagcatgggttcttcatttgggtcaaggcttgaggagagtgtt

SEQ ID NO: 256570 - DNA, 380 bp, Gossypium hirsutum
cccacgcgtccggtttcattttcaattttttcatgaaagaaaaagcggcactgacttaggaaatagagatggaaaggaggaggacaagaagaagaagtagctgctgttccttttcttaagaactctgtgacttaaccctaaaacaaatctaatccaagatcaaattgttttccttcctttttgaggcaaatatttcaaagacacagtagatctgtaaaagcttctcctttctattggtttctgacaacagagatggattcttaaactggttgattccaatgggtgctgtttgtaaacctaagttggattcttttcaaatgaaagcatgtgccgcggattagcgtggttaaattgcaggccacctccaacaacatctaata

SEQ ID NO: 256571 - DNA, 329 bp, Gossypium hirsutum
gttcacacaccctatcattttttctttgttattcggcgtactcagggacctccatttccagctactacttccgcagcaaacgcagaggtgatatcgttgtggatctttgaataagataacagaactctgccttcatcatctctggccacaatacctgaggctgagtatttctggctttctttgtatgctccgtcgaagtttatctttatgaaatcgcgattgcgcagtagaataaacaactttgccaatggttgagctattctaacacccagggcattctcgaaataggtggtccattgtttaagctctttcaccacatctggggcagt

SEQ ID NO: 256572 - DNA, 370 bp, Gossypium hirsutum
tttccacgcgtccggagatatggcggtttactttggcatgcttgatgcccttttggcttctgagcagcttcctgaagaatacaggaaccgctgtcaggacatactgtgcaatgactgtgataagaagggaactgcagcatttcactggctgtatcataagtgtggttattgtggttcatacaataccagggtaatcaaggttgagtctgcaaataccatctgctcaacctcaaatatctgaggtatcttctcgcatgttattttaggtatgcaaacgcctcagagcgtccccttacgtgtaaggctgatagtctaaatccaattttatctattttcatcccaatagatggaagaaattagcccttttttt

SEQ ID NO: 256573 - DNA, 347 bp, Gossypium hirsutum
gaaggcctattctcctgcctctccttttgactcattcgagaatcaatcaaggcttcatcgaatcgaaagactcacgcgtcttgctcataaaccccgaatcgccactcgatttcgatcatggcgaagcaagcaagggtttgaaggcatcaaacgcaggtaagcttcgcttctcccttttttattataaaacgatgaagaaaagcccactgaaataagtgaagaacgagagttcaaaagggaagggaaatcaccttctcagttttttcgattgctttctattgtctctgtattcatacaatatgcgctgatatttcgttttttttgttgcgtaaccctttacaaagact

SEQ ID NO: 256574 - DNA, 336 bp, Gossypium hirsutum
ttcccacgcgtccgcgagttttcggcttcaagatccacaagccctgacatgattgatacatgagttgcaccaagccagaacttatacactcatatcaatttccggtcagtgagattcgcggtgattctcaattagcctggtgcttcttctatcaaagcagtgggttcccaacaatgcaaggtgaagtggggctccaaaagaaacaaagaaatggtaccattgattgattgattgatatggcaaatgaaatatggactgctagtggagcacaaggaatctctaggatttggttttttatgaagtttaagtgagcatatatttttgtttggaagtgtg

SEQ ID NO: 256575 - DNA, 463 bp, Gossypium hirsutum
gcttgtacaatcatgctgtcttgctttgtgcgaagatggaatttatggacctagtggggtgcttcttttacctgatgtagaatgggtttactgttcaaccatgccacctgtctctaggctgcacatagcaactttatccgccgaaacatctgatatatatcaatatgctactgtgtgattagtgtgggtgcatttatcgcctcttaaattcgagttgtactgagctacgccttagctttttcagaaaacatacattatttttatatttcttatcttaattttgaaggactttgagtgagtcttgccttgtgtttgtttggtgtaacaataaaagggttcaatgatacttgctaatagcccaaatttcttcaagacgagcttgtttgtatttaaggtctttttgatgtcctttgagggcattgaagtgactaatacatgatttaattggcactcctgagtttga

SEQ ID NO: 256576 - DNA, 306 bp, Gossypium hirsutum
ttcaagatgtacactctgcagtgcagacatcgactctggatcattgatccctaataaagctctaagagctgctgctttagctgtgaagcaagaggataatcggaggctattccataatgccgctcttcgtaaacgacggaaagaaatgggtgaccaaattgatttatcaaagagatcaagcagggagaatggagaggatggtgctgaggatgggttgcataggggcgtgcaatatccattttcagtgaatgagaaggtgttgattaagggaaacaggaggacaccagaaaagtctgttggaaagga

SEQ ID NO: 256577 - DNA, 244 bp, Gossypium hirsutum
tattatatcaatatgcttgtagcatactagattgtacaaggatgataatatcaactgtactatgtagtgattcattaaggatgcaacagcaaccattacccgcaagttaaaactttatatgaagggtcaaaagaatctgtctaaaggctattgcattcaccacaaaagaaaactatatcttttcataaggaatgccagtacttatcaaaaaaattgatattggttattatgcttttgcaaaacc

SEQ ID NO: 256578 - DNA, 412 bp, Gossypium hirsutum
tgtttttccctttcaactctttgaaacccactctgcaactctgttgttgtctcatgcaatcttcaacagctttagaaccccttttgtttaccgctcacttatccaccatgctcaaactccttaacaagagaatcaagcgcctctgttctcgcctccggtggccgattcgccgccggtctaggtctgtggttgtcatcagaaggcttggaaaattaaactccaaggctcgtactgatagtatcaccaaggatcgtgctattgtcgtcaatggatcttcaaaagttcaccaagatggccatttgggtggtttagtaaactcgtcgagacctatacgtgtagcgactttcaatgcttccctgttttctatggctcctgcaatgcctaaagcagataagtcttcaagttttgacta

SEQ ID NO: 256579 - DNA, 382 bp, Gossypium hirsutum
taaaaaacccagttcacttttcagttcttggtaccttggctgaccatttttgtgtaagtttattagtttctttccataaacaaagctcaaatctttctgctgttttggagggtttttaaagggggaaaagatggtctttttttttttttccttttttccaataatgaaagttattaactttacggggtttatttttttatgttatggatgatgaatatgtttagatctcattcaccatgttctagatcttggttgtttagcattttgattagacagttttgaatgttgttcaatttcatccctatttgggttcttttttgcttgcttttgtaaatgtttcatctttctagtccttttgagctttttttactttatggaatat

SEQ ID NO: 256580 - DNA, 224 bp, Gossypium hirsutum
ttattttaaaagaaccctaattatttaatgaaatatatgcattatgaatgttgaagtactaagagaagggatcattgctacaagaaatcattagttggtttcttgcaagccttgttgttatgccaactcatagataaaggatttgttatgttttcaagaatatttacttcgtgaattttcaatctcatgtaaatttaaatcaattaatgtttatatgctttcat

SEQ ID NO: 256581 - DNA, 505 bp, Gossypium hirsutum
tcgtttgatagaagacgaccgcagaaagtgaagtccagggttccagagaaacttcttatctctagtggaagccaagaaaaagagggtagtgaagtaaaagccaaaatgggggaaaaccagagaagcaaaaatgacaatggtggacaagaagtgggtcgtagtggcaaaaataagatgtcaaaagagagtaagaaatcttctgtgcaggagcaaagttcaaatgtttctaccccccgacctgatggcaacaatgaagagagagaatcaaataaaggtggtagagatcctaaggaggttgccacttctcagaatttatttctgaaacggaaacagcaacgggaagctgttgatgctattcttttctctggtctaattccttcaaaaaagtccgaacaatcatccaaaaagttgcaccaagaaaggtcaattgtcccaccttcagttgcaagcggcagcttcaaaccaccaaagaaaaggaaaggtccaccaaattcctaaaacaagg

SEQ ID NO: 256582 - DNA, 468 bp, Gossypium hirsutum
tcgttcacgcgtccggccgacaacgtttccggcaactctaagtttgactgatttatcagtaacagaaaataataactcgacggagaatcgcatatcaaggccgccgagccccaaagtaaacacctcttcttatcttatccgtccaataccggttcttcccgttcctccatcatcgaaaatggctgatcttaatttaaaccagaaagccgaagaagaccgtttacctctatcgctaaaactctcgacaccatccgccgatgagcaatcaacagcagcggcacactcgtctactctcgtcgtcatgtcaaatggggataacaatagcatcatcagcgttgcttgaaaattagatgaagtaaataattaggtgaaaaaattattggactatttggtaattaggtgaaattccttgttttgtacagcataattattactgagattgcattagattgaaaaaaattattagac

SEQ ID NO: 256583 - DNA, 377 bp, Gossypium hirsutum
tcctttcgtccgcggacgcgtggggccgccgcaaccacctcgacggaccagaggtcctccccggctccggttcggcagcaggtttcttcctcgcaggacgaacgtgcatggtgaacgcaagggatcgctgaacgtgggtgattgcgacgtggggtgatggggtcgttgctgcagatggagaacgtgcggcacgccctagggcttctacttccattgctgctgaaaacatgttgcgggctagggttaattttgggccaattgggccaaatgtatttagtcgctgttttattttggtaggctaaatgctgggactgatgtagtgtgggctttaggtttagttgggcccgagcaaaatttaggtcttacagttggaattg

SEQ ID NO: 256584 - DNA, 459 bp, Gossypium hirsutum
tcttaacctttgaaactcttcatcattgaagtcgtagtgaggtctggtctatggaatcttccgtttgtcccttttgtcaccttagcgttccctcctcagaactccaatggcacgccaacagtcacttcgaggatgaggataaggaagctaatgacatggaattgggtaatcaaattcaaattgcctcttcttcaggctccactgacgttgttagcatttcttctttgattggtttacaaacaaggagcaatttttaccacgtcaaggatggtttgatttccttgctgagaaattgtctagaactagaagctcgacacaactcatctgtaaccatattgtctggccacgtggatcacttccaaagtcttccgtccgtcgatgttggttggggttgtggatggcgtaacattcaaatgctaagctctcatttgcttgctcacaggaaggaagctagaaaag

SEQ ID NO: 256585 - DNA, 356 bp, Gossypium hirsutum
ttgtaatactccattcaacagcccgaaagaaggtgtaatttccaagagcatggcaaattgtgtgatgatgagacatgtttctcttgcaatagtattcgggaagcagaatctcagattgtcaggggaacacttttaataccttgtcgaacagcaatgagaggtagctttcccctaaatggcacatatttccaagttaatgaggtattcgcagaccatgattctagtctgaacccgattgccgttccaagggaatggctatggaacctgccaaggagaatggtctactttgggacatccataccttcaatatttaaaggcttaacaacagagggaattcaacactgcttctggagagg

SEQ ID NO: 256586 - DNA, 434 bp, Gossypium hirsutum
tcgtcttagtatgtcttgtaagaccaaatttatgcccgggcctaaaattacaacccaaattccaaacccaaaaaaacaaggcccagatggtccaaaattaaaacaatttcagcaaaaaatcagaaacctagaaaccctagtgcgccgcatcttgctacccatgtgcctccagcgtactcgtcgcccgaggtctgccaccgccagccacctttgcaccaaaacggcaaatctttgcctctgttgaccgcagcatctgcaaaggaaagccgaaagaaatacctgcaaaagaagaaataacagcaaggcaaaaagaaaagagaaaaacgaaaaaatgtaaaacatttggttatataagccaccaacccagaatgtaaaaaggggggatttggattgaaaaaaaatattgaaatcaataaaatcaaaaatctttgaac

SEQ ID NO: 256587 - DNA, 412 bp, Gossypium hirsutum
gcatgcatctttgatctttgattagaacggattgcttggtgcatttaagttatccagcctttttaagctctggctcaattttgtccaaggattggctcttgtaatttccatagatccaaaatggaattaattctctgattgtcaggtttttgagcactctgatttttttgatgcataaagttggcaggtctgctcactggaatatgttgaatgctaacttcttcggaagatttctgagtttaaggtgctatttttcctgtttaaagtttagttcatcaatatctggttatgtccatgattgactccttaaaattcttatttgatctaggtgataataccttgattgcattatgcagactgcagagtgatatatttccttacacctttcttaaacattcttaaacagcttttg

SEQ ID NO: 256588 - DNA, 259 bp, Gossypium hirsutum
tttcggtggctgcagactttggtggctagggttgttgaaatgttttctttgtaatgggctagttgggctttagggtttctaggattctgggtctgaaatgggtttaggcttgggctggtttgggttttattgtttgggtcatttggattctgtgttgttgggcgacacatgttgtaaatggacttaaaatttggactttttatttggtgattcgggttttattttgctgtttttttttgcttgttggtctgggccaaaa

SEQ ID NO: 256589 - DNA, 302 bp, Gossypium hirsutum
tcgtacactacagtgccgattttgggaaagaatagagcttttctgttcttcccgaagctatcgctaatttcctcaagtcgagcactcagttcgtttatcaacacgttagagaagtcaactatgcatttaaaatttttacatagcttttcataccaaaagggttgcacacaatgttgttgagaccattgtatgaaggggcctctgcatgttataccgaattgaaatatttgaatctggattattgaatgatttttagcattagctcaggttgttatatttctatttcatttcaaatgttcaac

SEQ ID NO: 256590 - DNA, 363 bp, Gossypium hirsutum
gtcttgcgtccgctttttgctcccccctcccctgttcatttcgatcttcaaaagagaaaagaacccttcaaatttcgaagattctccatgtattcgaagattctcgtgatcctcgacaaactcgctgtgatcgcttatcaaaacagatctttgattcttgatctgtatcgttgctgagcctgtttcggaaaccttttctggtggtgaaagaggaaagatggactcgttgcaaggaccggagatttgcccagccgttcggagcaaacaatttggggtttacatgccaccggcgaacgggcctttcccgagggcaaaattgtatagaagtgatatatggggatatcgagggataactgatggaaa

SEQ ID NO: 256591 - DNA, 370 bp, Gossypium hirsutum
ttgttcacgcgtccgcggcataattcccccctccccccttctcttcgcctaataccagattcctgtattttcttccattttctttcaatccatccaaaaccctgctctccttgccgaaatggcgacgactctgatagcttcctctcaaacaagcttccaccacccactctctgtctctgactcatcattttcaagtccttcatcctcttcttcatcggtctctatgttcactctcacaaaacctcgaatcctttcattaccttcttacaaatccagtttcttcaacccaattgggagctatttcaagtgcattgagatggaaccaagaaaaatcaggagctcttcactagcggttcgaatgtcatgggac

SEQ ID NO: 256592 - DNA, 309 bp, Gossypium hirsutum
tcgttcatcctctcaggaatttttatacaaaccatcatcatcacccccttggaactaaccagtgaatctggaggagcaatgttgactcgagttgatgcacatcctaatttgttgcatgtaatctcatttcttatcttttactctctttttttccctttggattgagaaggtgatcggagttgtaatcagaatgttctaaattttttatgggacattgtaaagaaaaccagttacattgtggatagcatatggagcttacgaggtatgcatgcatgtatgtatctgaacgaatatctttgaagataaaac

SEQ ID NO: 256593 - DNA, 454 bp, Gossypium hirsutum
tttcttgcgtccgtatgcatatggctcattagggaacaactttcattgataaaacctgcaactaaattccctacaaagaaagctaatctgcctgcaactgccatcgccaactttgccatttggaggagttcaaatactagtataccccagctggctgattcgacctatttatgtggaatgccatgccacgccattcgatccctttggtcgtgtgtactataatcgttctagtctgtccaaattgctttcttacaggggaatctggggggttagttttataatcttttttttttcttctttttttatcattttcctctattcttcttgctatgttttctcagtagaacattgacccctcccacttttcgtagaatgggcattttaattaaagatggaacaataagcaggctttagagaagaaaactgaatcaattcatttttagtcaataatatg

SEQ ID NO: 256594 - DNA, 468 bp, Gossypium hirsutum
tcgttgaaaaactgatactagatgaaatctgtatcgattcagctttttttttgcactgaaaactgagtaaattgaaaaaaagttgaaccctgttttttagagaagtggtggatgatgtctaatgagaggcacgcttcttccaatcctacatctcctcaagaaaatgatgctatgttccttgatatacttcatgaagctccattatttggtcaccggaaaccaaggagtatagttgggggtgttttttattgtttcatactggcgggttacgcaatcttggctgcagcagctccttggatatttcagcctcttgggcatttagtcttaccattgctttgcagttgtgatgttgttcttttaatagtcacaggcatttttcagcaataccatgtttatcaagtccagaagatacgtttacaaggttactatagtttcagtcagaagttgaagcatattgttcgtctacca

SEQ ID NO: 256595 - DNA, 340 bp, Gossypium hirsutum
ttcgtgtggggtcccctccgctaatgggtgaggggtagtttacttcacgacagttcatactcactaccggaggattagcacaatcatacatcgcatttacgggtgaaggctacatgaaaagagtccaagatactgcaaagtcttggaaggaaattcacctaatggagttagctgtctacgccgataccatcactcaagattatcacatatggagaaaaccaccagtgaatagtcaacaagtctcatcgacgagttacacttttcggaatcctttctcagaataaatgccatccgagccgggagtagtgagacatgaattccaacatgacaaggccaagct

SEQ ID NO: 256596 - DNA, 477 bp, Gossypium hirsutum
tcgttataaagtcattttcacaatggacccttcatgggatcgatatgaagattttagcagccattgctggtttcacagttttagctctcagtttgaagagatattcaaagagatcttagaaggaaaaaaaaactgcacacaaaatgcttccagcaagttaataaatgtgaagaaatagggtttcatttccaccatattgatattcattaccagagagattgaatggattcaacaacttcgtgtaatttttttgtgtcgggatcgtatttgtagtttcgatatttttccagtaatttgtattgtgtaattcttttaagacattagcgtattcatatcgtgtttgtattattctttcgtgtggggtttaatagtcaggtttagccaaaaccatgaatttcatactcattgtttgtagtaattctttcatactgcaatatcatactgataaattttaaaataaaataatgaagcatatat

SEQ ID NO: 256597 - DNA, 256 bp, Gossypium hirsutum
cagtcaggcaaccatctatagaatgaacaacggattaagtgcataccatccaatcagctttgttgcaaaagggggaagtaggaattaccttatggtaccatcgcagagcgtcagatatgaatcttacagcgtatatttcaatatgcaaccataggtgtaatcaggttcaggagcagatgcggcaatgttgattataattataggcttttaacctggtactggtcttaccagacagagtatgctgttggctgggatt

SEQ ID NO: 256598 - DNA, 403 bp, Gossypium hirsutum
tccacgcgtccggaagtcatcatgtgtttatcgtactgtatgcatagatgttaaaattttttaagaggaaggaaaccttctgattttgggttgtgctttaccaattcttgcatgcatgataggttttgagagattgatgatttgatatgtatagttatctttcttttagctcaagaagctaacgagggtcccaacgataaaggcaaatgatttgctatgtagatttgtactagagtttctagtgagtttattattacttccatgtgttgtaaagtccatttttatataaattatgtaaggtaagtaatcttcctcagtaatgtatgaatggtgtatgtgtgggtaatggtcgtccagtgtaatcagcctgagttctgtctttttgtgttcaatctgtccgtgt

SEQ ID NO: 256599 - DNA, 152 bp, Gossypium hirsutum
ttcattgcgtccgcccacgcggccggaggggatgggggggaatgccaggaaaagaggattctacgctagacagtattagtgaacaacagcaatccaagaccaacaagaagcatgcaagtattattagtagtgcatcatcaaaagcctcgact

SEQ ID NO: 256600 - DNA, 219 bp, Gossypium hirsutum
  unsure (1)..(219): unsure at all n locations
ggccgcccttttttttttttttatataacacgaatattattaatatgnaaaaatttatatcataaacacgattactacaaagcaaaatacacgaataggaatatatgaaatttcaggtctatcgtacatactcacagatcataggaaataaagaaaataaagttcatatgagagaaaaccaggaattattcaaaaacactacaatcacttcctaaacaa

SEQ ID NO: 256601 - DNA, 261 bp, Gossypium hirsutum
ttctactctatgcagctttttttttagtgaatttaggcaggaagatggaaaaccatttgttttccaccctaaccaacttcctttttctgtgatgagcaataagagaaaataatgatatcataattcaactgtaaattttaatttgtttgaacaaatttgatttgctcattccaactattgtaattttcttattcttatgcgtcatttttagaaataaatgccaggtaaccttttctctcaaaagaaaaaaaaaaaaataaa

SEQ ID NO: 256602 - DNA, 231 bp, Gossypium hirsutum
tgtagttccgtggagtaaagaagaccaaggccagtgaagcagcaaagaagaagtgagctaaaagggatgaaagaaaaggtgaaatctatgtctatcttagggtcagtctttttcaacagcttttgtttactagcctcgcctcaagtgtttaggtgtccttgaacctgatttaccattttgttttcgaaagtggattttgatgttgtattatctgattgctctaatttgagt

SEQ ID NO: 256603 - DNA, 203 bp, Gossypium hirsutum
tcgtttacgtaccaatcccaaccggttgaaggttcgatgtaaatttaaccttggcgttttataacatcatattgctaagaaacttaagtgatgtttattgcgttgtgtgattaaatgctgcatcatggcatggcataatgctacaatttcattttcctcacgtcctttatctttatgagtgaatagcagtcgcttgtttatat

SEQ ID NO: 256604 - DNA, 204 bp, Gossypium hirsutum
ttcaatcctctcacagaccctagcctttggcattattcacttcgggagataccatggcaccaaaaaaagacaaagcccctccttcttcatacaagcctgtacagtctgcaggtggcaagcagacgaagacgaagtgctgcaagggaaagcaaaaggataaggcgaataacatggagctgatagatcaggctacctatgacaagc

SEQ ID NO: 256605 - DNA, 381 bp, Gossypium hirsutum
ttgtttcacgcgtccgcccaatcaagagggaggagcatcatgataatcgggaccctcttaaacagtaaacctttgatttttacattatttactttacttttattttattatttttatatgtttttaaatctgttttttcgtggaattatcaaagttgtgcaagtagtaaatttattaaggtttttcgggaatatgatttagaatttggactggacatagtgtgctaattggaattgagagttagtggtaaaaatgcaatttttatcattgacaaattgaggttttgttattcttaccgcgttgaagctattggattctcaaaaggaatttgggtgggttagaaggattcgattcagattaaaattatccaaaatcacctac

SEQ ID NO: 256606 - DNA, 371 bp, Gossypium hirsutum
tctgtcacgcgtccgcccacgcgtccgcccacgcgtccggttcactaaacgattccgaggattcagcttgaaagaacgaatgggaatgggattaatagtatcttgtgtggcaacgtcggtggggagcaagcggccagccaccgcaacaaggtttggctcatcaatctcatgtatgcttaaatttgtagctattagtctctgtattctgctaaagttcagaattttttctactattccggttctgttaaactcagttaagttttgttattttcgaaaattgatatcctaaaattattatcgcgttgaaatatataaggatttggaattttaaaaaaaaatacaaaaaaaaaaaaacaaaataaaaaataatg

SEQ ID NO: 256607 - DNA, 190 bp, Gossypium hirsutum
ctccatcagtataaggattcaggatcgaaagactcgtgaataatactgcgaacgctatgacttgtcatcgaagttttgatcagatgtggttggtttgtaagttaacctaattcacattcttctcttaaaatataaaaaaaaaacattacaatgtccgattcgcttcaccataaccaacaacgtaaacggg

SEQ ID NO: 256608 - DNA, 253 bp, Gossypium hirsutum
ttttagctattccatcctcctgttccgattttgcttttcccattgtctaatttttgccctcagttttatcttctgcttctgtaactttttttctaaccatctttacgtttccctttttttccattgattgcacaggagacctagatatttcaggactggagtaccacctgttcagaggaggctaagaatggaggctctgcagcaaagccacgccagcaccagccgcaacagcaacaagaagggaatgtcgtta

SEQ ID NO: 256609 - DNA, 177 bp, Gossypium hirsutum
  unsure (1)..(177): unsure at all n locations
tgttctctcgtccgctattttacctggatttgaaagtgagggataaaaatgttgttcaggtaatagagatgcagtgggcattgttttgatccttatttccaacttgtaaaaattccccaaatgttggcatctaaattctatttatttaaatgaaattcaccaaatttctcattgcnc

SEQ ID NO: 256610 - DNA, 311 bp, Gossypium hirsutum
tttgttatcagagatggtgtcagctataaaggtgttaggagatgggttcgtaaggatggagcagatgaagatggaaatggcgagggagatagagacgatgaggatggagatggagatgaagaggaccgaggtgatattggagtcacagcagagaattgttgaagctttcgctaaggcagtttcagagaggaagaagaagcccaaaagaatgcccttacctcagtcctaatggattttccttactgcaatgtgtccaatccttttgactacggatttgcaagtgtaagttggtggaatgttagggggtttac

SEQ ID NO: 256611 - DNA, 222 bp, Gossypium hirsutum
tgtactgttcagggccataagaccgaatagtgttggaagtatggtggaaaaggggtgaagtttgtaggagaagatgggttcgttttggtgttcatgaaatcccaaaaatgtctctcttccatgttttaaagtgagagaagggtgggtcctctctttctttaagtgcgcctcttgctattatgccttattacttataggtggcgacatggtatatggaggatg

SEQ ID NO: 256612 - DNA, 296 bp, Gossypium hirsutum
tttcttccacgcgtccggtacttgtcgacctctcattttgcagatggttcattaccgttctgcacttgagcctcgttgtcgctttcaggtcttgacagaaacagatcattgctattgtgttcttgttaatgcgcttgatggggaagcttttcctagtgaaaaggatacaaatgatagcagttccagtaacaaagtaccattgagagtagatactaattccatgaagacgaaaaatagtaagctcacacttttttctggatttgtcagctatcaaatggtccgggatgcatatgatg

SEQ ID NO: 256613 - DNA, 329 bp, Gossypium hirsutum
ttcctctcgtccgcaaatctgcaatgactgaaaaatgaagacgatagactaattaggtcaacactttcctgctggattgctgcatagtttttctgtcggtttgtatgcactgctcggtgagtataccgatcttgtgttagaacacaaaatatgtttgcgcatccagttgtatcttaatgccttcaatgactaatatctatttttgttttctatcagatgtattatataaggataaatagtatatatcagacatgggaatgcatatatttggggcttatgttttaatctgttgaaaacccagaaataaaagaatgttgagctttccattg

SEQ ID NO: 256614 - DNA, 317 bp, Gossypium hirsutum
tttgcaaaattggttataactacatatgagggaaaacatgaccatgatttgcctccaactaggactgttacttataatataactggcttaaatgttgattcacaagctcataacagtgaatcaggcaccaaggtagaagaaagggagaccattaattctagttctggagccgagaataaaccgagcgagcaatcgaatggcgagtcaagaactaagttagaagtaagtggtactgttcatgtttgcacagttgatgcacctactttgggtcctgaaagtgggtcaaatgagcagcggagtggaaagttagatcacaa

SEQ ID NO: 256615 - DNA, 350 bp, Gossypium hirsutum
tgagacacagaccctgcgatcttttgagattgaattttgaaagataaagaagaagaaaagaaaaaagcaaattagcaatgtcggcctttctcaagcttgaagattcacctatgtttcaaaagcagatatggtctttggagcacatggctgatgatttgaaaaatcgctgtcaaatactgtataaaggaagcaaaaggtttatggcagcccttggagaagcatataatggagacaatagctttgctgattctttagaagcatttggtggtgcgaaggatgatccttatagtttatctataggaggtttccaagggccgatcatgtccaagttcatcaaagcttttcgtgag

SEQ ID NO: 256616 - DNA, 362 bp, Gossypium hirsutum
  unsure (1)..(362): unsure at all n locations
tcctctcgtccggctggttccgtgttttacgtcctttaccgccctaatcgaccttcgtttacccttgcttccctccgtatccaccgcttgaacttaacaaccaccgncgattcctcttcctcccatctgtcaacccttttcaacttaaccatttcctccaaaaaccccaactcccacctttccttctcttacgaccctttcgtcgtttcatgcgtgtcgagcaacagtgatgtttttataggcaacgggacattacccgctttcgtgagtaacagcaaaaacgagacaactttcaaaggggtggcggtaacgacatcaattgatctagatgcagagacggtcaacaatttgagaccggattt

SEQ ID NO: 256617 - DNA, 399 bp, Gossypium hirsutum
tttctctcgtccgcccacgcgtccgcttgaccaacacatcaaaactacaaatataatcgctggatagtgtgataaatctctgacgagctttcaaactggtagagcttccgataatttgtaaagtaaaggaaagtaattatgtaagcaatgaatgctcagtaagctcgtataaaatttaaacataatatctcattttaataatgaaactttatagggtaaatataaacctagaccaatgccacaagatttattaaactatgtaaccatcaactcacatttgagtaagtccatcaatattatatatatatttctttcctatcataatatgattttataagacatattacacaatcattaaccatttcatgggaccatgaaccattccatttacttacttat

SEQ ID NO: 256618 - DNA, 364 bp, Gossypium hirsutum
tttcttatctcaaaagaaaatttcaggcaatttcagaacgccaaccctagatcttttcttcgcacttcaaaaggttcagtgtttgcttccaatttgtttactgtatctctgatttgattatatttccctcactggctactcatttttatgcttcatttaatttgtttgatgtttacgttttgcaaagtggagagtccaaagcttgtcatgcgacgtcattaatttgttttacattgcattcgagaaatggaagaggcggggcgaggggatttgaagtataggaataacattgctgactatagtcttcatcaaggattgtgatggaagctcgggcgatatgcttgtttttcttcccttttttctg

SEQ ID NO: 256619 - DNA, 362 bp, Gossypium hirsutum
tctcacgcgtccgagatccccgtatccgtcggctccgtcgtgctggtccggaaaatctcggcgccgtcgagccagatggcggcgatacgatcgtactgatcgcctgaggagtcagcgcggaaatcgaggacgacgcgcggccagggcggagaacaatcggaaggtggagagtaaggggcggagaaaggaggggagtcgattgtgttggcgaatgaatgattgatgacggtgagggaacatgacggagtcagatgatcggacggtagaggattggtcaactcgaagaattcttgagattggggttttgggtcccaagatttcagccgaaagggtttatggaagcgatcaggtgcggcggcggc

SEQ ID NO: 256620 - DNA, 341 bp, Gossypium hirsutum
agcgtatcccttggcatgagaaattggaaggagaggaggcaattcagaaccatgtgcatgagctaatcacaattggaaacttggaaggtgctgtcagtttattgctttctacttctccagagagtccttacttctacccaaatgctctacgtgctgttgctctttcttctgcagtgtcaagatctcttcttgagctggcagttaaggtcgttgctgcaaacatggtcagaactgatcggtcactatctggcactcatctgctctgtgctgttgggaggtatcaggaagcttgttcacagctgcaagatgctggatactggactgatgctgctactttagct

SEQ ID NO: 256621 - DNA, 310 bp, Gossypium hirsutum
  unsure (1)..(310): unsure at all n locations
ttccacgcgtccgaaaaaatagntatttatgaatttttttctttttctggatttcttttcctttctctgttggagatgaatggagaaggaaaagaaagtaaggaagtgaaaatggacgaagcagctaacaaggagcgcgtggctttcatgtggggatatttgcctggcgcgttacctcaacggacgccgcttttgtcgccggtgaatgtacggattccggcttccgcaggttgttcttggaccgacgtctgcggtggtggctgcggatccgccatggccatttctgattcagggaagctcatcacatggg

SEQ ID NO: 256622 - DNA, 325 bp, Gossypium hirsutum
tcctctcgtccgaattttgttgtcaatggatgatgtgcaaggtttctttcttagaatatcaaatgattcaagctttgatagtaatgttgctggtgttttggttgaatcaagggttgaaatccaacataagctaaaaggattctctcctgctcgaaagtttccacaagctgaatttgcaccctatcataacactaattatgagtggaacccaattggatctggaatcatgtggaaatcgtataattttcctgtgtttttactttctgaaagtagcacatcaaccttgcaagagattgcaatgaagaatgagaaaacagagcaagct

SEQ ID NO: 256623 - DNA, 319 bp, Gossypium hirsutum
tggacgcgtgggcggacgcgtgggttttgttctcctttttttttaatcttcgtaaccccgttttacaaattggttctggcttttatagtcatattacatggttcactactgtttcttttatttcttgccctgtttctgttgctttttgtgtccctttttgcaggtgctggcggtcaaagatggaggcttgctgttttggtgtgaacggcggtagctagggtgtcaagtggcacggcggtggcagtgactagagtgtcaaaaattattgaaggtttttttttaaatatgttaaggaaaaataagatgataactgctatat

SEQ ID NO: 256624 - DNA, 416 bp, Gossypium hirsutum
ttcttcgcgtccgtgaaacgtagtgaccggtcctggactcgaataggaaagctaccaatatggaaagaaaaagcgtacgtgtatgcctagatgatatgaggccactcatcggacatgtacaggagaatggtcacccccatatattaatgatgccatgcatgtttgccgtgctgctagcaggaagctggtgccttgatgaggacatgcttgaaggaagccgcgtctgcctcacaagagtagaaaccaaagaagatgtatatttctaattttgttttcattataaagtctttctttcttttttcgttttgaccgttcctttttcacgagaattttgtaactgagtttattttcccccatttcagatattattcatcttttattccaagttgagaaaaaaaaatctatcgcatgagctg

SEQ ID NO: 256625 - DNA, 364 bp, Gossypium hirsutum
ttttttttttttttttttgaaaaaaagctgtgtttagccacctgaataaacgaaacgaaatgaatcccatagaaaagaaaggaacctcagtcataaacacaaatatatacataaatataaagtgtatgtatatgatatgcaataagcatccttcaactctttagagttattcctccaaccagccacccaccctacacatagtagatttcttccacaactgtgttctcaatagtatgcttttcgaggattgttcaggggattgggtctgtatcgatagccaagcatcatacgcttctgttttgtcctcctcccctgttttcgcattctatggctagtggaatggtttctataatatgagaacaag

SEQ ID NO: 256626 - DNA, 470 bp, Gossypium hirsutum
cccacgcgtccgcgtcgtaatccagcggaacgtttaacatttcaagagttctttaatcacccatttctctctcagggccaaccaaatgaaccattgaggagtcagggaattttaggaaatggttatccattttttgaaagcagacctggaagtactgatgaaagctttcaggaggattgtcttcccttctttctggatgatgattctagtggtcctgaagggagcccttcctttgaaaagaagaggtcctcaatgaaatctggttatggattttctcccaatgcaaaagatactagagaacaaacttctaatcctttgaataaagtcaaatttacatccaaatacagtggtacaagacataaattagatgattccagttttagacatgaaagcagcaaggtttctggtgaaactctgtatgaacctcacaaatccatggatcaaagatctacaagtactcattcaagagt

SEQ ID NO: 256627 - DNA, 335 bp, Gossypium hirsutum
ttttgttctgccttttctgcagtcaagacccaaattcgtcgccgccgccgccatcaccgccattttgtttttccttagatcgattttctgagtttgcacgtctttcttccgttctccccttcttttagcgtcaatagacattgggcgccgcaaccgccattggacaagacagtctgtgggcgcctgcctccccctttccgtccttcattctccacctctctctccattaaatagcccaaaatcaaggggtttggtagatttcatttaccaatctgatctgttgcaggtgttgtcttttgcttaactatggaggacgaaaggataaaggtattatc

SEQ ID NO: 256628 - DNA, 349 bp, Gossypium hirsutum
ttatcatcaaaatgttgtgtatgaatttggtggagatacgacctaccagagctcgggagagaagcgttagtatcgtacaataacaaccatggaaaatgtgtgcacttattttataactctaaaatatggagttatttctagcactttttaccatgtaaactacgtaaattctgggttgttgatgacacgttttggtagtttttatctgtaatataaatttaatattatgaaaaaaaaaaaaaaaaaaaaaaaaaaaaaaaaaaaaaaaaaaaaaaaaaaaaaaaaaaaaaaaaaaaaaaaaaaaaaaaaaaaaaaaaaaaagggggggccgttttaaaggacccaagtt

SEQ ID NO: 256629 - DNA, 419 bp, Gossypium hirsutum
ttcttcacaagtgcttgatactgctgaaccctcaggtgttctgaatctggatatatcggtggtgttagaaagtgagaatgagaacacaagcaagaattgttctactgatacatcagaggatcatgttaatttggaaattgttgctgatcttggtcatgaagcaaaggtagtcgatagcagtatggctgaattcttggaaacatcccaaaatcatttaacaacaacacctaatggtgatggtcaaccgtctactgaagttgcagctcgtgaaacagatgattgtggtgacaaggaacttcttagcaacaaggaaccttttacaactaattctgaaagtgttgaagatggaagatgtgatagtaaggaaattcatgaatcggtgactaatgatcaaaatggtgctgttgatatggaaattg

SEQ ID NO: 256630 - DNA, 328 bp, Gossypium hirsutum
  unsure (1)..(328): unsure at all n locations
attttaatatctcccttcttttttctcgtttactctctctttttggttcttaaatttcgtttcttttttcctttgttcttgttatttgttcctttaaccacctttttttgtcaacaagttaatgtttttagatataggatcatatcagaattttacttatgattgttgggttcttgtatttaccttggatgttatcgntttttttttactgtgatcttttatgttagttcagattttctttttcactatgtaaatgctttctttggtatgacttgttgttttagttgctttcctgtttctgaatcagctttgaatggtgacttatatc

SEQ ID NO: 256631 - DNA, 301 bp, Gossypium hirsutum
gagtatttttgtgataccggatcaggtactcgtgtttgcagcggtttgtattcttgcaaaggggtaactggaattgggttgccacaaaatgcacctacatctacctgttgtgtttatgactccttgatgggaataggatcaggctattctttggatcttccaaaacttcagtgctcatcgtacacatcgatatacgagtttggagatgaagaggatcccatgaaatggaaatttgggatttctttgctgtataatgattcatactacactcctgcatgcaaggactgtgaaaccaatggag

SEQ ID NO: 256632 - DNA, 387 bp, Gossypium hirsutum
tgctatctctagctttgtcaaaaactgaagaggatgcagaacatgaaatagaggaaaatggaggaattcaagaagctatttcatggtataatcgggttcttagttttcagattgaaggtggtcatggggtgaagtttactttcaatgatattaacataaaaaatccaaaggaagaatattcttttaccattcgtcatgcaaatgatgcctactccttattggattgcaacccaaacttgaatggcattaaagacttgattaatgagttgaacagaacaaatgacttatttggctttgctagaaccatcagagaaaagtttcaagaagcagcagcacttggattgcagccccagtccacaacttttcatcaggactgttccacaatct

SEQ ID NO: 256633 - DNA, 189 bp, Gossypium hirsutum
gtactgtccaccgtgtgagagtgtctgtagcacatgtaatgtaagtggtgatatcattgtcatcatatgttctttcccaaattatgatttggatataatgttagaaattttaagttgtaaacgtttgtttatagttgaatttattgaagttggaacttatttgtaaaaatgttagaaacgtttgtttct

SEQ ID NO: 256634 - DNA, 107 bp, Gossypium hirsutum
atattctggcgctcgcacttgctcgttcctatgtcagcgaagctctaccatcgacgacaatggttgccgccaagaagaccaagaagactcatgagagcattaacaac

SEQ ID NO: 256635 - DNA, 359 bp, Gossypium hirsutum
ccctcttgtccgcttgatttgagagcagaaatagaatctagggagaaggctggccgagaggctcatgaggctaagttgagaatggcagcaatggttcaggcagagcaagctcgagctgaatcacaagctcatgctgaactaatggctcgaggacctataagggcaaacgctcttgggtctcaaggaaacaaccttgcaattggtcatgacattcgggagcagcctcagggtgtaaaccctgatgagatgatgaatggatggggtagcagtgcacagagggatgaaaaggaaccatctgaagatttcttgaacgatgaggagactgaaaatggagatacaagtgtgcagaatgactggcg

SEQ ID NO: 256636 - DNA, 300 bp, Gossypium hirsutum
gcagagtaggatgacgatgtgcaggttcttcactcatgcggtccttctgtcctgatagctgatgacgacgagggcgaggatgttaaagacgatgatgacgacgatgaaggcgaatgcgactgcgacggcgatgacgacgacgacgaccatgatgacagtgatgacgatgaagaaggtgaagaagaggaggatatgggaacagaataccttgtgcggcctgtagtaccagctgaagatgaagaagacgctagtgattttgaaccagaagaaaatggtgaagaggaagaagaagaagatgat

SEQ ID NO: 256637 - DNA, 280 bp, Gossypium hirsutum
tgttattttcgtctctgctggatccgagtgcaagagtccaccattcccgtctattaaaagctttaacagtcttgtacgacagtgaactagttgtatgatcgcggttttcaattttcataaataaaatccgtatgattcaacatatggatatcgagttgatatatatatacacctaatagctgtatagggaccaactcttgaatatatgaagcataatcgaccgaataaactcaaaacatgtatatatatttgaatatatctacttaaattttacttggtg

SEQ ID NO: 256638 - DNA, 381 bp, Gossypium hirsutum
ccttcgtgtccgggtttatctggtggtagtggaggtggtgccaatggtggatctgggggtgccggattaggtgcctcggctgatccagccacagaccatttgtttgcaagctcacctgttccaccacactttcttcatccaggtaggggtaattcagagcatttcttaccattcgtgccagtgccagcactgcagcatcaccatcatcaccagcaacagcagatagtggcggctgcagtaggacatccccatttgcagtctcagtatcataggccacaaatggggcactatgggtcatctccgaatagccaatttgagcatcccttcttaggcaggcagacgcagcaaccaatgcataggatcggagggacacccatgcat

SEQ ID NO: 256639 - DNA, 333 bp, Gossypium hirsutum
tcttttgtgtgtgtgtgttattttcacagcaattttctcttattttctttgaatgaaggatctatctgaacttattaaatctctgcaaatgtgaataaactatattctctctctgatccaatcatttttctcatcttttttttggtaaaaatcgtgttataaaagcttctttgattcgctcctttattacttgcataaaaaggacgttgacgcaggttgacgtgaatgtaactaagaaacgtgagcttccggcgggattggatcgggttttttagtgtctcttcgatctctagtgaagcgagagaaatgaaggcgtcagggcttggttgggct

SEQ ID NO: 256640 - DNA, 369 bp, Gossypium hirsutum
gttgcttttgcgaatcagggcgatccttctcgcacatgcttgtacgctataatgccttagcaaatgccagacatgcggaactagagtcctcggacggcttcactaattatgatggtatatgtgaagggaagtgcatagcccggctatacaaatacttaagaatgaaaacctgcttgctccattcgtaatgcacacgatgacttatatctgtggactctagctagcatctgagagcattcatgtcatgagacttttggagtaagcatgtcgatcatgattcaatgacaggccacgtaacctaaatatatgaagtattgctgctcatacactatttaaataaatgacctgtcactgtcttggggtgctacc

SEQ ID NO: 256641 - DNA, 213 bp, Gossypium hirsutum
ttttgatcagacacatggcttctgttaactgagtgattttggtgtaccagtcattacatcatgtaatttttagcctctttcttgaagcttttgggaaactgaagagattttcttggaaataatagaattgcacgggacataaatcagtgaacccgtatgcatcttttgaaacagtttttattttgtttaaattggatttttattttgattgtt

SEQ ID NO: 256642 - DNA, 476 bp, Gossypium hirsutum
tatttatttatttatttatttaagtttttgttttttctttttctttttgaatctggttctttttctttcaaagtggatcaactgaattttgatccagtttcttcatctaggtccttttttattttcaatccaaattcagtccctttttttttcaatcttggttaactttggcagtttcaagtaaaaccagatatgggtggttgcctcacaaaaaacaaagatccaatgccccaacataatggctatagatcaggagcaacaactacagctgctgttcatcaacaaagataccaggaccctgttaggcctgcaccaattcaaccccaggtctaccacatccctcaaaagccagggactcaaacaccatggaagcctgctgttccagcaccaagtcccaagcctgcccctaatattgacacaatcctaggcaaaccatttgaagacataaggatgcattacacaattggtaaagaact

SEQ ID NO: 256643 - DNA, 277 bp, Gossypium hirsutum
cttaggatgaagaaaagattatatataaaagcacgtccataattgtaacgtaaatcctggagtcaactccaggattgaatttattatactacaatcattgtgtcacagggattgttattgggaattggtgctaaaaacaaattacattactatattattggagaattatacatggaggaatgctactatatgtatttaatcaaggagaagatttcgatgggggcacacctgggaaggggggtacaggaaggaaagggattgtggggaagtggaaatg

SEQ ID NO: 256644 - DNA, 151 bp, Gossypium hirsutum
tattcatgtttcttccccaaattctacacggtgagttgttgtgaaactagctgctttgaaatggtgaaaaagctttgtcaattgaaaactagagttcagcgtatcaaccttgattcttttttcccaattggaatgaatttgtttttgacat

SEQ ID NO: 256645 - DNA, 363 bp, Gossypium hirsutum
  unsure (1)..(363): unsure at all n locations
tttttctctactctttacgttcctctcttattttatatatccatacaagcattagtcgttttcttcaacctaaatatcctacaataaatctatgtcttaacttgtttagacccaaatccaattcaaacccttccaagatttgcttccttcttaacctacttagctagccattggtttatataaatacacacaccggcagaaaaacactcattcgtgtgaaaagttaacacaaaatgggggtnggaaggcaccttggagtacatctccgatttgcttagcagcatgaagaagaaaaagaagaagaagcaaactcaaactgtagctctcaaaatcaggatggattgtgaaggttgtgcccgtaag

SEQ ID NO: 256646 - DNA, 201 bp, Gossypium hirsutum
aatacattaatatcccatttcaaagaaagtcacatagctttaagagataatgatgaatggccacaaaacagagccggcaccgccaccaccaccgccatctgcaacgccgaggcagctgacggaggccaaggtgatggcggaggagaatggtcggcaagttgaaccctgtgtaaggtccaagactggaggaaccttgacgaa

SEQ ID NO: 256647 - DNA, 422 bp, Gossypium hirsutum
tcgagtatgtatcaggtgccaggtggggttttgaaaaggaaggaacctgagggaggatgggatggatacaagcaatcttcatggcagtagcatccttagatgtcactgtttagtggcccattaaagcttttcttcaaggatgggcattggctaacccccagaggtcttctgtcctgtgtttgcttagaggatgggtggtaagtgagccatttgatgtttgttcatagtctccaaccccccaccttttcagcgtatcgactgtaccgtaaaagaatctgttcggggtgtattcaagctttgtttcttgaatttgttctggacacagatcattttccctttgtagatattataactgttggaaatcatgcccatatgttgcccagacattagaaattggtgcccatactgctttgtagtgcata

SEQ ID NO: 256648 - DNA, 366 bp, Gossypium hirsutum
tctattctacgttgaagcagaggccatactttcaactacgattttttcatccgccaaaaatattccaactcaagaaaaatggtaatatatgagttgaaaatggccaaccatgctgctgttatgtttttgttaaaatgcatggtaccatgatgattttgttgagtgcatacagcttgtatgcatgctgcagcatttgtgcatgtttcagcaacatattttctgttttagttgcaatgtaattaagtttggttgagaatgaactttgatgctgatgttttgatgggcctgattgagctgataagtcagcttatccatgtgtacaagcaatgtttatcaagttactaggctacttagtggtagtaggta

SEQ ID NO: 256649 - DNA, 269 bp, Gossypium hirsutum
ttgcctgcttcatttttggaaggaaattctggactctgcggccctggattgccaaatccttgctccgatgaacacccgaaacatcattcttctggtttgacaaccttgacatgtgccctcatatctatagcttttgccatggcaatggtgattgttgctgctggcgtgtttgtgtttcatagattttccaagaggaagtctcagccaggcgtttggagatcagtcttcttctaccctcttagactcaccgagcatgatttagtaatggg

SEQ ID NO: 256650 - DNA, 379 bp, Gossypium hirsutum
ccctacgcgtacgcccacgcgtccgcttgaaagggtctccaaattagagcaggtgattgaaggagatgagacaaatctgaataaggaagaagagaaagtgatatgcctacctcagctccgccccttagtgcttgatgagctaccaaacctcgtgagcttcagccctgtgggttatcattttgttttccaacctttgaggtgtttaaaagtaaaaggttgtcccaacataaccacaagatttagtgatgattcaaagcaattagtgcatgccaaaacacaggtacactatccttccaaacttaagtataagctctagaacaaatttcatccattgaattattttctttatgtattctcccaaactctatatttactaagc

SEQ ID NO: 256651 - DNA, 99 bp, Gossypium hirsutum
cctaataatagtagaaagcaggatagtgaaggatggcgaatgattagtcttggggtttagagaaagcagcagcactcacctgggtgagaagattgggtt

SEQ ID NO: 256652 - DNA, 332 bp, Gossypium hirsutum
tctgaatattgtccgttcacacctccactctggttggccatcattgaaaggagggaaaggttttaacatatacaaaaaaaaacactgtctctgtttctttgtttctcttgtaattgcctggaatacccagaactgcaccacctctaacattaaatccccttctttttctttgtcaatatcatcatttcattatagataaacagttaaaagcgcgaattgaatcattgatttaacagcaaaaagcacaggaaacgcccatgtctcggatctcctggaatcactttcctataatcacgttcttgagcttcgttctcgtcgtttttcttcatggg

SEQ ID NO: 256653 - DNA, 285 bp, Gossypium hirsutum
tttattatcagcccgcagtggaaccaggagttccagctggcggtcaaggacccacagcacgacctggtcaggttcagggtctttgatgcggacaccatcaaggacgacctgatcggtgaggcctcgtaccccctcttccagatcgccaacggccagccggtcgacacctggctctcgctgaaccccgacaaagccggcgcgatccacttccgcgcgcagctgaccggcccccagcagggcggcgcgcacggggctccccagggccagccccagccccagcccggc

SEQ ID NO: 256654 - DNA, 455 bp, Gossypium hirsutum
gaataatgcaaatgttcgagcacacctgcacttacaaaccaagtatttcattagcaaatcaacgaactttctaagcaagcaggtattattgcgtccacacgtcacggagagaattgcgtcagactcccttatacaatggtgaccacattaatttaactacgggccaacaaaaatgtgctactactattcttatttgatatatagaagggatataacacccaaaagaatgtaaaggtacatgcacatagaaattctgctcatttacaaatgcacatttttagacagggaacaacactcggaccaaagttgacctataataagcatttgaatgaagtcaactaccttacacaatcatcctgcgttaaatgatccaaaccccagatccaattactattcggtttgctgtttgcaaagtaaaacgagaaaaaaagttgagcctactataagacataccc

SEQ ID NO: 256655 - DNA, 327 bp, Gossypium hirsutum
tttctctcacgcgtccgctaatttttttcttattcattcattctttttcccccttgtgtcttttatttcttccttttttcctacgattttgcttctattttcctagacattatattattaacttgatcaccaaaaatcgtctctttttgttgtccattattgcccctttcctccacttgtggtggtgccggttaggtctcatttctcctattttcctttcccttttgtgtctatttttgttgctattttactgttgttttccaccctaaaatcgtcccttccgctgtccacaaatctccttttctgccgctcaagctagcctcattt

SEQ ID NO: 256656 - DNA, 304 bp, Gossypium hirsutum
gtccacgtgtgcgccactctctgtcacagatgctgcaagaagaaagtagcgaaggttatattactgactggggaaatgctgaaagtttgcctgcaatggtctaccaaaaagatgcacccaagggattgaagaagctgttaaagtttgctcggaagagtaagggggatgcaaatataactggttggtctagtccgtcagtcttttctgaaggagaggatgatgcagaagaatcaaaagtcaataataagagaaattctgataatctactgcgaaaggcagcccttcacacaaagaaccatgggca

SEQ ID NO: 256657 - DNA, 337 bp, Gossypium hirsutum
ttctctcttcttgccagattgtaatcctggtgacagggttatgtttaatattaggtgtctaaaataattgtttgaatttatttgctcatccactcttgccttatatattgaattaaccgctctttatttaaatacaaagaggataaaggaaaataaatggcacaattttgcataaaatacatgttctgaagattgataacatttgaagcaatagacaatgttattcctggtagaatcatagctacggttcaatttaatttgatttagtgtagcatagtgattaaaataattctattttcaacctgttcttattttttcactatgttatgattgagcg

SEQ ID NO: 256658 - DNA, 436 bp, Gossypium hirsutum
  unsure (1)..(436): unsure at all n locations
tcctttttcaactctgggtcttgtggggaggctatttttaatgacactttgcttacccggaagaccttgggaagttaatatcaaaagtttgaaggagataagaggtacctaatggagcgtacgctttggggacatctacccttgttagtaagagccaactccaaagaatcggtggaatatattcttcaaaccctttggagaacccggaagactggtctcgacgccgatgaccgtcgactcatctgccaaatgcttcagctccaaaacgagtccgaccttgacccggtaattatccactccctcactcaaatgctcatcgntgntagtaaagattatagtatttggtttttgctaaacattttgttgtacttcctattgccgttgttatttctgtaagatgctagcttttaacaatagtactactctttacaacaat

SEQ ID NO: 256659 - DNA, 409 bp, Gossypium hirsutum
cgtccttggcttcctcaacagcccctcagcctcaatcaccacatcctcctactagaacagtagtttctcaaggatcttctaattgttcctttgcttttcggatgattcaatccaatcatcaggcggaggtttcaatttgtagctacttatgtggtgcataatttgttcatagtcagtccatagaagaaactttgggaagtgttaaatggtctgagttgtaattgatgctatacttaataattacttagatttcacttaagtgtaaagtaaaaagagagaagaggaatatgttgggagtagagatgagaattgagagaatgagtgcaagcaggtagaagccgaaacaatgattgttagcactggagttatgtaattagaagttattgcaaggaataagattctctgtttc

SEQ ID NO: 256660 - DNA, 211 bp, Gossypium hirsutum
tccctttcagtatggtggagctctaacggatctttggagctttggggacttccctgccgtggctggtggtcatttctgagaacattttctcttactagtttttgtaaataaggcatgttagccggttttatcaattgtgttgatctctaacaacttttcatttttctggacaaattttcagtaatttaaacaaaaaaatacattgaataag

SEQ ID NO: 256661 - DNA, 149 bp, Gossypium hirsutum
tccgtctaactcattccgcgagtcagaggcggtgctagtgctagatacccggaccaggggcaggctgcattgacagaaaacaggagggggctcagtgaatgggctgtagagccgttgagagatgaacaatattacgagattagggaacc

SEQ ID NO: 256662 - DNA, 483 bp, Gossypium hirsutum
ttgaaaatcaagacaatgatgccagagaaaatcaagacaatatgaagctgtcacatgagaacatctctactgtccaagggcatgcagattttcagaccatccttacaagctctctagctgaagctgaccataaaatagaaagtaacccagagatgctcgagctagaaaacatcataaatatggaggtaatggtggaaaacatgaggaataacttggcgaaggctcgtgaactgaagaaattagaagaagagataaagaagaacaaaactaatattaggaaagacgaactgaaggtggagaagggagaagctgatttaaaagaaaacaaactgaaggtggagaagggcgaagctgagttaaaagaaaaccaagtgaagctggagaaggacaaagctgagttagaagaaaacctactgaagctgaaaacgatgcagaagaaaccacggcttgcctaatttgcttttctgaaatacattctcaatg

SEQ ID NO: 256663 - DNA, 446 bp, Gossypium hirsutum
tctcccttttacgccttggatcatccctttgttgttcgccatctcaacaatttagttgtgtttttggcgaactatgttcggatgtaagtttgtcaagtgtgaattgtacttgcgtgtatatctgttattgaccgcctccggatgtattaacatccaaagtgtgattattgcaactaaagatataatattgaggtgatgtaatcggagttgaagcttgaagaatatggaatatgtgaccaagaaaaaaaagttatattgttaatttgtttttgtgatatctttatgcctagctacttgttttagatcctccattaatatacttgttgtccttttttgtgatgagttttgctttggttatggactagaaatgtataggaagaaagatactctattatatatataaacatatatatttctacatgttttatcatatatagatgatgata

SEQ ID NO: 256664 - DNA, 391 bp, Gossypium hirsutum
tctccttccacgcgtccggattatgagaagttaagggatgctattaatcagctagtcgaggatgggaaaacttgcaaaatgctttttaaggaatgaagaggcagtcataaaggttggagcagctttccatggaataacgtacgtgctttgccagttttctgatgcttgcgacatcacacagtttttaaagaaccaaaaatgattgggaaagagaaggtagaagaagtagctattatatgtgcttcttggaaccgcgaaagcgttttggaataactttttgccaatgtagtctgacaggtgcctagggctttgtatcaatcccttgtagttcggcaataataaatgtatgaatgaatccagcattttttagcagttaaacctgctttcagct

SEQ ID NO: 256665 - DNA, 310 bp, Gossypium hirsutum
ttccatcctccttatctggaaagacaaggggaacagcctagggaaggtttcctgctgcttgtaaatcttcttgaggaccagatgggcggtactgttggttacgtggattggataatgcaaatacatcgacaagtccaacaaaatgcatgatatacgggagttcatcatcttacgtcataaaactcatctgtattgtccggtttcctctggagcttgtgtgttgaaccgatggaaccgatcggtctgaagatttgcaggaaagaattttttgttcattacgaaattcaataactaggaaaagagagaaaac

SEQ ID NO: 256666 - DNA, 270 bp, Gossypium hirsutum
tgccacctaggccttcttcaggttatgagctcaggtcctatagtgcttcctatgcacagtctcagatggctaacaacagggacttcaagttgaagaaagggaagagcacttctgcttcatcttcaaaatcatggagctttgctgaccctgagttccaacggaagaaaagggttgctagctacaagatgtacagcgttgaaggtaaggccaaagggtccttgaggagaagctttaggcggcttaaagtgaagtacacacaagtcgtttatg

SEQ ID NO: 256667 - DNA, 103 bp, Gossypium hirsutum
gagatcttgccacaactttcactggaagactacaacagatcaaggtcatatggtactgggatgatgcagttagatacctaccatggggtgccacctaggcctt

SEQ ID NO: 256668 - DNA, 333 bp, Gossypium hirsutum
ttactgcttccttagggtttcttcaacccccaaatggccgccgttcagccttatgccagagccccaatcacgacgaagccggcaacaactaggtgactccaacgaaaggtactgtgtgcggggaaggcgcgagattcgcggcggcgaggggcgcgatgtgcgggatcgacgggcgcaacgcgagggagcagttgcagcaccagctgctgcgacactgaggcaggggctgttagggtttctgaaattctgatgctctttgggctaaggtctaaaaattagttgttgggcctgctactggtttgggcccgtttattggtttgtgcctgggcatta

SEQ ID NO: 256669 - DNA, 407 bp, Gossypium hirsutum
tattatataactggaacagacccttaaactctctctccctcctccgttttctcatttcggctagggtttcaacacccatcatcgtcaccgccgtgaagccaccgtaggtggtggtcgtgcgaaagggagtttcgaccccagttttggagcgcccgaaggccgtattttcttggcccaataacacgaaaggagagacctccgctttccccctccgaaaatcgatttcaaagacggaatcggaactccgaaaactcgactccggggttctcgggtaagtccctcttttctcttttcttttatatttttttttttaaaaaatgattgaagaacagaaaataaaaataaagaaacgagaaaataaaaaatgagagaacgagactcaacctttttagtttgttctttttttg

SEQ ID NO: 256670 - DNA, 342 bp, Gossypium hirsutum
taacattttctcttcgttattctccaaatccctaaaataaccccccaaaaccctaaaacctaaaacaaggctataatcggaagcttgtttcattagatttggaggaataaaagaaaagagtagaaagggggaatggattcagatcaggggaagctgagtctggtgaaggagacgaaggggatgaggaggagtattgagggatgtaccgttatccgtttgctactgtgatgtattttcttgttgattttggatgtgtgtttttagggttgaatacctcggataatgtactagtttttggtattttctatgaataaagtgcacggtaaaattataagatcgaag

SEQ ID NO: 256671 - DNA, 318 bp, Gossypium hirsutum
  unsure (1)..(318): unsure at all n locations
taccttccacgcgtccgtgctccctcaaagcccctgatatagggatagtaagaaacattgattttgattctttgttcttcacatacttgatttgtagtaacacaaatagcttaggatcgatttgttattgtgccgagtagcatattcttgctcatagaaacattacaccgtcatatgtttctacattgtatagtcttgcttaccttattgaaaggaaatacgagtatgtaatgtaaattaagaaacataaaaacatactgctggactggactattctgcctttgttagtaccacanattatttttcacatgtcagatt

SEQ ID NO: 256672 - DNA, 321 bp, Gossypium hirsutum
ttggtattataaagagatttcttaaattaagtgcttgactttcattagctctcagtatctgaatcaggaaaaccattggtggtcctcgagaatcaaagggaaaactccaaagaatattgaagaatatgcaagctgaataagtggtgattcataagaatttcccatttgttttaaatatttcgtttctttagatagtaaagtttgtcatgtaaacaatcatgataaagtaaaaaaaaaaaaaagagcaggtactaaagcaagcactattcttgctactagtaagttgcatatgtgtaaatacatcagcaaaagcaagtgcac

SEQ ID NO: 256673 - DNA, 422 bp, Gossypium hirsutum
ttcttcccacgcgtccgcggacgcgtgggttcaccgggagtctctttttcagatggcaagcatgcaaatgctgctgagtttgcttcaggtgccagagcatttacggaagggcttgaagctcaagaaatatcttctgaggagaaagctcttatgacaaagctgactgaggagaaaaataaggcaattcaacaaagtaacaagcttcgccatgaactggatctgttcaagcgcgaaggcagcaaaagcggtggtggtgtgtcattcatgtttgtcatgttgatcggcttgctcggcataattatgggatatatcatgaagaagtggtaagcgaccctggtccttctgaatattttccctcaacttaccttcctctggacaagcatgatgaaggaaaaggaagaggaattagtagtcgttggact

SEQ ID NO: 256674 - DNA, 342 bp, Gossypium hirsutum
tcgttcgcgtgggttttttttttttttaagataaataaatagcatgtaataaaaagacaatttgttcatcaaaataaagagttaaagtcacgaatgagacgttatgatgatatgagactgctactcaaaacactactaaacaaaaccagaaccaaaacgctttcgaatacaaaagaacactaccacttaaaagcaaaataaataaaaatagaaagagatagggaaagggaaggggatgggaaaatgatggggaatttggtctcttcttgtttgaagatgaccaaatggtttgaaataaaagtgttttgagggatgtgtggaagaatatatagtatttgcctt

SEQ ID NO: 256675 - DNA, 202 bp, Gossypium hirsutum
gatctcaagttgacggtagtcttttagtttggtgcttgttacaaaatgtgtcgacatgatgtggatatgtttgattgaaggtaatgttttcatcggaactgtcgtgttagacccgcgtattttagtgtgtttttttgtggttctcaatgtggactcgttgctttgttatcgtataatacaaattgttgttgcctgggacttg

SEQ ID NO: 256676 - DNA, 198 bp, Gossypium hirsutum
atactcatatacggagacacaatggcaaaaccagcgacgatctgcattcacattatgaacaaaaagtgggcctcaatggggactataagagaccataggatctgactatttttttttaatatatctttagctatgaaattttgctttgcggcttgacctaattttttttgggggttaatctgtgttattcctaataac

SEQ ID NO: 256677 - DNA, 429 bp, Gossypium hirsutum
tgtttgtgttttttttttgtgatctaatctaaattttacagactcatgcctcaatgatgaacactgctaacatgccatttacacgacatggagtgacaccagcaaccaattcgatgaattttcaagggggagggttctcaattgaaaaacttaagcctcatatgatgattggtgccaagatgagcatcgctagcacttcatcccatgaagctatctctaaaggacaagtgaactactcggatcaagagagtgaagggttgcttaatcgtaaccggatgaatgattcaaggcggagtataggtattaaaagaagctcggaagctagagaaaaaggcacagaggaacaatcactagagccgaaaaataaaaaattaaccctcgaagagcttggagagagagatgggaagcaaataaacaagataatgacag

SEQ ID NO: 256678 - DNA, 269 bp, Gossypium hirsutum
tggagagtcaaaaacccagctgccgagaaaaacagaatgccatgcagcagatattaagtgttgaatggtagtattgaaaaggaatgtctgcaacagatgtcattttggcctatacttcctaacatgctcaacatggtactagaggtaaagtagatatattttaatcttgaatgcgattccatccgttctcattgttaagcatatagatatagtaataacagttctgtagtgatattactgataataataataaacatcaagtcatattt

SEQ ID NO: 256679 - DNA, 145 bp, Gossypium hirsutum
atccccacgcgtccgggaggccaaagggatgaccctatgcctttgtgtattgtacatagatggtaatgttggagagatgattttattaatgtttgaaggccaaagggcttctatttgtatgttattgttaatcgtcggtggaacc

SEQ ID NO: 256680 - DNA, 227 bp, Gossypium hirsutum
ttctttaagttttgagcaattttgtattgtttgaaatgaaaatggttgccctgtattatttattttttgagtcttgttacaccatggtcaatgattttggtttgaaatggagaaatgaaaaggattgtggatcttcttgagcttaaattcattttgtgtgtgtgttgaaatatttgtttacttggcatggacgttagatctttatgaatctttcttattgacaggtt

SEQ ID NO: 256681 - DNA, 462 bp, Gossypium hirsutum
tcgtatttgcccccatctcaattatcctatccgtttttcatttccaagggggtgaactctcaagttctaggcatacagtataagtggcttttgtggtggcgcatagtggattagattgttgtttgcttgctgtttggttttaagggaaagtaaaaaataaccttttttcctcccatgattgtgtttatcctttgttttctggtgaaaaagatgtattaatgtttgtttgagttgattttcatgtctccatctatctcatctttatgttgtgagttcatttctggttgaagtgtgcatgtttagtaaacttgactttttctatgatgcaggagatgcagtatttgatgcgtcacagtatgcattttttggaaaagatgttcttgaggaggtcgaattggggggattagatgacgaggaggaggatttacctgcagtcggacttgaggatgaggaggagttttt

SEQ ID NO: 256682 - DNA, 437 bp, Gossypium hirsutum
ttctatcgcgtccgccatctcctgcctccttttactcaaaaaaaaaaaaaaaaaaacatccccataatccatggcttaagtgcacgtgtagtatacaggcaatgaaccatgggtcttttccggcgactctttggagccaaaaagtccgacaaaacccgatccgataaagaacggaggcgttggagctttgctagatcttccaatcccacgtcttcaacttcccatatagatcatgctcttactactgctccatgcggtgacaccttggatgccagcaagcacgcaatagcagtagcagccgccactgctgctgtagctgaggctgctctcgcagctgcgcatgcggctgctgaggttgttagactgacaagatggtggtggtggccccgctgggaacaaccgacgactcgtacaggaggtagcggctgttaggatac

SEQ ID NO: 256683 - DNA, 385 bp, Gossypium hirsutum
tttcctcctcacgcgtccgcttcaatctagatcttttctccaccaccctttcggagaaccgcctctccctttaatcaggtatgtttcttcttccttctttagcgcttcttctgcaatcttatgagcaaaaatattctctgttctgtgtataaattggaatctaaggtcttcaaatctagtcatcttactatgaatgtcgttaataatcgctcctgtgactgatttatctctcttcatttcttggcacttcttgatgattgttcgagagtcccctataaccgtcactaagggacaatccatttcacatcctagttgtatcacctgtaaacctgccagggcttcagcagcaaatggtgactgaacattcctgtatagaacagtcttc

SEQ ID NO: 256684 - DNA, 350 bp, Gossypium hirsutum
ttcgcaagttatttggtgatcaagatttgagtacatctttattggacttgggtctgcttaacagacaagcactgatagtggttccacgtcagagaagcactggcttccaagggcaaagatcatttgctgaccaaagaaattctacaccttctgaagctactgcaggaagcaatgggggatattttgcatacgttagaagctttatgtcctatttcaatcctttttcttatcttggtggtggtactggtaccagctcttcaactactggaccggaatctcaaagtggcatctgggaatacagtccaaaccctacactgcaaaataacttggctggagcaaacaggacatat

SEQ ID NO: 256685 - DNA, 365 bp, Gossypium hirsutum
tgatagcaaagaaaaggtaagccgaagagaagagatgagaagcgaaaggaagaggagagaattatagaaaatcgtttcttcgcttcttcagccttctctttcttttttgcttcttttctccaattcctttctctatctctttctcctttgcttcttattagcaaagaagagaacggtagagtaaaaagaaaaaaaaaaagaaaagaaaaagaaaacccacattttttgttttgcaaatctcttatttcacccaagctttttcgagggtagagaagatgatggttgtaagtagttttgatttatggcaaaaagacgccttcttttcggcagcagaagaggttcaagaattcgctgatgtaatggaa

SEQ ID NO: 256686 - DNA, 380 bp, Gossypium hirsutum
  unsure (1)..(380): unsure at all n locations
ttcttgaatcacttctacctcgggaagccaaaaaattgtggaagggacagacaaccaggttttgattatcggaaattgcgattaaaacttgtagctactttgttgatggtaagcgagatatgaatgttgacgagttcaatggatggttaaagggatttaatgaagacaacgatagaaggataagcaaatacgagcttgccaacaccgagaggatggtttgctgggagaagagcaagcatggaagtgatgtcaatggcaatgggtttattcatgacaatgagagattttgtttcttcttctaaagtgttttgattcgagtccacatccctttattccttccattcctttcttcttctttgatantgttatctatctatatg

SEQ ID NO: 256687 - DNA, 358 bp, Gossypium hirsutum
cggacctgccagcgcaggacgctggtgttgaagtccggcttgatgaccaccagctacggggcctagagcgcgatcgcgacggtgatggtggtgtccgtggccagcaccttcttctcgcaggcggtccagtccagggcgtaggcctgacggaccaggtccgcgacctcgggcgtgacgccgtcggtcggcggttcggcaccgagccgggccagtacgccgagggactcgtcccgggcgtcgtcgtacgtgcgcctcggcggttccggctcgacgacggccttcgtctgcccgctgaacgtcggcatgccgtgcagcagcaccgaggtgatcgagacggcccggagcttcgcgcggatgt

SEQ ID NO: 256688 - DNA, 156 bp, Gossypium hirsutum
ctaacaaataaccaaagcaccaggggagggtttaaccatatattgggggcattaacgaatcaagtgaagagatatctaccacctaaaagggcaggtatcggtgccctagactgctagtatctccaatctcttggatgatggcactaggtatttact

SEQ ID NO: 256689 - DNA, 338 bp, Gossypium hirsutum
tgtgtcaggtgcactgatagcaacaaccacattgcaagcgattctgagcccgccaggagggctgggtcagggtgaggacaatgaagggaaggtggtgatgaaagcttgggtatacatgatattcataatcttgaatggtacttcgttttgtgtgacagtcataaccatatttcttcttctcccacacggcttctttggttggctattgacggtatccttaggtctgctgtctgctggttacctgttcagctcaatggtcatatcgccaaacctggaatgtgctttgtttaatttgggtttattcattctgtttgtagtgttactagttgtgggtattc

SEQ ID NO: 256690 - DNA, 329 bp, Gossypium hirsutum
cttacgtgtccggaaaatgaaaaaaaagaaaaaaagaggaaaagaaaaaaaaaagagtattaaaagcaatggcaatgggttgtctcctcgttgaagcacacataccttaagttgcttaactgcttgctgacgcttcttgttgttggaaaacaccgtagtagtgatcggcttaggaccgcgtacgaaagtaaacattgggtcttccgatgaatcgaagcttcaaacatgtaaagctgacttgtttgacaggagaacaaatcggtaatgtgaggatttggcttagttaggattgatgcatttacatgcttaaaaaacatgctaaattatca

SEQ ID NO: 256691 - DNA, 457 bp, Gossypium hirsutum
tttgttagagcacccggacgagaaattggctgacaataccgaaagcgcttcagagttgcaggcatgaatggatgaaagatgctttagagaatggtttttgtaagtggcttgcacaaaacaagtgaagtcccaaggtttcaatcggaaattttaacttaaatgcagaagcatttgcataaaaacaaaatattagagatgtacactcagaagtgcttactttgtgtcaacttatttttccttcttaaattagaagacatctggtgtctgactgcacttttaatgtgttttcatttatgttactcgaacttgaattgtgtgatgtctaaacctttcaagatatcctgtatttgaggggttttggaggattatgtcatttatacttatgtctggataagtgtcggacataggtgtcgagacagcatttcagaaatatgaaaatgaagactcggagtactac

SEQ ID NO: 256692 - DNA, 305 bp, Gossypium hirsutum
tgtcttagatagggttaggggtcgaaattaagtggtattttttacaatagtgaaaaaatgcaatttttcaccattttaatttcctatatttttatagtttctaaaggattaaatcaaaattatttatcattttaatggggccaaaatgtaattttacttttaccaatttagaattttaaaagacctaaatgaaaatttttctattttagggggtcggatccctagcccccgagctttgcccttggatggatacaaacatgatgctgtccatcgcttaaatataaaacacaaaacaatataaaatt

SEQ ID NO: 256693 - DNA, 477 bp, Gossypium hirsutum
tttcttaattcaaacactaccaatggaggagggaatggtgcaccctcctttttgaccatggatcaataacaatggaaggcactgatcagtgttcaccccatcacaacaaaaaagaaaaaatgtaccatatgtaccccccgtgtgtgcagaagctgaaccaaaataccctaacaaatgtgtgctttttccccatttatcagtcctttacctcgtataccctttcttttcaaaccatttcatttcaataattcagtatcaccttcttcatgaatctcctcattggtttcaaattagctccagtcccattagctgacattggcagagacgcatttccacttttgcatttattgatttgatggagaataaggaaaatcccgttttcaaaggaaaaaaacgggatcagagattgaattgagcagcgagaacaaaaaaaaaaaaggcttgggtaaattaccagcatcaccaccaaaaaagaaa

SEQ ID NO: 256694 - DNA, 431 bp, Gossypium hirsutum
ccggacgcggagggcagtgatgacggtggggaaccgtacgagaacaacccggcagcacctccggaagcactgaagaaggacaagaagaaggacaagaaagacaacaagaagaagaagcacaagaaggataggccgtacctcccctgcaaactcgcctccgcggtgcccatatcgccggacaccaagctcttccgctttcaggtgccggccgaccatgcccaccttgtccgcgccctaccgagtcccgtggcccacatcaggtcgcaggtgaagttaccgcctctgcctcatgaccctaccaccactgagttgctcaagggacgcccctacacggtcttgcgtcagttcccggagcctaccggcgagacgatgtcggcagcggaggagaaggatcattatctgcaagtgatgatcaagcgttatgacacctt

SEQ ID NO: 256695 - DNA, 479 bp, Gossypium hirsutum
cttatatcctcagcatgtcacgcctgattattgggtattcagaattcctgggaaaatttccgacgaaaattcggctccctatcgttaccgttacgcctttatcggacctctcgtttactgctcctatctttcagcccaccgtgaagaagaaaaacagagatacctggctgcctttctcctccgtgctcaacccaacactagcttgagcgattttatcacattgattaaagggtctttagcaaagatccgagggtgttacgaaaatttgtattacaggaattgggatgattcatttaaaagaccacggcaattcatttaaaagatgtgggtatacttgttcgaagaaggattatgattaactaaccagcttggcagccataaagcaatagtgaaaatgttcaacaatctctgcaaatatattgatgtggagaagaagaaccgatattcaagtcttttcttgaagcttaatgcatacaatg

SEQ ID NO: 256696 - DNA, 526 bp, Gossypium hirsutum
  unsure (1)..(526): unsure at all n locations
acctatttaaatatatccccttgtattgcaaattccttcatatattctctcttcaatgaaaagaaaaaccccactttgaaaaacatgcataatctcaagaagattgttctacttttgttcttggtttcaacttttcttttatcaacttcaatggcaggtcgccaatctaagttcgtcaatatgttggctgaggaagttgatgcagcttttgaggagataagtgtcgaaggcgaagcaatccatgaaaggctgcttagagcaaatactaaagactatggaagatatgatccaacaccagctcttgtgaagcctcctttcaagcttatacctaattaatcaatcatgttggtgcatcatgtagcaatatatatgggtataaatgaagctttgccctatgcttcatttgcgtacttgaagaaaatgaagcaatatatatatataattagatataatatatagtatttagcaataaacctatatatagagagataatgtattatatatatatgncatatattataatact

SEQ ID NO: 256697 - DNA, 234 bp, Gossypium hirsutum
gctatgcgtccggcaaactatgtttttacaattgctgcaagcatgcacatgctagcctgacccaaaacttaaaactaaatttacaggtatacccaagatacagtcattcaagttgtcaacttattttgggtgttagcacaaatttgatgcaggcatcagggtttgtgactgacccaaactttgcatcagtggcagaaaaacgctcgcaaacatatatatagacttttatatttg

SEQ ID NO: 256698 - DNA, 442 bp, Gossypium hirsutum
aattgttctcagtcggtattggtgcagatcgaattgtctgtgggggtgaagaaggtgttgttcgtatctggaacttctcagaagctctagaaattgagcagagggcacgggcactaagaggaatacgtttggagaataggatgaggcgacgcagacttcaaattgagatgaataataagggtggtcgaactgatcaatgttctgttgcagccaagaagaaaacagtcaatggtgataggaatagtgtctggcacagtaaacgtagcataagctccaaggtgaagacataacggctgtcagatgatttatgattatacttactttatgcctttaggcttccaacatattcatcttttttctattatgacaagattatacacaataactttgtgactgtatggtaactatgatatcttttagttatccatggattttaatctca

SEQ ID NO: 256699 - DNA, 384 bp, Gossypium hirsutum
tctacttttccgtccgaatccactttcagttaagaagaaataaagccatgaaaacctgaatcgagcatctgggaaggaagttaagggtgatgatggcaatggtgaaaacaagaggaaaaggaaacggtctcgcagaggtaaaactgttgctggggcagatgtgtagtgcattaaggtacgagagacaaaaaaaaaaaaaactttattgtaactatgatggtacccattccccccccaaaaaaatatatatatatatgatggtaccctaactgcaacgcaatcaattgaagagatgctactgtggttttatgaggttttctctctccaaaaagacttgataacattttagatactctctagggggagttgagttgagctgagcta

SEQ ID NO: 256700 - DNA, 215 bp, Gossypium hirsutum
aatgattacccgtacgctaaacacagggaaagggggggtttttaatggctatcctgttgatgccgctcgaaagctcaacatcgcaagccataaggccactttccgctccatctgtgcaacaaagatattccaagattattgccactcttggagacgagtgcacatgccgcgaacgaagtggaggcgaatgctacagcactaggacccaaccctgc

SEQ ID NO: 256701 - DNA, 236 bp, Gossypium hirsutum
tggtttcatccatgaaaacacgcgctagtgcgggcttcttatttgcgggttgttgttcaaaagctatgggctaatactgggcatgcaaatgagatcaaaggacctagttttgtatcttcgaagttaatatcttatttacattggtatttaccgggctctttcacccataatgtattaaatattaactcgatattctatgtttaatatctatcatcgagcctaatatattttatttt

SEQ ID NO: 256702 - DNA, 365 bp, Gossypium hirsutum
aatagattttgtcttcctcgtatactctgaagtcttctggtaatagcagctgttgtgaccctgaaattaagcgactgaaaatgaagaaaatggtgaaggttctaaggggaatcgttccgggtgctgatgagatggatactgctgctgttctcgatggagctgttaggtacctcaagtctctcaaggttgaagtacagaagctcggagttgggaatttcaaatattaagattgaacccacatcatagtaatgaagttctcacctttgtatacctctccataactggcctctctctgatggtttgcagcctagaaataatgaagacaggtatttagaatcaatatttgtgttgtatgcatgaactct

SEQ ID NO: 256703 - DNA, 429 bp, Gossypium hirsutum
tgagagatttggacttgcagcactcggcgatctggatggctggtgtatatttaatgctattgatgcagttccttgagaataaagtggctgtggagcttacacggtctgaatttcttgaagctcaagaggcattgatgcaaatgaagaactggttcattcgctttccaacaattttacaagcttgtgagagcatcatcgaaatgcttagggggcaatattcccattctgttggctgttataatgaagcagcttttcactatgtagaagctgcaaagataactgagagcaaatcaatgcaaatcatgtgccaagcttatgcagccatttcatacttttgcattggtgatgctgaatcgtcttcacaggcgcttgatttaattggaccagtttacagaatgaaggattcctttgttggagttcgtgaggaag

SEQ ID NO: 256704 - DNA, 360 bp, Gossypium hirsutum
ttaaaattttctcccgtgaaacccctaattttcccccctaaaatcatttttttcccttcatcttaacccatttcaactttccttccttcgttgatttttatgtgttttttattttaaatctctctgcaacatatatcagttaaagcttcaacctttatacccaaatacaagattttgagtttaaaaaagcatcagtctttgttcttttgtgtataaatcacgagatttgtttagtttctaagaaaatattttattcgtgtttggaagattttcttcaccattttagagggtgactttgtttttcttttctttgacgctctataaagtcttaattccacctcttcgtttcattttcccgag

SEQ ID NO: 256705 - DNA, 411 bp, Gossypium hirsutum
tgcacgattccatggaatggaaaatcaagaggaagaggaggatgtcaacttctatatctacaaagacagaacctaaaaggcagagattatttactcactgcttcctccccatgattcttttgctatctgctgccttcttcattggaagtgcatttataatcacagactataaagagaaaattctaggatgggggtcagctatggttttgcagtactcaagatctaagatgtgtgagactcagtgcagggcttacggaagtgaagcattacctagaggaatcatttctgaaacatctgacttggaaatgcggccattatggggtgcgcagaataagaagaagccaaagctgtcaatgaacttgttagccatcgcagtcggaataaagcaaaaagaaaatgtcaacaagatgg

SEQ ID NO: 256706 - DNA, 228 bp, Gossypium hirsutum
tcccacgcgtccggacaccacagatgatgaatttaatatttacaaaacggtatactacgaatccaacttcagctgaaaaatatgtcaggggaagaaggtgcgggtgcccaacccgaggcggcgcctgcactcggtgagccaatggacattaacacagacttgctccttgtggttaggaagtcacgtgctcacggtgggctcgcacggggattacatgaagctgctaag

SEQ ID NO: 256707 - DNA, 379 bp, Gossypium hirsutum
cttcaactccactttttctgctaattcccatatccttccagttcccactccaaaaaagaaaaaaaaatcccatttttttcagtgccatggtcgcttgctaagaacccttttccattgtttttttcttgcgaagcagtgcgaaaaaatgcctccaagaagacgtccgaaaaaggcaatttctttccctgtttttcctttgatttctcttaagtttgttcctatcgttcacttttaatgaaaaatttgcacttttttttggatgttgcagaaatctaatacgagaaaggatgctgccattgatgcaatgaagccatatgggtttcctgtagacgttgttcaaacaaccataaaggatttgctaaatgtttatggggaagat

SEQ ID NO: 256708 - DNA, 233 bp, Gossypium hirsutum
tcccacgcgtccggtttgtagtgaaaaaaaaaactgtatggtttagtctgtgatggaaacaatatgttgggggttaaagtgatatttcaccaatgtgttcactttttttttaatgtgtgtgtgagatctatatcatgtactactagttgttgaagaagtaatttatttaatggaaatcagtgttggatgattagattaaaaaaaaaaaaaaaaaaaaaaaaaaaaaaaaatag

SEQ ID NO: 256709 - DNA, 242 bp, Gossypium hirsutum
gacgatggcgaatggaggttgtatgctctggctttccgttgcttatgtggtatcctttgtttcattggctgcttcagtaggcttattgatacaagattctctggtgaaatctggtccttcagtgtggaccggtactgcaggtgtcttacagtgcgtgtttgtcttaataagtgggttgatatattggacttctcattctgagtaatattaatccctcaaatctggcgcctagacttgggaac

SEQ ID NO: 256710 - DNA, 141 bp, Gossypium hirsutum
tcccacgcgtccgtctaaatatgggttgacggtgacggtgatctccttctccgctcagactttttagccttcgatttttttttgtttccttttgatctttaaagatccgattcactggctttcggatctatcttttgcacc

SEQ ID NO: 256711 - DNA, 346 bp, Gossypium hirsutum
cacgcgtccggctggccgtggcacaacagtcgggagaggtgttgtgccatctattcgtaggtaacttggtattgtgaagtgctttgtaatctcttctgtcagaagcatcagtcatcattgcagaccacttgagatgcaaaaaaggattgactcttttcgtattgtactcttcataattgatgtaaaaggattgactcgtttcatttcgttgaggaaaaagaaattagataaaggtgaagtcactttgcctgaatcaaaaatgactgctcaatttcagtgtgaatgtttaaaatgctttaatgacttggcagtacttttcggaaaatgatagatattggagattttt

SEQ ID NO: 256712 - DNA, 245 bp, Gossypium hirsutum
tccacgcgtccgcccacgcgagcgatcaaacaaagctattatgtgggttgagagcagaataaggtgcataatacacaatgccgaatgcatacaaaagattgtgagagaatatggagcttttagcagctgaatgtggggatatatgaatcataaacgccaaagtaacaaatacaagtgcccaagaaaggtacctcttagaaccccaaaagctgaagccattagcaaggacctattgaaacgaggat

SEQ ID NO: 256713 - DNA, 454 bp, Gossypium hirsutum
  unsure (1)..(454): unsure at all n locations
ttccacgtgtccgcccacgcgtccgttcatggtcaatggcttccctttggtcaccatggggaaacttgttcatgtttttaatggcttatttttcttcactacccttatcttcatcatctcagcaatatttacatgtacaatactcaactatatcagctgcaccggcattccttccaagtgcacctcttgcttcttctccaagtttaccccctgacattgagcctttgttccctactccgaatggtgtggcaccttctcctactcattcgtcgatgcccacaattccttcaagccccagtcccccgaatccggataacatcgtggcccctgctcctggtttcgcattttcaccgtctaacagccctttgccgtcatccacttcggtttatccgacttcagctcgagctttaaaaccaacattngttcttggtttgctagtatttagtatattgca

SEQ ID NO: 256714 - DNA, 363 bp, Gossypium hirsutum
tatactgcattaatagtaatgagatttttattgctatgttgaagatatgtggtctttgtattcattgggaaattttaacatcgtgcaatggttgtgacagatcgaggaggatttggaagcctaatgtacaagagaagcgtgtatttagttatatcttagatcgccatattcgagtcaaagtaaccactcatgccctccgttgcattgacaaggcaggcgggatcgatgagtacctgctgaaaactccctaccacaagatggatacagaaatgggtctgttctggaaagctaaaatcgagaaaatgtatgaagagcttgggcaaatggaggtagtcttcttttcgccggaggatgaagcaaagt

SEQ ID NO: 256715 - DNA, 176 bp, Gossypium hirsutum
gtgaatcttgagtgattttgcgccgcggggccttgctctttgatagatctggcttgttcttttcctcttcaggtgtgggattctgctgaggagggtttgcttctgttctgtgccgctgagaatatctcctgctacaagaagagaatgggttttgcggctatggttggtggatggag

SEQ ID NO: 256716 - DNA, 371 bp, Gossypium hirsutum
ttcacgcgtccgcacggtttgaagagaaagggggcaatttcagagatgtggaagagcaacgagaaatgatatgggaaaaactagcggatgcagcagcggaaagaggtggagaccatatggttacagtctaaccgattagtcggagttggattcaagcagactcctcaattttaatggtattctttctcttaaccctctctaataattattcttttcttctctccaaatttttattcaatttgatcattgaaatattgccagattaaggtggcatttgagtccttatcatgtcctagtttcattagaatgtgattaccgggaatctgattgctgtatattaaaatgttagaatcataaactttacagcaatt

SEQ ID NO: 256717 - DNA, 384 bp, Gossypium hirsutum
  unsure (1)..(384): unsure at all n locations
ttcacgcgtccgcccacgcgtccgcccacgggggcgttttcgcgtccggaccatttccaccatcaccatccccatccgcatccgcatccgcatccgcatccgcatccccaccagccaaccccttcccctactaagcccccaactcacccacctgtttaccccccacccaaagcacccaagattgctccagtttatccaccacccaagtcaccaagcaagccgccaacttacgctcctcctcccaagtcacccagcaagccgccaacttacgctcctccacccaagtcacccagcaagccgccaacttacgctcctncgcccaagccaccgaccaagccaccaacttacgcccctccacccaagccaccagtttatcctccaact

SEQ ID NO: 256718 - DNA, 367 bp, Gossypium hirsutum
taagagagattcattttctccggctcaggggctctttttacattcgccgcactatcttcttctttagaaagtaagataatttttttcttcttttgatggttgaatttcgaaggcgacgcttggtagctgcaattttagacgtttttactttacgagtttaccttgagtgtttacaattcagattttcggttggttcaatcattccttcgttgaaatttcacgttaacatcgtttgagttcagatcaaagaagattctgtgacaagaaataaaattctgattccgtcagtaaaacgagtggaaagatcttctgaggctgaaattgtcgaatttttctaaagaaaaaaattgaaggaatttattttgaa

SEQ ID NO: 256719 - DNA, 391 bp, Gossypium hirsutum
atgaattgaaaagcatcttctacccctctgggcaatttttcttttcttgcattaagttatacctgatcattgagttgagttggagtatgcctcggaagtcctctggtgcccgctaacattatccctttctctacagacgtccttgaagtctccatagtctgagatcaacctgatcatctcccgagagtctaacttagtcgatccgctacgctgggagaagcctagccacgttgacatcatcattagaagccaagttagttgatcctctatgctgggaaaagtctagccacgttgagataatctccataggctagcttagtggatttgctaccccaagggaagcctagccatgttgagatcatatctagaggacaagttagttgatttgcta

SEQ ID NO: 256720 - DNA, 473 bp, Gossypium hirsutum
ttgacatctgctgtcaagtatattgaaagaggacctattttgcccaataccttgatatccatggcgagaaaggcatcttcttttaaaaagaaaaagaaaaagaaaaatagcttaatttcttctataaaagggtcataggttactactgaaaggggaagagggctaaacaagggtgcaagaaggaaaagttttttctctgaaaagagtataccgtctgcaaaacatggagggtaatggcaatgaacaaccaaaatgtcaaagaagttttgatcatcgtgggaggaagaataattgctgggagttagttatccagattttatgtatgatactggatgataacactattccgaatatacggtcttgggacaaaaaaaaagaagagaaattagaagaggccttgacgcagctggaagatattatgatgaaaaatgacttgctagagagaaagagaaatggctggaagtaatgaaatc

SEQ ID NO: 256721 - DNA, 432 bp, Gossypium hirsutum
  unsure (1)..(432): unsure at all n locations
gttangggacttttgactataaaggagctggggttgcttttgatggatttgctgcatgccttgctggaactgcaatctcaaatgggttgatcatgatgaggaagaaaatggatcccagctttgaaacacctaacaagccacctcctaccttgttgaatgccttcacttgggctactcacatgggggttagcagcaatttgaggtaccaaaccttgaatggggtcgagtttttgttggctaagggacttcctcccctggcatttaagtcatcagtggtggttctgagatgcttaaataatgtacttggaggaatgacatttgtaatactagcaaaatttactggatctcagagtgttgaacagaagccaccaaacataaacaaggagaagaagtcggtggacggtgacagtttggacaacagtcagtcgactt

SEQ ID NO: 256722 - DNA, 423 bp, Gossypium hirsutum
tctgcctctgcagttttcgggaagatcttattagcgcattttgataatggaaccgattgtgataaatcatttcgagactagatcgatttggagaaggggtttcgatttgatcatgggacagattatttttcaacttctcgggacgttattgttattgtgtcagttatattgttctcgctacaataatacagtaccaacaacacttcggcagtcgatatttccttccgaagagattccactaatcggtgacagatgaggaacttccagtggattcagaagaacaattgccaatgaaatataggacctagtgcacgctttgtgttaactatttttgcttaccgtggacttgtttttaatactgtgccgaaaaaaccatgtaaattgatttttttttatagcttaatgagactgatgtaaaataaa

SEQ ID NO: 256723 - DNA, 165 bp, Gossypium hirsutum
cgtccgcaacaaaacatccaaggagtagactatataagtgtgtgtatatatatattgcttgctgagatttgcctggtctctattctgagcttgccttagtgaatttggaactgtggattcattaggttcaactatgacagtttatatcaatggatttgttttttt

SEQ ID NO: 256724 - DNA, 165 bp, Gossypium hirsutum
tccacgcgtccgattcgatggagtggatggagagtgtggtgaaaaatgcaaaatgttggatttaaggatttttgcaataatgttcacccttgtgactgttatattgttgtattcatatatcattgccgagtcatatggaatttgatgtttatggtgcattaattc

SEQ ID NO: 256725 - DNA, 428 bp, Gossypium hirsutum
tttccgtcgctgctcttcgcactgtgctcaccgccatttccaattctcagaaggcaaaagcatttgaaacgggttcaacggcgactagtcctgcagatgaagctgatattgaaaagctggaagaagaagcctcgaatctcaggaaggagcttgcaaacaagaatctatacataaagcgtctaatagatcaactacgggagcttattacggatgtatcgacttggcaaagtccttgttccatgtaaagtttggacgataaaactgacttatctcagttgccgaaaagagtgccctaggaggtaaatatgaaaccagatatctacattgaatgatgatgatatggtttacttggaggaaaattacctgtgataggtgctatttgtgttatttgatgatagtgcttaagagtttgaatgagacatgacaca

SEQ ID NO: 256726 - DNA, 330 bp, Gossypium hirsutum
taatgctagaagctctgcaagttgtgggggatggtcatgatgcccacttgggagaaggctttgagggtaataatggatatgttcctacatctcgtgaggaagatgaaacaacagggaataagttaaggatgaaactgaaagagttccacagaagtgcggcatcattctctgaaatagataggaattacctcaccccattcttcacgagccagaatggagattctgaagatgaggaggatgatccaatgcctagttctagaaggggagtataccacggacatagttgattctacaaagacaagcggatgacaacacatactggagaatact

SEQ ID NO: 256727 - DNA, 131 bp, Gossypium hirsutum
gtccgctacgaagaacccagaccggtcctttttgaaagtaaatcatgtttacgaagcagcctgtgattcgttggttaaaacttaaaattatgcgtggcaggtggttgtacatatttaagtggtaaggatgg

SEQ ID NO: 256728 - DNA, 235 bp, Gossypium hirsutum
tccacgcgtccgcccacgcgtccgcttgaccggcctaccaacagttacaaaccacagttccacgttgccaacctttctgcttccaagcttaacccagattctgggatcagtgtttaatctttacctactaaataaatgctgtatctttttgggcatattttaagcctaatccgtatatgtttatgttatacaaagctgtaagagcattgctctcaagtctggttacgtaatgagt

SEQ ID NO: 256729 - DNA, 371 bp, Gossypium hirsutum
tctgtaaagattgaggctgtgctggattggaagcagcctaagaagtgtctgagatccgctgctttctgggcttagtaggttattatcggtggtttgcggaaggtttttcattgattacaacgcccttaactaagccgatactgtagcaccccaaacccggcccagacgttatgaccggatccgacatgcgttcaaaacattttatattattggtccagaaaaaaacttacttagtgctttaaaggataatttcattataggttaaagtgaatggaagctgtgcaccaggtaggaaaccggaaaagaggtggtgagtccatcggactgcttaagtaccaagctccctttggatccaatcctagacatgctta

SEQ ID NO: 256730 - DNA, 409 bp, Gossypium hirsutum
ttttacgcgtccgaaggcttctcaatggatggttcagattgggtggagctttttgttagagaaatgttgaatgcttccaacatcgatgatgccagagctcgtgcttctagagcactggaggttttcgataagtccatccatgctcgtgccggagcagaggtggcccaaaactatcaccaggaaaatatgatgctgaaagaacaactggaaacactaattcaggaaaatactattctcaagcgagctgttgctgttcaacatgagcgccagaaagaatatgaaaatcaaagtcaagaattacagcatctgaagcaagtaatatctcaatatcaggagcagttgagaacccttgaggtttggcttcattcaccggaagcatatatgcatactatgttactcaattatcagt

SEQ ID NO: 256731 - DNA, 344 bp, Gossypium hirsutum
tctctccgtcgccccctggaaaaaacaaagtgttgttatttgcatcatcatcattatcatcttaatccaccatttcgggttaaaacttgtatgggctaaaaatgggtatcaaaattctaaatccatggtggtttcggttattgagaaaccatttctcctgtctccaccgccacctccaccaccaccaccatcaccaccacgagccgcctcgaacgatcaaggtcatcaactgtgatggggtcgtcaagatctacgaccgtccggttcatgtttccgagctattgatcgagttccctaagcacatgatttgccgttccgattcgttttacataggccaaaagatc

SEQ ID NO: 256732 - DNA, 156 bp, Gossypium hirsutum
gtgagcggcgcccttttttttttttttttaggtaaatatatatacttaacaaatatggatataatgaagatcaaaccagaaacattcattgatccatttttattatgaatcaacctaagccacaccccaatactgtcccaatcatcatcattacct

SEQ ID NO: 256733 - DNA, 410 bp, Gossypium hirsutum
tgattacctcccatttatgattcctagctaaaactgctgttgtagctaaccccgtttcctatgaaaacgaagcatcaaaattaatcttgatgataccatcattcggtggcttccagaactctttcacagcaggtccaacaacagaactgaaattcgctgtatggaaacttagttctcgtgcatatccacgaataaaacctagggtttcctgttttgagaaaataacaccttcatggactaccttatttctacaatgccagaggctccacaatgaaatagcaataagatttttggtgctgttatcaaccgccaaaaaagttctaataaaactttctttatgctctagtgaatcgacaggaggatgagtctgcacttttaaatcgtcccaaatgtcttgcaaaatagcacac

SEQ ID NO: 256734 - DNA, 297 bp, Gossypium hirsutum
tgctcacgcgtccgggggatgttgcatgtgggtgactatgacataattgagtaccttaaccgttacaaaggccttattttaacatgtaacggtcttgggattaggcaatcaatttggtaaactcaagctggaggaactgaggttccttatgttcgttgtcataatgctcaaactgagacacccagatttgtgaatatcacaaaaacagcacagttgaggatgagaagaagcttggatgtattacaaggctatgttatatctttggttggggtatagtgaagtagaagaaattcacat

SEQ ID NO: 256735 - DNA, 100 bp, Gossypium hirsutum
tggcaccgctgtgtctggggagaataaatggaagattcttccgttaggtaatttagaagctgtcaggaagtatagggagaaggttaaggcacgagctgcc

SEQ ID NO: 256736 - DNA, 347 bp, Gossypium hirsutum
tgcttcatggttgcttaaaaaatcatttctcgagttttaaaactcgaaattaagatcctaaatttttcctgaaactagactcatatatatatctacaaatattttttctaaaattttttacttagccaattagtacagtttattagttaaagttacccctatttcagaattcgactgcactaattggctaagtaaaaaattttagaaaaaatatatatatctaaaaaaaattttctagaatttttgacttatccaattagtacattttattagttaaagttacccctgttttagaattcgactacactgccctctacttactacaaacccaaaaagcacgctcttct

SEQ ID NO: 256737 - DNA, 201 bp, Gossypium hirsutum
ttgtgatgtagtgcaactagtggagtgctgggcgtattataccctcttctcatggcggctttcctgggcgtcggtgatggggttttgaacacgcagctcagtgctttgcttgctctactttttaagcacgacacggaaggagcgtttgcagctgaaggtgtggcagagttccgcgattgcagtcgtgttctttttgagccc

SEQ ID NO: 256738 - DNA, 206 bp, Gossypium hirsutum
ctcccacgcgtccgaagttgcagggatttgatggacattcaaaaacttatggaggaaaatcttgtggatgttatcaacattaaattatccaaatttggggttcttggtatccttgaaattgtagaaatggttaaaaaatctggattggaacttatgattgatagtgttgctcaaactagacttgctactggtgttgctggtcattt

SEQ ID NO: 256739 - DNA, 352 bp, Gossypium hirsutum
tcttttacttctacattgagtttccttttgtgaaattactactcgctttactccattaaggaaaattattatttcgatcgttcaaaactgggagaattcatcgctcaatcattctcttatattttggaaagtttacttgctgtttgtgttgagcattggtctgcaatgcaacaaactaccagcatcttgagcagcagcagcatgtctgtttgaagattgaaccagaagcaacttttttgtttaaattttgtatttttgtgatgttaacaagttggcaagtagcttgatatctaaagctagtatttttagatttgaaattgatggatgtaacagctgaatttttcagcttttc

SEQ ID NO: 256740 - DNA, 277 bp, Gossypium hirsutum
tgctcacgcaatcgaggacgactccgtcaacgggtattaccacgcgaccgtgtttatagaaggaagggcttgaaaatgggttccaaacaaggcggggaacgaatcaaagtatatcgtgtacttgttaaagcagtgaaaaaccacaatggaaaagaagagtataaaaagcattgtagccagtatatagcagagcaatttaggaaaaacagtcaactttcagacccttctttagttgctcaaagaattaagcttgccaatgattatacttatttgctta

SEQ ID NO: 256741 - DNA, 152 bp, Gossypium hirsutum
  unsure (1)..(152): unsure at all n locations
gtcttaacatgaacctcaggttatagagacagggaactttttatcattcaaaatggaggaatggcacattgctgttccattcttttgcattttaaaaaaaggagnaatataacaggaagagaccacaaaaacacaaaaaaaaagaaaccaaa

SEQ ID NO: 256742 - DNA, 125 bp, Gossypium hirsutum
  unsure (1)..(125): unsure at all n locations
agtggcgatgaggctgtccaaacgaaataaaatagtttgcactactactatttgcttttatattatggaatactatatttaaataaatntgacagccagcaataaaagattgccatgtgtgctta

SEQ ID NO: 256743 - DNA, 396 bp, Gossypium hirsutum
tttacgcgtccgcccacgcgtccgcactgccgggcataagaagaaccaaactgagaaccatgtggcggcagtggaaaatggggtgtcgggccgtatatttctgaagaaaagacgtggtgctgctaaaacagaggatgacggcttgcaatgctgcagcgagactggagctggtatagtaaggagaaagagccctgttatctatgaatgcctgagcatggagaggacagacctatatcttgacccagcatactactcatcttgctctagtgggatcacacaggtgtcagatgataacgcggatgacgatgaagaaagcaacagttgcactagttatccttattttagaagaaaaccttaaaaaagccacactcacacttttgatttcttgtctatatc

SEQ ID NO: 256744 - DNA, 105 bp, Gossypium hirsutum
ttttctttataacttgcgtgaaacccttgattgggtcttgaagaaactgtgaaaccctttgtttcggtcaatgtaacaaacaggtctttggttctaaaatgaaat

SEQ ID NO: 256745 - DNA, 167 bp, Gossypium hirsutum
cttttttatgcagattatatgagaatgcatgatcactcataagcttatcacccatttattttctattttttattctatctttcaaacatcatttgtattattggattattagtaaatgcgactgcttaatttggtaagatgtaattagtcattaataaatatgttgt

SEQ ID NO: 256746 - DNA, 487 bp, Gossypium hirsutum
gttactatcccagacagggtcttacttgtaaacacatatcgaaatcacaaattgatgccatggacttactcgcactcatatatcagaatcctatgtcatgacatatgtatcctagctattcctaaggttcatacggggctttgcacgttgtgactcggtcgaatcgaactcgaaagtgtaataaccatattcaatcacattcggccataatatatttagtttctaacatttcaaaacctcaagtaaatataacattaagttaccaataaacatgtccatttgcttctaaacttacctcggacgtcgtaaaacgagacggggctgctagtcgacaacttttattttttctcgatccaaatctgattttctttggttcttgatctaaacatattcaaattaagctcattcaaacatattttcattcaatttaatccaaaaaaacataaatgggaaaattaccattttacccctaacatttacaattttt

SEQ ID NO: 256747 - DNA, 378 bp, Gossypium hirsutum
tccacgcgtccgaaagagataagatagagagggaagatgcccgaaactagagttgaggtaccagaaatggtgatgttggagattctgtcaaagcttccagttaaatccttgacacgtttcaggtgcgtatgtaagccttggtgttcatcttttcaaacccctcatttcattaccaaacatcatcaaaacaacctccacaacaacaaccttaatctcctcctcaaacgttgtcagggtaacacccgtgatgacatctactatttctctcaactttcaattgagaaaggccaaaacttttcggcacaacacaacatccacttaccctttttcgaggattgttggtatgctcctgtggtttcaggtccttgtaatggatta

SEQ ID NO: 256748 - DNA, 133 bp, Gossypium hirsutum
agtcaccacaaggactgctttctccccctctgtggcggttcaactccacctccagatcggccataacaacgatggcgcctcgacggcgcgctgccgccgatgtgtgcgcgacgtgcgcaggggagagtcatgc

SEQ ID NO: 256749 - DNA, 293 bp, Gossypium hirsutum
gtcaggaatgaaaagcatagaggaaaaaccatcctcatgtccgttctcttctttctttttcctttttggtttaaaattttttattatttttattttctttgatgttcttttatttcctttttcttttgaaatttcaggaatttgttgcgaaacctgagtcattattcctggtaagttaaattttctatttagttcctataattttttttccattattggttcaataaatcgggcgcgtttgtctattattttcacttcttggcaattggacactggtgtggtcttttaaatct

SEQ ID NO: 256750 - DNA, 466 bp, Gossypium hirsutum
tttacgcgtccggacagtggcagttgacatatagtattcacatatcatcaatatataatagtaattcaatcattaacttacaaattctagcatgttcataatatcagagaactcagttaagtgaataaaattgataaaatcaatctggggataatccaaggattaagctgaacaattcacaaaattttgtgcaaaactataaaatagtggccacatggtcgtgtggccaggccatgtaacagactgtggtagtgtggcaaatgtaaaaatcaacctacaggaaggacacgaccatgtggcaggccgtgtggaaggttggttcatgaactagcctagagtttgcagggcacatggacacgtgaagggctgtgtggtccacatgcctatgcgagagactgtgtgaccctattcctacacacgatcaccactgattcacttgggatagaatacacacctttcaccgaga

SEQ ID NO: 256751 - DNA, 398 bp, Gossypium hirsutum
tctacgcgtccgatttacaaatctaattgctgagggtttgtttagcattgcttcttagaaacactttttgggacaaaaaacacttttgagaaaaaaaccattgctagacaagatgctttgagtttttgaaaagcattgctaaactagccctaagtttgatttcatcatccaaatctccaattttaactttcaaacatggtttttccggactcagaaaaagcgagtttaccaactgggcttattacggtaggtttcaatatcccaagtaattcttaaacttgcccttattttcatctctccttcacaatcattttttttttctctcgtacatttatggattaaatgtgaagactctcagaaaagaggtataatacatatacatactgcattgaacatca

SEQ ID NO: 256752 - DNA, 249 bp, Gossypium hirsutum
  unsure (1)..(249): unsure at all n locations
gttttgggctaggcaaattgggtgtatggggcttctgaggcccgggcataatcgggattgtacaatgtgttaattgattcttaaatgttcataataaccaattataaaanaaaaaaaaaaaaaaaaaaaaaaaaaaaaaaaaaaaaaaaaaaaaaaaaagaataagaaataaaaaaaaaaaaaaataaaaaaaaaaaaaaaaaaaaaaataaatataaaaaaaaaaaaaaaaaatgggggggccttttt

SEQ ID NO: 256753 - DNA, 357 bp, Gossypium hirsutum
tgtaaagagaagcttatctagaaaatgaacttgcgaatatgtgggttctcgttgccaaattaaaaaaatccaatggagttgatacttaaactgtagtttccgaatcaactaaagggaacgactggttcagttcagggcacagtttattcacaaacaataattcggcttcggctttgatttagtatttggtttcagagagtagtgtcctgagaatgttgtgcattgcatgtagaggggccattgtacattccataggagttttttcttattcatcaaatttgttgcatcttttgggttcttttatccattggggcattgtatatgaaaagcttcagtttttgtacatattagctttga

SEQ ID NO: 256754 - DNA, 302 bp, Gossypium hirsutum
ttcacgcgtgcgttcttcttcgtcttcataatgattatttggccgtcctattcggcgacatgctgcgtcagaccacgcttgtcgggcttgccctcgggctcgcctccgagtcgtccgcccaggtgtccagcgattgcgagagcggctggtaccagaccgaatggcccgtctacgcgcctgactgccaacagggcggcacggcgagcctcgacacgacgaccgcgcacagcggcaggaactcgatcagggtggactgcgccggtggctactgcgggcatgccttcttcggcaccaacaacatt

SEQ ID NO: 256755 - DNA, 333 bp, Gossypium hirsutum
ctacgcgtccggaaattgaaagaagttcccggggacttcaagccgatgctttctgtggggtttgtgaagaaatctattcagaggggtttagacaattaccatgctaagtacattgagactgattccatcgaacctctttaccatatctgtttcggtgggatgatcttttcttatctcgtcgctcttcccaatgagcgtcgtcacctcgagcacaagcggcatgccgagcaacatggtcatcattaatcccattcagcttaaagatgggccgggttgggcttttctcgggttatggggtgaccatttggttgttattattttgtgaacattgta

SEQ ID NO: 256756 - DNA, 386 bp, Gossypium hirsutum
tttacgcgtccgcccacgcgtccgccaaatgtgaaatccttcattgcttcatctgtccttgttctattcttagcaatctcttttagttttagcagaacaaactactacaaaatcttcaacctcaaatcaagtctcgcttcttaccaccctacattccttcaatctgttttctcatttatgctaaaaaccccaaaacccaacaaatcccattggccaaatcccatttccaggccccctcactgtgttctatggatggctcccttcctttcaggtggggggtatagttcagaagcatggtcttatgttttagcactcgatgaatacatgaaaagtcgagaaaacccgagttttaaattgggtattcaccaacatggtgatttggagtc

SEQ ID NO: 256757 - DNA, 258 bp, Gossypium hirsutum
tattttcgtctattcacttttatgtttttaggaaaatttgaataatcttcattgctgtctttgatttcatgttgttcattgcaaggcatttgtattgctgctgtactcttttgatgctttaaaatgtgacttatatgggtctaagctcccactgaaatgaggttgtctttgaataaaaaaaaaaaaaaaaaaaaaaaaaaaaaaaaaaaaaaaaaaaaaaaaaaaaaaaaaaaaaaataaaaaaaaaaaaggggcggc

SEQ ID NO: 256758 - DNA, 393 bp, Gossypium hirsutum
gggtattaggatttcaaaggacaggtggttgtggtttaaaagaacaattagcaaaaaccactcttaacaatgtaagatcacaagggcatacttatgtagaacttcgtgaggatggaaagcggttcatattcttctgcactttgtgccttgcaccatgttatagtgattcagtgttgcttgaccatttgaaggggagccttcacactgaaaggttagctgctgctaaggttacattgttaggatcaaatccatggcctttcaatgatggtgtcctgttctttggtgccacgaatggagaagagaaacagttggaagttgtaaatgataaccaaaataggttgttggagttttaaaacagtgataacaatcttgctatagttgaatatgttggta

SEQ ID NO: 256759 - DNA, 363 bp, Gossypium hirsutum
taaataaaggaagatgcttcagaatatttggtggtgaggttgaagttgataaaatgttgcattatttatatatcaacagcactatactaaacacacatatgtgcaaatataaggctgataataatgggatttgtaacatattctatgttggcatttataattttcaggttcattgatgcttttggaagagtcgttgttcaagcatgtcaattgccagacatattgcatttgaaaatttattattccactttacatggagcttattaagagcttgattcatagtgggaaaaccatctgagtgttgaatgtgaattttcacttgcatagctgaaatgagtcgggagaaaatttacttaattaagt

SEQ ID NO: 256760 - DNA, 355 bp, Gossypium hirsutum
tcgggataacatataatttgggtggcttggtttgatgttaaactcagttatatatatatacatactttattcatagtatgtttatttctttgtgtgtgtgttttgttttaggtttttattctaggaatacacaccttggaagggaggcaatgcatgaatttccggcaggggacaaaaaaacaagagatatggtttaccagtgttttaaaagaagtagaagaagaaccccagaccagggtcatggtaccgaaatccaaacccaagtcaacggtagcatcaacagtggtggaaggtgaaatcatgaaagctttcaaaagctggaactccatcctcaacgtgatgccgataggggagg

SEQ ID NO: 256761 - DNA, 405 bp, Gossypium hirsutum
gattaacttccctcccgatttgtgctctattaggggttgaaaagaaaccgatcgtcaccgtcatgcacaataccaccgagggcggtggttgaggccgtgcgaagggattttttgactctggcttagggcacccgaagatggtgctttacttggctcgagaactcgagagaataaacctcctttttccttttgggaatcggtctcaacgacaaaacaggggctccgacgaccgacaaccggctccgggtttccaggtccatggagggtcaacgggggtgaaaaccggccattttggtgcaaggaagcaaccatcgggcatcgtgcgtgccgagggcgcacatgggaggggggtacggcgcaagtgtgagctagggttttcattttcctaaacatgagtttaggtct

SEQ ID NO: 256762 - DNA, 378 bp, Gossypium hirsutum
ccctcgcgtccgcccacgcgtccggagcaagtacaggctaggttatggagtggatggagcagaggaaaagagttcttcctcatcttatgtttcacgccttgaaagtaaatataagccgggttatggagttgacaaagatgagtatatgcaatctccgtcaaggattgatcatcataacttggaaaacgacagagatgatgacataggaagtgaagatgtaggtgtattcaccatagatgatgtacatgctttcaacgtagggaggaaattgagcactttctttttcatcaggaacaactctctttatcctggtttcttacctaaagaattagccgattccatctcattttcatcatcagaaattcccaaaattctcaa

SEQ ID NO: 256763 - DNA, 401 bp, Gossypium hirsutum
ccctcgcttccgggagaagacaaatggagaagaggagtgaaaaagatcgattaaatctatatactcattgtttgcttcttccctttgatcttcctaccttgattttctcatctaccacattggttgaggacttttaatcgtctttctaagaaatggttctggacggaattgtatcatctccccttcgaaggtcagcatcaacgaggaggcaatcctcgagagatgaattcggtagctggtcaacacttgttgagaggcataggttcctcttaacagcattgggattgttggcattcctctgtactatctacctttattttgctgttactttaggagccacggatacatgttctgggttgaaaggaacagagaaagcaacatgtaatctgcagcatgtaagc

SEQ ID NO: 256764 - DNA, 381 bp, Gossypium hirsutum
aaggttttatatcggttttagcgtaaacagtacgagttgcgatggctcgagttgactcaggccgaggtgtactcacctcggtcgttacaagtatggagagcgcttttgaactggttggcttttttctatcagatctttgctcaaatcatcagagccgtcggtcaatatcctttgctttcttcttcttcgtcgtcgtcgatcacttcgacttcaacgcaccgttttaagcccttgcctgttgctgactctactcgaaccgagtctcgcgctacggtcgagatcgctgccgttttggactcacctgatgaagaccgcatcgaaaaactcagggtagttcttgacttggatgaaactctagtatgtgcatacgagacatctagt

SEQ ID NO: 256765 - DNA, 461 bp, Gossypium hirsutum
aattatttcaagtagaatttctctcttgaatcactcgaagaatctacggattttgtcacacgaatcaagattttttcctgattctttatattcgagttacaagttctttaaagcttcttttgggtgtggcaacaatggtctgatgccaagatgtgaatttagcacaaagcctctaacgaggtcttttgatttccttccttatggttctcgatgtttagtgagattatcttcctttagcagtcagcgccaatgtgcttctcatgtgtcccatgcttccactgagaggaaatccaaaaagactcttttgtatcttactgcattagtgtttgcaatggtgggaagtagttacgctgctgtcccattataccaaagattctgccaggctactgggtatggtggtactgtccaacgccgtgagagtgttgaagaaaagattgctcggcatgaaaaagatgggacag

SEQ ID NO: 256766 - DNA, 373 bp, Gossypium hirsutum
tgtttgcaatggttattctgtttgctcatatctgttatacagtacttgctgtgagcccaattctctcggtcctcctatcgtccttcactggatttggtattgcaattagtacaaattcagttcttgtggaatacctcagatggagaataagaagacaaacacaaccacgacaacagcaaattaacggaaccttgcagcaatgaccagctaaggcgtcccaccctacatgcagaactgaccagcaaaggcggcaaccagaagactgccgccagtatattgatagtcgtgatattacattcagtggcagtaagaaaccattacaattcatttttgtcttaattttcagtttgcatatgctacttgacatttaggc

SEQ ID NO: 256767 - DNA, 305 bp, Gossypium hirsutum
atataacctctgccctaccctcgggagcgccggtttcggaacgtttgccttgcgctcagaagacatcaacccgcgtccaccgccgccaaactcgctctccaaaagctttccgagctcagcgaaccgcaacctctcgagtcaaaaagaccaaagccacaggcaaccaccagacacaatggccgacgccgagcacaactatgtcttcaacgtcagcatgtcctgtggcggctgctcgggcgccgtcgagcgcgtgctgaagaagctcgagggcgtcaagtcgtacgaggtctcgctcgacacgcaga

SEQ ID NO: 256768 - DNA, 410 bp, Gossypium hirsutum
  unsure (1)..(410): unsure at all n locations
ttcctcgcgtccgcccacgcgtccggcaaaatgtgttatgtggggaaagcaacaaagatcttcatcttcatagttacagcgttggtggtattgggtcttgtcttgggattcgggctgcttcgtcaccataagtcgcactcacacaaatgctccggtggtgactcttgtccttctcctaatttcttccctaaccctatctccacccctaattcgccacccttttcttcttcctcctcctcttacaatcctcctcctcctgccattgggtctaaccagcccacctcccctaactcaccacctacctcaatccctactgctaacccaccaccaccagctgtccaggaccctacttctacacctncgtcgcctgacgctaacccaaatcctccaccacaatctactcctcctcc

SEQ ID NO: 256769 - DNA, 410 bp, Gossypium hirsutum
  unsure (1)..(410): unsure at all n locations
ggtctgtttaagtccgggaaagagttgaagaagttattagggaaagctagtgggcttaatgattcagatgcagacgaagaagatgatgatgaggatgtggatgatgatatgaactntaatcctacaccagctcctaagcagaaggatgcacctaaagaagaaccagctgacaacagtccgatgaaaccggcaccttcagcttctgctcggggtaccccagctacatctaagtcatcaaagggaaagagaaaaggtgatgatacaaaagcatcaaatggtacccctctgaagaaggttaaatcagaacctgagtcaaaaacttctgtgaaggaggaaaatacagctgcttcgaaaggcagtgcgccttccaagggcacgtcatcctctgcaaaagctggatcaacatcagc

SEQ ID NO: 256770 - DNA, 340 bp, Gossypium hirsutum
cccacgcgtccgcccacgcgtccgccccctccatggtttctcaagctttttaagaatcacacaatttcaaaacagattattgtattcatttttgaatcattctctgaaaacccaaaagaaaaaccttggatttttgttcatattttttgttgccggaaatatgtttggttcaccggagaaaccaatttttaagcgaacttgtagcttgttaagtcagtacttgaaggaaaaaggtagctttggtgatcttactttgggaatcacatgcagtcacaacgttgaaaaagggatgccggagatagtccgtccggcgacggagacgaggacgaccaccatggat

SEQ ID NO: 256771 - DNA, 307 bp, Gossypium hirsutum
ttattgagagattgaaagaggagaattctatatttagtagaaaattgttatgggtatttggagttgtgaaataaaaatggcatggacaaagagattaggttgcagagaatgttgtatgtatagagatgaaaatttcagaaccataattttccaggcttacaatggcagccgccggcgccgctgctactgctgctagtttgtggctttttattgatattattctcttctcttttctttttctgttttactatcatacttttgttttttctttttgggtataatttgatgaacactttacttgtaaaaa

SEQ ID NO: 256772 - DNA, 352 bp, Gossypium hirsutum
tgcttatgatgatatagacgagtatgactttgtgggattcattttggggcatataccaccttgttctagtgtttgcataggggtcctgtgtttattgcagcagcgatgtagaggcagttccgacggctctttttttttgtcttccaattcatggggaaatttagttgtctggtgaaaacatccataatatggaggatattattgttacatgaaccatgcaaaagtcttctagatggttttgggcagttttggtgttttttacctaaaaaatattcatatgatgttttggcaaaaggttaagaagtgttttcattgtaagagtatacaattaaccctatttgtttgtgcatta

SEQ ID NO: 256773 - DNA, 308 bp, Gossypium hirsutum
tcggttccacgcgtccgggcacttggatttgaacttattagcgctgagttagttcaattcggtcttcaatgtggatatttattatcttgtggagttgaaccaagtacaggtagtcatttcatgtgcttaacacttaggtctatattttgacaggtaggggatgctttcagttctgcaaatatatgaataaggaccaaaattcactggtggacagaaagctcgctcatattggtgagagggccagactgttggagacagcatattttaactagcctgaatgtgcactagtagctacatatatgatatag

SEQ ID NO: 256774 - DNA, 259 bp, Gossypium hirsutum
ttcacgcttccggaacctgcaacagcttcacacttgggttcaatttttttgatttaattcttctatgcagatggaagctggatggaaggtgtggtgtatatttgcattacacttcacatttacatttacccatatccatttgaacctcaatttgagatgttgaatagaatttggcggatgtcatgggtgaactgcaatttgcaatggaattggaacgttcaccttctcgtcccttgtggtacgagttggtcagtcggtt

SEQ ID NO: 256775 - DNA, 304 bp, Gossypium hirsutum
acgtttcaatttttttcccaatcctccacccccaccatcgagacccacctcagtgtcctgcagaccccttttcaactgcaaaaacccgcaacaatacctatcaattacctgctcttcactgtcctgtacaccctcttgatctgcatcttctctctcttcgccaccggtttcatgactaacggcgatatccacggcttttatggtcgacccgtgaagatcctatccgctgtcaagtgagctttcacttattactagcccctcgtctccacttgccttgtaacggagctgatcatttctgggatcc

SEQ ID NO: 256776 - DNA, 126 bp, Gossypium hirsutum
tttagctgtggttcaacctaagggggctcaaacctggtgggacacgtattgtatgttcaaaactactttgcttcaaaaaatggaggggaacgagaaaactaattgtggtgactggatgatgagtgc

SEQ ID NO: 256777 - DNA, 436 bp, Gossypium hirsutum
tttcgttgtcatccatggagttgcagcaaccaacagctagtggtagcaacaagaatggtgaccatgaatcacagtcacagatgttaaggcctggccataaacgtggtggcaggttcaccttattctttgttttatcaactttgacaggattgatgatagctggatggggatggctgacgaatttgattgtatatctgatcgaggaattcaatgttaagagcattgatgctactcagataagcaatgtagtcaacggttccgtcagcttgataccaattatcggtgcagttttggctgactctttcctcggctctttccatgtcgtttcaatctcttcactcttctctctactgggaataattgctctaaccttaacagcgacacttagtcacttgagaccacaacactgtggaactggttcaaccttgtgccacac

SEQ ID NO: 256778 - DNA, 478 bp, Gossypium hirsutum
aattgcaccgcattcaaaaagatcgttgaccgactcattaatataggcgttgtcaaatatgatgtggcctccagtgcagaaatttcgctacccaatcatgattgataatggagtgaatgcaatatatgaagaagtgttgggaaatgttcacatcaatgccatatatcaaaacacaattgaaaagggtatttatagatattcacccttatcaacttgaagatgttctacataattggactacggaggaaattcctatagtttttagagcttactcagagtaatgttcaaaacactcttattgcttttagcctataagtgataagaacaccttagtgaaataggttcatgcctgaacgttattattttagtgaaatacatttttgtgattgggttgaaccaatattttcattctttatgaataattcaagattctttcattcttttggattttctttcaaatcattcattcataatcata

SEQ ID NO: 256779 - DNA, 332 bp, Gossypium hirsutum
gtcagcctaagtaaattagaatcccaaaaaaggaaaaagtttgaggaaagtacagacgacctctctgaggtttctgcttgagatggattagttatcgtaataagttgcgttttgtgtatgttcttttcggttacatgttataggcttagggaattcgatccttgcttatctcaactgttgaaactgaaatctccaaaagcttaaccacaaaggcagtgtacgttagaaatttattgattcccttattgaaagaagaattttgatggggtcttcttttttatgtacgacacaattacaacaaatgaaatattggtaggtctgcttttcacttt

SEQ ID NO: 256780 - DNA, 480 bp, Gossypium hirsutum
tttttgttttaacaacactgatcaaagctttaaagtaggggaggcgtttgggttagaaaatcatcattgggaaggggaaaacttgagaatgggagaatgggacttagagggtttgatggataacatatcttcttttcctaatttccttgatttccaagttgaataactatatcttccattttcaattctacccaaagccacatatagaaaattttgggcagatattttcatacttgaagtccttgccatctcagaacctccattttttaccccatttaatccttgttattggttcattatactctcttttgttttttgggttttattttcaatttgttttagttttatatccggcagcttgcataaattgggacgtcgtcgaataagcataaaataggtgggagattagcagaggtgaagcttgttgtacgtaaatgtaagagcatgaggcatgcaagggggatcgtgcaagaaccgtcg

SEQ ID NO: 256781 - DNA, 460 bp, Gossypium hirsutum
cattattttcttccccagtttgaaacatcttaaatttcaatctatggacgattggcaagagtggaattatggacacctactcactacaatgccacttctttgttctttgaaaatcaatagttgcctcaagttaaagtctttgccacgccatcttcttcagaagacaactctgcaagtattagatatcttcgattgcccgatcctgacagagcgttattcgagaaatgggacaggggaggactggcactacatttctcatatccctacgatcacaattgatggtgaagacgtgaaaagagatgggaattgatcaaactcttcttggcttcaaagcattgggatgcaattagtgaaaaacgagcaaaaagaggccaaattgaagcacaaatcattgagttgtggccaaatcataaagatgggaaggccaaggacttaacatcaaaatttgactttgtaaata

SEQ ID NO: 256782 - DNA, 390 bp, Gossypium hirsutum
tttttgcattctactgcctccattggatttgatcttcacttccgctcgcaaattgtggttttcttggtatagcttggattgccttatctcatttgccttttttcatgtcgtggataatatctgattgtttgcaagagtgactttttaggctccacacctcctagcgtcactggctttggcaatgtatcacatgtagtagtcacggagagttggactaggcagggcaacattcttttatttgggtggcatgtatctcatctcagttgcgttgatattttattagtccttgctataggttggtaaacaaggttggttgctgtatatggtttgcatttgttcgaacataatggataattcatggtttgagcaatatatatatctaaaaactta

SEQ ID NO: 256783 - DNA, 130 bp, Gossypium hirsutum
tgttctctctctctattctctttggcttatctatcgctttgatttcgcatacttgctgtgcatcgattagacagaaatcgagtcggaggacaaagaggtgcaggagagatgtcgccaggagctgcaaaaa

SEQ ID NO: 256784 - DNA, 302 bp, Gossypium hirsutum
ttaggttctctactaagaactttcaagctcctcgtaatcttgcaagatcaaatggaatggttgtcaacttgttcttacctgttaaccagataaattgtgtatattcttgtgaggtccgtcttttagccgtaattgcgctgtatggcttagtatagaagtgaagtacgagaattcaaagatatgtgtaataaggatcatgattctgccgtttgaatgtaggtagaaggatctccatgacaaaatatgatagatttcttatctattctcatattggtttattaaattataaccttagttatggc

SEQ ID NO: 256785 - DNA, 166 bp, Gossypium hirsutum
tttacttactgccagggataacgagaggccacgggggtctaattggactggcgaagaggcagatgaagcttaaaaagggacatcagctactagagatgctcctgtgacagggggtacagatacagatgcaaaagtagaatctgacttgactgcaggctttaatgca

SEQ ID NO: 256786 - DNA, 380 bp, Gossypium hirsutum
ctcacgcttccggcgagctgtgctgaggtttatgtgatgcagaatcggcagaaggagaagatgaagagaatggaagaggagaaagcaagcagaggcattgaagagtcgacaaagcctcaacctcatacggttgttgttgggaggagtaaggttcagcctggccaggctgcgcccgactctgctagtgttagcgtcagtgaaaaacagggatcgggagatgtcaatgcaccttaatttacagcttctattgattatgtccatcactttatgtatattctagagattatgatcggtctgctaaatcggtgagaatcttttatatataaatagacaagtctcgtaaaaagaattatatatatatgttgattcttcctgtcggc

SEQ ID NO: 256787 - DNA, 335 bp, Gossypium hirsutum
gtatatgattcttttgtcgatgccgtgactacgtttgctttggtttctggggaagctgtcggtatactcgtcgagaagacacgaatgtcgcttcaggagttattggcgggtttgccagagatcgccgaagggttttcggagatggtttcgacggtggtgacggatttgtggaacaattgcatgcaagctttgggatatgttacggaaaatgcttgattctaatataaggttaataaataacggctcgcttatttttggcaacttatttttgcataaaatagtaacgattttgtctctaaaaaccaaaagttatgttaaaatgtgtgccttttatg

SEQ ID NO: 256788 - DNA, 104 bp, Gossypium hirsutum
gtctatatggcatggatcgaaagtttcgctaccgtgttcaatataggggttgcgaaggctttcgacattggcatacaaatggtttatgttggcaaaaacaatgc

SEQ ID NO: 256789 - DNA, 443 bp, Gossypium hirsutum
ggatagtgctgcagaactacttcctgagcctgcgttacgtcgaggggattcagtctatcttgtgggtttaagtagaagcttacaagcgacatctaggaaatcagttgtgaccaatccatgtgctgctctaaacattgcctctgctgactgtccacggtacagagcaacaaatatggaagtaattgagcttgatactgattttggtagtacattttcaggcgttctaacagatgagcatggaagggttcaagcaatctgggggagcttttcaacacagctgaaatttggttgtaatacatcagaagatcatcaatttgtgaggggtatcccggtttatgcaataagccaagttcttgataagatcatagctggtgcgaatggaccacctcttctcataaatggtgtcaaaaggccgatgccacttgtaaggattttagaggttg

SEQ ID NO: 256790 - DNA, 340 bp, Gossypium hirsutum
ccctcgcgtccgcggacgcgtgggatctcctccatataccatagcccccgccgcccgtggcagcaaccacctctttcccatctcctccacacaccaagcccaacaacttagccaatgtttaatcaagtcatttcagaattgaagttacacacacccaagttccaagattggattttatatctgggttcttttgaaaaaattgattctctttgttttctttgtttgtatacctgtgtgaatttttttaagacatgtcgcgttggttggtgtatattggttgacatgtaaaatcaataagatttatagaagctataaataaatctatactagttcaagttgc

SEQ ID NO: 256791 - DNA, 458 bp, Gossypium hirsutum
gtcttgctgaacggctcttgggtggtcatcgccggtgattcacaagcacgattgttcaccctctctttgctaaatctgattttgggtcctcaatctcaacgcatggattcagttcgagctgatttgttcaaaaggcatagcgattacagcgttttagttaacgaaaccggtatgaaattggatttcatttgggcaccttatgttatgaatttgaccaatttggtgatgaatttcaagacccaaaagaattgccctgatgttatgatcatgggtgctggtctttggcacatgcttcatttcaccaatgcatcagattatgatctgcacttgcatatattaaaaactcaagtagtttccttgttgccattttcaactgagttagccatgaatgaaccggtgactggctcagtccccatcaagtcatcccacctgttttggctcgggatgccggtgatgat

SEQ ID NO: 256792 - DNA, 379 bp, Gossypium hirsutum
tgttattgttgtagcttaatctagttaatctaggtactaatttgtgattctgtaaaagctttgaaaattttccattgttatttttgaatctttttagttgttaatggtttggcttgaagcttgataatgagtttgaattaatttataaagtgattttaagtaatttcaaattaaaggactaaattgatagaatagtaaatttagtatagaattcttatgaaattttagtagttatggactgaaaatgaataggaataaatttagtacaagggtttcggggctaaattgtgataattttgaaagttttgggtttaaggactaaattaaataaaaggttaaaagtttagtgttaaagtgtaaaattttttattaagggtca

SEQ ID NO: 256793 - DNA, 373 bp, Gossypium hirsutum
ctttcgcgtccggccactcgtacgatccttaggatggggtttggtgataattacaagtttcatgctgctggaagagaagatattgatgtgatgaagttctagtttgtgttgattgtttgcttaaactggagacatttttgtcccccacaaaaaatcagtgagtattgtgcttatctatggaacctattgcaggtccgaatgttgggttcaggcaggccttttctgcttgagatacaaaatgcacgccaagttccatccgaagagactgttaaggaaattgaatcaaagataaatggcttggagaataaactagttggagttaaaaatcttcaagtagtaggcagtcaaggttggacactgatgcgtgaaggag

SEQ ID NO: 256794 - DNA, 444 bp, Gossypium hirsutum
tgtttttgcaacccttgacatgcttttaaagactcctcaagctcaggcttgtgccgaggacattgccatctgggttaagaaatacatctcaacgcgaggtcatgagttctcttattaagtgggtggtttcaaatgcgggaaaaaggattatgacaatgcctcatccactggcatccttttttgtttgaaaaagagaacaattacaaggatgccataaaagaggattcggacaatgtattgtatttgttctttcgtgctaatccgaacttcaggtttgcacctcggtttccaggtttatcctatgccctattctcttctttttttgtaagatagaacttttttctgattgtagattagtgagttgactcagttgagttgatattacttgctcttgagtgctgcacaccacattgagattttgtcaatagcattctttttttttta

SEQ ID NO: 256795 - DNA, 262 bp, Gossypium hirsutum
gttaacaaaccagagaccactgcatttctttgtattctgattctgagaggtcatgggttaacccgacaactgaactagaaaaagagtaaatattcgcccgcgaaaatttgagtttcattttatttgattgttccatttttgtcgatctgaatctgatatgaatttgaaaaaaaaaaaaaaaaaaaaaaaaaaaaaaaaaaaaataaaaaaaaaaaaaaaaaaaaaaaaaataaataaaaaaaaaaaaaaaaaaagggggggc

SEQ ID NO: 256796 - DNA, 368 bp, Gossypium hirsutum
ccctcgcgtccgattttttaacttataattgtaaattattgatttttattttttatatattttttacaattttataattttgtttctaatttttaataaattttagatgtttctaatttacaccttgattccaactatatttccaattccatcccttcatctctatgccatttgaccaattcgcagtcgttgcagcttgagagaaatcttttacatggttccatcccttcatctctacttcatttacctaatttattgtatctatccgtggcttcgaatcttttggaaggtcccataccccttgatattgagagtttgaatgccctgcaatacttagatctctcagacaacaaattgagtggaaggat

SEQ ID NO: 256797 - DNA, 163 bp, Gossypium hirsutum
tgctttgatgtcttctagtggatcacctcatatgggattctctagaagctctagtagactatctttccaggatgacatggatgattgtgagctctcttgcccttttgatggtgatgatgtcgatgtatctgattcattcagtcaaaacacaaaggggaaaaag

SEQ ID NO: 256798 - DNA, 321 bp, Gossypium hirsutum
tttttatggggatgcatcagaagaaataatttcaactgatactactgatgaagaagctgttactgccattgaagcttaagtatgcctgtgactcggaacgaaaccccctttgttccccttacaggttcattcctttgctgattgaatttttcagtggacgatgactgaaggatttgaaggttcttcgattcacagcaaacattcaaccttttgccatacaaatagacaacattgtaaggtaaagtgtattaagttgtatttgttttgtacatgtatggtatagtggggtttgaatgtttttgtggttcaataggctgaaga

SEQ ID NO: 256799 - DNA, 412 bp, Gossypium hirsutum
cattgttctacaggttctcaaacgagttcaaacagttgtccggttaacatggttacggcatacaccatacgttgaaaggtaaactaagtacctatactataccccaggtttgcacttgatttacacttgggttgttttactgttcaatggaacaaaatattggttttttctaaaaataatttttgattggcatattaggaagcttctaataacacggtgcttaatgatgattcagatgataaaagaaaaagtaaataaaatggatattttcttaatgctgtcttatttttggaatttcaatcatttgaagctttttttgtgacttgataaaagtcgtataagctcattctgatcctttgtttgaaattgtttctatcaaaccctgttattgtcctcttccttcaacatacca

SEQ ID NO: 256800 - DNA, 317 bp, Gossypium hirsutum
ttctctcgtccgtatgtatctcaaggacacatggggcaaggtgggtatacaggagcttattagcaacctctccatagatcgagaaggaaaaatacttgttgaagatatcttcaaattagggggtgaaacagatgacgctgacactgctgaagcaggaagatcgtagggaactactgaaatttttgttgttaaaccctgtttaaagggtcattagtgcctctattacaacattattgtattttaacttagaaataatgtagcacttgacttcagtatccgctgattttaatgtacctactacaatctgaatatattac

SEQ ID NO: 256801 - DNA, 265 bp, Gossypium hirsutum
cccatgcgtccgcccacgcgtccggggaaaagccgttaccttgcccttgcatttctcatgaactgtggagtcctcttgggtttctattgttggggttgggagttcttaactgcccttcttcttttcttcccttatccttgaattaatttcttcttcgttctatttaattttacacaatacttattatatagatttcactttctgaatttgtatggattttatgatgggaagtgataataacaaaggcttgtttgaatatgtaagg

SEQ ID NO: 256802 - DNA, 372 bp, Gossypium hirsutum
gcttactaaggttctggcgacagtgaaactgcccagagaaccaataaccctgatccgaaagatgactagcagaatcctcctcccgattctgatcagaaaagaactagcaagaggatgaaagtggatacgactcaagtagtagctgactgtgaatgacactctgtcacataccttccaggtgcaatcgtctgacgttgaacttgaatgacctgttttgtttttctgggtttacttatcattctgagctgaaaattgtatcaggtttcagctttatgcttgtggatcaattccacagttcttttattggtgcagaacaattcaatttagatcattgaagctttctatggatcatgaaaaaaattcccttctttt

SEQ ID NO: 256803 - DNA, 347 bp, Gossypium hirsutum
gcgtcctcgcttccgcccacgcgtactgccacgcttccgggcacgcgttcacattttggctgacgctatataaaaagcttattaaaggaaaaaaaaaaaccccgcaccagtgagccacctgagccggcatcggctggataacagcatggcgatggtacagggtcacggtgaaaaccaaggtcaaaactggacatcccgcatcaagtttctccaaaggggccaaaggaggctctccgacggagaatcttacaatctacggccgatgtccgtcccggatctaactggcgtggtcagtaaccgagacggccaagccgatgagtcgatccgacgagtcatgtatcttaatt

SEQ ID NO: 256804 - DNA, 261 bp, Gossypium hirsutum
tggttcgcggactgccaatgctgcagttattgccgactgtgatcagctgtactgaagggcacattgcatggagtttccttgataatatcttgtacaacaacgccccagcctgatatgcccacctgattctatggctactgccatttgttgtagcactagaagcagctatatatcattagtacattcactgagatacatataacaaactttattgtcccttccgcagcaaccccaccaactaaaaaaaaatcaacccaaatg

SEQ ID NO: 256805 - DNA, 258 bp, Gossypium hirsutum
gcttttttcatgagcaattgaaacttccctcttggtataccatttcaatttgtatctcttagtttatggaagaataagtgctaaagccaatgcttggccctagcatatatatatattgtaattttatacgagtcattgttaaaatttgcctattaagagaatctgtatgtaccaggaattattactttatcaccactcttttactataagaaaatatttttgggttacagccaaaaaaaaaaaaattataatatattc

SEQ ID NO: 256806 - DNA, 254 bp, Gossypium hirsutum
aggtggaaactaacagcgacattataaccaaaccaaatgctaacaaacaatggcacaccacataaaaacaaaaggaggaggataactgtgactcatttcaatgaggtccaatgacacaccagaacaacacttaaatgaaaacctggaaatgggccgaataaagaggttgaatcttttttttccaacagagtaagaagcaatgccttgtaatcccctgaggtgtacttagcaacagcttgatcaagagacacact

SEQ ID NO: 256807 - DNA, 506 bp, Gossypium hirsutum
tcctacgcgtccggtttcagataaaacttctaaagctgctaatagtattctgaagagcatgatgcgaattgctgaagaatctatccctagatctgctgaaaatcttgctttggcaattggcgctctttgtgcggtcttgccaccatctgcccataccattaaatcaactgcttcaaagtttcttttgggttggttgcttcagtatgaacatgaacatcgccaatggtcagctgctatctctcttggattgatctcaagctccttacatgtgacagatcatgagcagaaatttcagagcattagtggacttctcgaggttttgtgctgtagcagaagctccattgtaaaaggagcctgtggaattggcttaggattttcctgccaagatcttctttcaagagttgaagctccagatgactctaatgctaatgaagaaagccacaagatgctggaagagagattgttaggaagaatagctagaacattctctatgatattacatccag

SEQ ID NO: 256808 - DNA, 233 bp, Gossypium hirsutum
cctactcgtccgggagttttcaagagatgtaaatgggttgtgtggagtttagatttgattagccatggaagttatgctcttgatttagagtaagtttggtgagaccgagaaggttccgattttagatttaaatatcagttgtagctccaattgtatgaattgaaatcagttaaatagttgcagtattgattgattaaattacgcaatttgaatcgaatttttaaatttttttt

SEQ ID NO: 256809 - DNA, 162 bp, Gossypium hirsutum
gttttgtacggtcaaaaacttgatggaaggaacatcaccgttatcgaagcccaatcgcgcagaattggaggcggtggcggaggattaggaggaggaaacggcggtttcagccgcggtggaggcggcggctggatatggtggtctgccaaggaggatatggtg

SEQ ID NO: 256810 - DNA, 249 bp, Gossypium hirsutum
ttctccatgcacgagtgatggacacatcctgtgtggtcaaatatgtgcatgcacctatgtatggaaaaccatctttgaataacttgtgcaagtccgtactgggatatgaagttcgaaagcctgctgctgctcataactgtctacatgaggcatgtgctgcaatgaaactagctcttgctaacatggagcggggcgaaactaccctgattccagatgtatggacatgctcttactggtaatcattaattt

SEQ ID NO: 256811 - DNA, 342 bp, Gossypium hirsutum
gtaccacttatggctgtgcttcttgccatgtattactgttttgaaatctgataagagtcggccttgctctcaattttttataaatcttgtagcttggatatcgagtaggttgaaggttttgctgcacgagtgcagtgcccgtggcaaagaccagtttttcttagttgtctcccctccaaacagcagtgttaattccttttaccttataattttgtaggtatgttcattcttctcattgtcttcctttttctaaaagaacaatccttgagagctacatatgtttaatggatgcatttcctatttgatttgtgtaagatatctctgccattattcatttctatg

SEQ ID NO: 256812 - DNA, 503 bp, Gossypium hirsutum
ggtatatcaatcccatatttccatgaagttgaagtcatttttatttagatttagtccctctataaaaaaaagagtatggagttcttagtttcaatactcaaaatcattcctttctaaatttcaagccatttcaagatcaaacacccaaaagagaggttcacaaaatggatcaaagagaaaacaagaaacagaaatctttggttcaatttatgaaaactcagtttcatgggaaatttcctcatttgatcctttcggtttctgttttttcccttttgttgtctcattcatgttggctttctttgctccgttgttttagcttcaatttccacaatacactccctttccaattatttagtcataatatagataagagctacatgttccttccctgcaatggcctgcttgtttttctagcaaaattctcaggatctatcagttcatcaaagtacaataataatctcagtgttcttgatgatgatgatgatgaagatgaagatattccc

SEQ ID NO: 256813 - DNA, 163 bp, Gossypium hirsutum
catatgacataagaaggtagcatttgtcaggaatggtctgtatggattacaaaatctcaaaagtacatacttccccatgtccatcttcttgtacctcaaagtcgcatttgcatagaaatttctgcaatctatcaagaatagtaaagcaattcaagtttttatt

SEQ ID NO: 256814 - DNA, 192 bp, Gossypium hirsutum
aaactataagttcaaataaaaattcacagaatctgaacgatcaaatcgagacttctaaaaatatttgaacctgtgtttaatcgctggtgttgctttcatataattttttctccttcacttaatagctcaatttaaattggcgcatttacgcctgagttttaattataattaatcgaaagggatgtacagatg

SEQ ID NO: 256815 - DNA, 418 bp, Gossypium hirsutum
tcgccctcgcgtccgcccacgcgtccgccgaccctgtgaccgtcttcgacatcaaatactacagccgcgatcaacgcaggaaccgccctccgatccgccgtaccatcttgaagaaagatgacgtggtgaagatgatgaaagagaaaacctttgatgtcaacgattttccaaaggtctacttgactgctaaagttgaagaggatgagaatgcagttgggggaggctaccagaaataggtattgtagcatagcaatttcttgagacacttgaagtcaaaaggggttgcagtttcggggtttccgacattaataaggggttgctgtccacattttgtttatttgtttggtttttctttttcagttaatcagcatgcttgtattaatccagatgcaacagtagttggatgatgaatgatata

SEQ ID NO: 256816 - DNA, 393 bp, Gossypium hirsutum
gttgtcggtttcagttcccgaccatcataaggacccctgatgaacatgaggtgcccagagtgccatcgcgtcatggagagatacacatcattcatctgttgccatgatgaccaaggcattccaggctcgctattttaagctgggatcaggtttcatcactgtttttccatctactgttctcactaaataaagatgttcctatgggactcaaattaaaaaaatttcttctaaattcactttggctgctaaggatttgtggttgacatgtattgccggtgggcgctttgaggcctaagttggagtagtttaatagttaaacgtaaaataatgatgtttggtttcaacattattgtcaagtatattatgttacaaactgaaaacttcatttgacta

SEQ ID NO: 256817 - DNA, 413 bp, Gossypium hirsutum
gtttgtccttctcaagaacgagatggtgattacgggcacagatcatattctgcaggatatgaaaatgccgatggaaatggttatggcgagaaatctgcaattgagcccgagaactctcgggctgcatggaggcgatctccatgtagatcatcaaggtctccaggtagatattcaaggtctccttctgggtctagatcgagatctgctgaccttcacgtaggcatagcagacaagtagcaaactttagcctctgggtgcatatggcatctatatcagatggtggattcaggggtgattagtctttttgtgtgcttatctctatcattttgaatgggacatctaaatttgtggcttgctttcatatttgttctatctaaacactgtaacgaaacacaaaaaaaaaaaaagggcgg

SEQ ID NO: 256818 - DNA, 444 bp, Gossypium hirsutum
cttacgcgttctaaaaaataaacgaaatcctctgaaagaggattcgtgggctgattccggtgctgttgaacctccgttcaggagttttctcacgcgctcactcgccaccacgcacggcggtcggagggtcaaaaccttcccccttttcagcgaaagtcaggtaatctcttttccttttcactatttgtaatatatgttaaaatattcagctttgtattagattggctactggtattgtgagtcgatcttactgcactctgtcgaatttgtttgtatatttctctcttcgtaaatcgcgtgtatattattgcctttgtaaaaatcgggatcccttttacaatgaaggtattcgggctttatagccactgtttacagtgtatgtacatctttattttatttccttgccatatttgttggttctgctccctcttatttccttttaca

SEQ ID NO: 256819 - DNA, 132 bp, Gossypium hirsutum
ctcaccagcgccttgggctcccaacaatccgttgcaaagctcgacgaggaaccaaagaaactctcaggcataatcttcgctgaacggaaggatatgctcttatagtgcatttcacaactttcattatgcact

SEQ ID NO: 256820 - DNA, 308 bp, Gossypium hirsutum
gttagtgggaactccctcaaaatgggctctggtgccactttgggaagatatttcttacttagactgatgatatccaattggaaatgaacaacgatttctcgatttccaaagctgttgctgttggggaccctgccacatgctgattccaagcaatggcctaactgatcccccaccccgttattgatggtttgtttgatatcttttcggggttaattcaatcgtaatttttatattttcccttcttacatgttgggatatgatatgctgatcggactagttgttaatcaatggagagacgatttgccttt

SEQ ID NO: 256821 - DNA, 259 bp, Gossypium hirsutum
cgtacgctttgtcggacgcgagggcggacgcgggggcttttcttctttagtatggttggttttggggcctaaaaggaggagctctagaaaaatgaatcagtggctcaagctgtgatccttcttccacttcttttccaggcatggagcccggggtccgttccgaagtcgcacccagagacgagtctacccgtaccgcgctgtgctgtgctgtgctggtgactgcgtcaatggctaaacaccgactaatcttatttgcaat

SEQ ID NO: 256822 - DNA, 385 bp, Gossypium hirsutum
ccttcgcgtttttttaaggagaaaattaatgttatttaccgggccatatagtcgacggaagataattctgagaagctgcagagggcagcgagggagagagttgagcggtcaaatgcaactccgataaataatgaagatcagcacagtgctattgagctggaggaaaacccaaggtccataacattccaggagaagaagatggaggaattcgaggcagagagggagaagctaatgaaaagccatcaagaccgaaggttggcaatcacacagcggtactgggaagagctgattgagcttgaggaagggtttgaaaaagaattgaccctgcttatgggaaagtacaaccccgatcgcctcgaggaagagactactgacagccttgaag

SEQ ID NO: 256823 - DNA, 392 bp, Gossypium hirsutum
tttcgcctactcgtccgcccacgcgtccgcccacgcgtccgctcaatttgattctttgctgatttgaggattttatttcagatatggaaatttaaagctctaatcttttaattttctgtttcgtttcggatccgattgtttagggttttcgtaggagtttctcgtgacttggcaactcaatcttggtccgcgcgcaaccccgtatcttttggtatcagattttgggcattttgggtgttcttggttgatttctaaactgatctcaatattttaaagcaaaaacagctgctttacccagaataatatttcaaaaaaaatttatttgagtgggtaaacgttgtcaaattgatctgaaattttacatacatatttttgacactgtgattgaatat

SEQ ID NO: 256824 - DNA, 383 bp, Gossypium hirsutum
tttcggttttacttgctagcttcttgaactccgttttcgaccaaactagctccaaaatgaggaaatcaaagtccaccacacagtccatgaaagatgaagaagagagccctggtggaagaaggaaaaggaggatcagcattagccatttccgtagctccatcacggccgataccaagtcggtttattcgtcttcgaattcgggttccaggacgcccccggcttatgcacacacgcctgccaaaagctacaaggattttagaagctatttagaccataaacagcatctggcagcatcatctcaaacatagaacaatattggacaaacaaaatcaacagctttacaacatgatacaacaaaagactattcttggttggatgagaaa

SEQ ID NO: 256825 - DNA, 380 bp, Gossypium hirsutum
tcgtttttaacctggcatatgtagagttagaactgggaaatcctttgaaggcgctctctgcagcacgagctctcttagaactgccaggttgttcaagaatttactcctgtctaggccatgtctatttggcggaggctttatgtttgctgaacaaacctaaggaagctgcagagcacttgtccatttatttatctggggaaagtaacattgaattaccgtttggtctagaggactgtgagcagtggcgagtgaaaaagcatattgattgtgaagaagcaaatgttggagcagcagctgccaagaactcttcccccgagggcttagaggatttcatgcttctcaagcctgatgaggcacgtggaacactttacgcaaacctt

SEQ ID NO: 256826 - DNA, 426 bp, Gossypium hirsutum
  unsure (1)..(426): unsure at all n locations
cccacgcgttcgcccacgcgtccgcccacgcgtccgcccacgcgtccggtcaaagagtgcttgaaattgtcgggaggtcgttttggttgtaaacaatctgctgagaaaggatgcaatgatcctatccgatgctatggctaagttgccactttttctgtatgaacttctgcttttgtctatggaattttaatgccttgtgttatctatgttgttactgaaggtggtggacttgtaattattcataattccaaggcagaccgatatctatgttatgtatatctacagtgataggataggacatgatgtttgaactttcaaatatggcgatcatgtattaatattgaaatattacatacctttatggtggaggatgtttccttttcttccaaannaaaaaaaaaaaaaaaaaaaaaaaaaaaagggcgg

SEQ ID NO: 256827 - DNA, 389 bp, Gossypium hirsutum
ttcctttcgtccgatcggctgtaatagccatgcattcccttcaacgttgaatagggatttcatccgccgtttctttcctattttccattttctgccctcagcttcatcttctcctacgttttcttctttcccaaattgcagagattgaatgcaaaacaacccaccccagaagctgacatgccgattccaaaaccaaggcctcgatccccaagaagcttccatcaaagtcattgaggatcttcaaaacgtggtgatgagggtcgtctcctccaactccaaacccaagaaagacaagttcttgatcgaaacttccagaaagattgacagtgtcaacaccaggcttgctgttgttgacatgaagctcgactccaagcctggttatttggaga

SEQ ID NO: 256828 - DNA, 438 bp, Gossypium hirsutum
taaaaatttgtagaatttggattccatcaccgtttgggtttttccttttttttttcctttgcagaatatctgaaaatctaggtggtatttttcttttactttgggtggctttttgaagaaagtggtgatcaaattgcctatttgttgattttggattttgctggggatttgcatattagattgcgctttagttgattatatacatatggctgtggcttttactcacctttcatgggggttatggagtggtaaacatcaagaacctagaattgctaatggatcttctttaagttcttcgccggatgccggtttattagattcggataatctgaagtttccattggttaagagagctaatatggcgtcttcatctagaaaagttaggaggaaatggcatatccgtgaagaaagaaagatagatagggaatatgatgtagt

SEQ ID NO: 256829 - DNA, 195 bp, Gossypium hirsutum
ttccatgcgtccgaaagatactaaatagatcagttgggaattaaaacctcatattccccaagttacgttttctagtcattaaaattaaatcccttactcccaatttgtctctttaattttttatcaatgaatatgatttgttggaatggtcattcagctcttctgctaaattttagcattggatgttgaaatgtt

SEQ ID NO: 256830 - DNA, 174 bp, Gossypium hirsutum
gcattatgtgcagttgctagagccagccgcaatggtaagttccggtatgatcaacatctctgagcaggaacttgatctgccatgtagttccttgatatgtaccatcttctttcttcctgttatacggttaaacatactttaatgattcttttgaactccggtgtgtcggttatg

SEQ ID NO: 256831 - DNA, 425 bp, Gossypium hirsutum
tccctcgcgtccgcccacgcgtccgcccacgcgtccgctatccttctcatttttcactttcacttttagtttctccaaaaacattcctttttttgtttatttatcccctaaaagcttgtcttctaatcttcccccttaattgaaaccataaaaacatttttttgggtttagggtttggaggagagatgggcaattggagacatcgacgaccccgacgatttgaccgccaagatatagctcctaaatatcctccttcctaccatgtccctgaatcttctttttctgagttttctaatgatggtgtgcctttgtgggaaaagaaattctgcactctagttggtaaagtttcgtggcggaagatagtggatgccaagaacttcactagccacaacaataatgtgctcaactgggatgattcagctgga

SEQ ID NO: 256832 - DNA, 139 bp, Gossypium hirsutum
aaaaattaagaatgccatggtaaatatggcccataatcccatatttagctaatggaagaacaagccttttttctcttgaattagtggtaaactgaaatgcaatgcaggctgtaatctttattcattattattttcatgt

SEQ ID NO: 256833 - DNA, 438 bp, Gossypium hirsutum
ccctttcttccgagcaaagagaaaataggggtacggtaggaatcagaagaagagaaagggaaaggaagatgaagaggtggtttgatccatggccggttttcttcaagagagagttcaaccggacctggcccttccttgttggtttcgctgtaactggaaccatcatcaccaagttctccctgggtctcactgaggaagatgccaagaactcgcctttcgctcagaagcacaagaggtgatcaactgatttcaaaaaccaggagtctgccacaagcttgatggtaacaagctgatatcatatcaatggctgcaagaaaggtggccatatttcgatggttctttttttttttcctttttctttttgtgaaactccaacagcaaaaatgtacaaggacacctgaaatttaataaaattaagcatgcaagtgtcttcttatt

SEQ ID NO: 256834 - DNA, 390 bp, Gossypium hirsutum
tttcatttttagctagcacttccaagccaaaggatattccatacaaactggagagtccacccctgatcccctttaccagtaacaccacatcaacggctcctgttgcaattgttggtgcgaccaatattaatgtctatcatgtaggaagcttggaaagtcagagctctgctcctgggacttctccagggtccattgatgttggggatgctctggaacagccatcatctcattgcatcacaaggataaagtcgttacagcagtgcgcatctgcaattacagagttagtgcatgagaagactgaggcaggtaagcatcttgaagcgttctcaatccagcttgtgattcttgcaatttggaagcaagcattgcatatatgtcatacacaggctg

SEQ ID NO: 256835 - DNA, 147 bp, Gossypium hirsutum
ttcttttgggatccaatcatggatgcaaatttgattgttttaaacttgtttggggtctctatggaaatgtcaatttctgactattgtgaaatgcagttgaagctttatcaataaaaaaaaaaaaaataaaaaaaaaaaaaaaaatat

SEQ ID NO: 256836 - DNA, 211 bp, Gossypium hirsutum
gcttaactgtgaaactcatcatcacaaatcttcttcatgtatatttctctttttccaatgttcttttattaatcgctttttttctatttctcttaaaagaattgtatatttattctgtgttcttatatagctttagcttcagtggacattaatggagtacagtggcgaaatcagggaaagcatatatgttccaacatgcaatgaacatcgt

SEQ ID NO: 256837 - DNA, 241 bp, Gossypium hirsutum
cccatgcgtccgtctcccctgctcttcacgcctagggtcccctttcaatcttcgattcagacgaagcatagtaagggcatcgacggcgcgccagcactggtaagaacctcttctcttcctctttacttttgttttgcgcacccagaaaaacaaaaaacaaataaataaccaagaaagcgataaaaaaaatgaagaaaatcaccttcaaaatcaaactgctatatttttattcccttttgta

SEQ ID NO: 256838 - DNA, 216 bp, Gossypium hirsutum
aagtaaatgtgaatccgaatcaaaccaccgtcttcttcaacagcatgtctcctcttcatatcaagagcttggattggaacaatccaaatgggatcaaatgtgccttagagactaccccaattctcaaccagtcaatgtacctagatgtgggcacagaccgtcgactacttgtcattgccaacaacattactcaaaatatgaatgttaaggttcatt

SEQ ID NO: 256839 - DNA, 177 bp, Gossypium hirsutum
ccctctcgtccgattagctgattgggcaattgactgctttccaaatattttggttcctttggacaactacatatccaggggaactgcacattttcttactagcacggcccctgactaccagcagagcctttggaatatgatttcttctattatggcagataaaaatttagaggacta

SEQ ID NO: 256840 - DNA, 305 bp, Gossypium hirsutum
  unsure (1)..(305): unsure at all n locations
cccacgcgtccggagatattgattcatggatcctatttcagagatgggaaaaaatgtgctcgtgaggatttctttttcatgttctgggagaatataccgtaccatctcatgagctcatgacattccattgcaattaaagtgtttcctcatagcattaggtctagaattctgtttcaatgtaaattacttggagaagggatccaatgttcttaaaggctatgttttatctttgttatatacccagataatatcaatgttattattttgttatgcatctgctattgctgagcagcattagctgatng

SEQ ID NO: 256841 - DNA, 258 bp, Gossypium hirsutum
tttataaaagcatactagctccttatgcagctcatattgattagcgatgttagaaaattggtcaaatttataaaaagtccctgtactatgtttattcggtggatttagtacccctactataatttgatcttttctagtttgtctacttcaaggaatgtgtgttttaagtcccgatgtcaacctttcagcattagttctgtcaaataatttgacttgtctttcatttttgataaaatacatggtgatgggcatatacaa

SEQ ID NO: 256842 - DNA, 229 bp, Gossypium hirsutum
caatccatccaaggttgtcatcaccaagctgaggctggacaaggataggaagtctttgctggatcgtaaggctaagggacgcgccgctgctgataaagataaggggactaagttttcagctgaggatatattgcaaagcgtctactcttgtgggatctagtttgctgtcaaggtgatgttgacgccatgaacaacatcatgttacattacctttattaccttgacctaa

SEQ ID NO: 256843 - DNA, 236 bp, Gossypium hirsutum
cctttgcgtccgaaaacatagtataaagtagtggaaaaaaacagagaacatgatgcataagaaatatataaaatatattattgaggattaggtagatagaaatgccatcaagaagtatgctgcttgtgttgatcatttgtgattagaacttatttttaatgatatggcgcagactgaaagatctttgctatatgaggtaaataccacttcttagcactagttaacgttgtatacat

SEQ ID NO: 256844 - DNA, 255 bp, Gossypium hirsutum
tccctcgcgtccgaaataacccacggaagatggctactttggcggcggttgcagctcgtaaagcacctactctagctcgaacaccccttccatctcaacccgcttctctcattcctcgcctgactctttgctcaacgtcacaatatatccgacatctctgcatggaagctgtccagtgatcaaagtggagaaatgggttgctacaaagtggattagagaccaagaccaaaatgactgactattcagtgtttctgt

SEQ ID NO: 256845 - DNA, 252 bp, Gossypium hirsutum
caattactgattagattatgagaccggtatcaatggaacttgtggttccctgcaattcctgcacttcactccaccggaaaccacctcttcaccagcgagtctcatctctgaaacgcagtgctttttccttgaaatgccgacgcacaactacatcagagctccagtctccggtgagcgttaccagcctggacggtagtctttccccttccattccttctcataaagtcaccgtccacgacagatttcgaggtg

SEQ ID NO: 256846 - DNA, 357 bp, Gossypium hirsutum
cccactcgttttagtttttcttcttctttttttacccaccttggtttttgatgtcttctggttgaaagaaagctgatgagtcgagttgggtatggaaggtggtggatttagggttttgagagggtgcattttgcaaatagtacaataagtcctgctcacttataacaagagaattctttagggtctttctaaggttgatggaatagggaaaagatttgattgggggctattttgtctgtgcagtgggaagatgatgatgatggaaagaagcagcttttagggttattttcctccttttccttccttttttttcctttcaagaaggctcaatcaatgttacaggcaaaaatatcttat

SEQ ID NO: 256847 - DNA, 199 bp, Gossypium hirsutum
ttcttactgggtctctctggattgtcttgtcgatggcattcgtctctcagaacctttcctgttagatcatcgaatccattgcttttgctcgccataacatgagggcaatgagaagcatgcatatacgtcaagctggcattcaagtgggtaactcatgttgggagccatactgtctagaacatgaaagccaacccgaggg

SEQ ID NO: 256848 - DNA, 375 bp, Gossypium hirsutum
cccactcgtccggttgagaacatggagccagaaaaggtgatactctacccacaactcttttggggttgtgtggcaatgatgcacacagattttgttcatgtctactgccaggttctggagcttttctcccgtgtgattgaccgtctatcattctgggacagaacaattgagaatgtcctcctttccagcatgcctcgagatgagcttgatagtagtgatattggggaccttcagcgtatggaatttaagggctatgatttgccggtaaccagtggcaatctgcctgcatttgaaggagtgcagcctcttgtgcttaaaggactcatgtccactgttagtcatggtgtagccattgaggtcctttctcgtatcaca

SEQ ID NO: 256849 - DNA, 336 bp, Gossypium hirsutum
ttactacagtcgatagcaaaacgatggatgtgcccgtcgaacaaaaccggggttctgaaccacatggtatggttcaacaggcacctcaactgcaacagatgccgcatacaggccattttgtgggaaaatacggctatccaatgtagagatgagatcagagctccaaaactctgtatataagccaattttatttttagagtatcaaaacttagacgtaatttaatttgtcaaacctgatgttcattttaaagctatgacattctgatgtaaaaccatgtatagaaaactaattcctttgaatttaatttgggatacatgaattttgatttaatatgt

SEQ ID NO: 256850 - DNA, 181 bp, Gossypium hirsutum
atatacgttatgatccaaatgatgctacacttttttgtattggccgcttgtaatatgttattgtattggccgctttgttgtaagtacaatatagcatgtgcttttgtgggaattatgatttccattattgccagaatgcgttgcagtagtactttttcatatttatgatccatgttttttc

SEQ ID NO: 256851 - DNA, 493 bp, Gossypium hirsutum
ccctctcgtccgggaagcaacattagctaactcgctcatggaactagaaaactcagattcaagcccccaaattcgaatacgagttcctcttgctggattggatggtgaatgttgcagttcaaatggcttcaaggatgggcagagcaacatccttgtggaagggacatcaaccaagcagattgaagtttgcatgggtggcaagtgcaagaagatgggagctgcggcgttgttagaagagtttgaaaggaagttgggggaagagggcactgttgtggcgtgcaaatgcatggggaagtgcaagacctctccaaatgtaagggtcttgaactctcaaacggaaactacaacaagaatcaatgaagactctgttagacttgggattaatcctacatgcacgggtgtcgggttgcaagactttaacctcatcgttgcaaatcttttgggcaagaacatagatgatgaatgtctggtgctctcttcttgagacttcatt

SEQ ID NO: 256852 - DNA, 327 bp, Gossypium hirsutum
cacgtttactttctctctatctccaagttatcgccattctcctgcttttaggatgcttgttgaaccccaacatggtgtatatatcaaaatacaaaacatctaatactgccacactactggttttgagcctgaatattattagttatgaaatgaagctttttatatatgtaatttattagttcatatgtatcatgaaagaaatagaagcgtacgttgtttcataacatgtaatgccttttggttaacattgatagctcgtcttcttaatggattgagaaatggggcaggcaagtaagactgaaaaaaaaaaaaaaaaaaaggtgcgaa

SEQ ID NO: 256853 - DNA, 488 bp, Gossypium hirsutum
ctctggttaccgcggagatccatcatttggttatgctagccgatatggttcctatgctggtgggcttagtgggactggtataggtccgtatggacgtggaggtggaggctatggaagttacagtggttcaggccctagtggtaattatgattcaggcccgggtgctggttttggtggaccgggtggattatatggtagtagatcaggatacggaggcagtagtcgctatcatccttatgcaagatagaacgtgtttaagatctcccataaaagttgccccaggttttcaatctcatcacatggttcgataggcactgtgcacttttgcaagttgtcactatctagaagatcaaatctatttagatttgcatgcttagtgaaaacccaagttagatcaagcatcaaactagaactgcagctactcatggtagagcaagcaaactcgataatattagtagagcttctatctttcactttaagtttattta

SEQ ID NO: 256854 - DNA, 521 bp, Gossypium hirsutum
atttttaagcacttcttgtcatctcccatctgattttcttaatcatggcttatcatcgtttgcctttttttgtgttaccctttttattaatcactttgtcattgatgagtagcaacacagtcttggttggtgctcggcgtcttttggagacatctgtgccggagattcctaaacctgagttgcctgagatgccgtccttcccaaaggttgaacttccaaagcctgaaatgccagaaatcccaaaacctgaaatacctaaaatgcctgagttgccaaaacctgaattgcctaaagttccagagttgccaaagcctgaattgcctaaggttctcgagttttcgaaagttccagagttgccaaaaccggaattacccaaggttcctgagttttcgaaagtgccagagttgccaaagcctgaatttcctaagattcccgagttgaaaaaacctgaagaagtcaaagttccagagatgcccaatgctcctaaatgtcaaaatctgaagcaccaaaagttccgagtt

SEQ ID NO: 256855 - DNA, 238 bp, Gossypium hirsutum
aaaacccacctgagggggggacgtcttaaaagacacgacggcaaagacgagggctgagaaggaaagactcacggaggatgaggccgctgatgaagagctcaagaagattaacaaagaggcaaaaaagaaaggttcctctaccactactacttcaaaggctactgctgccaaaggtgcagtaaccaagaagaaaagcaaacattctgatgaggatcactccccaactcacagccaggct

SEQ ID NO: 256856 - DNA, 251 bp, Gossypium hirsutum
caggaataacaatcttaggatgagaaggctggaaattcaggctgacaaatctcttagtagagtatccatgtttcttttctgctgcatcattctttgtcttctcttgttttgagaagtactgaatttgagcttgtatagttgcaaacaaaatttgtgaggaaaccaaatgtctaggtttctcttaacgatatttgtatgtatatagtactctcattttttaagaactgggactctaaatcctccatagaaac

SEQ ID NO: 256857 - DNA, 181 bp, Gossypium hirsutum
cgacagcttctcctttcccaacagaattaccacattggacatatccagtgccacagcgccaccttccatgccaccgcggaatccgacctttttctccgaatccgaaaacatttcccagctgttatcccatattaaactcctcattcgccgtcgtaccgctgccattgctgccttagatgct

SEQ ID NO: 256858 - DNA, 341 bp, Gossypium hirsutum
atgaaggtagaggaaggaccttgaaaggaagagatctgagaagggtccgaaatgcaattttcgaaaaaaccgggttccaagactaaagttacaccaaaaaagagtgagaattttgatttctcgttagaaaaattttcctcgagttttgttttaattttaatttactcctccttttgcaactctgattcgattcaagagatcattttcttttcgtgtaattctaacttcgagatctttaagtgatttagcggagaaaatttcgattcaggtttaattttctttgagatttgattttttttagagtataatttgtttttctttttttcgggtattttggtaag

SEQ ID NO: 256859 - DNA, 121 bp, Gossypium hirsutum
acttagataactttcccattactggacctgctagttcgcatgtatgcttgttaaagctgttgtcgttgttgctgtaatgcgcgagacagtctataactgattgctattaataatgtcttgg

SEQ ID NO: 256860 - DNA, 189 bp, Gossypium hirsutum
tcgttgcttgggtacttagaacagtgttttggtgttgaaatatagattggtggaaactacggggcaggtaggcaggggttttttctttggtgttggattgtgtgtatttgaaccaattagattgacaatgttattgtgtctgaatatatggtctagtctccctatataataatatatgtagcctgatct

SEQ ID NO: 256861 - DNA, 121 bp, Gossypium hirsutum
cgttttttgagatcttctttgtgggtagttagtttgcattactgtctctgcgccatagacgacagatgacatcttgttttctataacagggataatagcatatttggaactgtattttatc

SEQ ID NO: 256862 - DNA, 501 bp, Gossypium hirsutum
  unsure (1)..(501): unsure at all n locations
ggttctcaaaagtctttcaattctccatctccttcaaaaagttttcttcccaatggcttcaatttgcaacagattcatcagtagatcatcacccttcatcaaatcagctgttagatctaacggtccaaaatcctctttttccagatccgccgccgctccctccatttcctcacctctcccctccccttccatatctcctcttcgccgtttctcctccaggtgtccatcggagctgggatctgtgcagtcactgttgccgctacacagcgcagtggcagtggcgaggatgacttcatgcctgagcacaacatcgaggagttgccgggctctttctcagggtacactctgctgcacctatcccggcctctagtactngtttatctgttttctataatggaattgatgggtacgtgagaacatgtagctgtttcggtggtcgacctgtcatctattcttatttgagtttatagattgacactgttgaactacttagatgatcta

SEQ ID NO: 256863 - DNA, 173 bp, Gossypium hirsutum
gccgtcccagatcaggctccatccttgataatgcctactcaaatgaaacgcatgctggaagatggatcatctgctgataattcattgttggaagatgttaccatcgatcctgttgtgcgaggatgcgttaaagactgggatgccatggaagatttgttgcaccatgttctata

SEQ ID NO: 256864 - DNA, 401 bp, Gossypium hirsutum
gcgtcctcttcttgcgtccacgcgtgcgaccacgcgtccgctgatgttcactgcagtgggtcacctctaatgacttattaaactgcaaccaactaaaagacttctcaagacctgcttgacaatacagtattgtcaaatatcttagccgtatattttgcaattctatctgttgtttctatagtccaaccaagggtgtctaggaatgtttaggacatgacatgatataatccttcatccgaatttgtttgcattgtctaattggatcatgttgtgcactaggaagatgtaagaataacatgctactctatgcatatccattctgctttagttcatttgtagctagacaccttcctttattagatgtttctttgttatggaattatataggctttcaaatttta

SEQ ID NO: 256865 - DNA, 364 bp, Gossypium hirsutum
acggcctctcgtgcggttcatacggtgctttcggatgtcgtaacttaatcaaaacgaatgctcgaacatggttaccaagcttatacacattcggcaacagcatatataaattcatattttgcctactagcatttatatttagcatttaactacaattagatacatctatttgcttataaacttacctcagacattataaaacggaacaaggtaactagtcaataactttcgatttgcctcgatccaaatccgatttctttggttcttgatctaaacatattcaaattaagctcattcaaacatatgttcattcaatttagtccaaaaacacgtaaatgggaaaattatcattttacccctgaca

SEQ ID NO: 256866 - DNA, 307 bp, Gossypium hirsutum
tgccattcgtccgactagccttaaacgtatcatcagcatctctgtctcgctctctctctggagaataaatgtggctgtcatcttgaagcacaagaataatgcctgagaaaataacaccagaggacttatacaacaatctagtagagaccattgcagagggtgtctctaagcacaaatccgtgtcctcttttgaggaagagaaatcaaactcagttgtctctggctaaaagcggcttcatggacagctgaggccggcccaccatattttggggtgtggaaaacctgctgaagtttggttatggaggaa

SEQ ID NO: 256867 - DNA, 249 bp, Gossypium hirsutum
ccttgcttaatttccattctggtgtctacaaacagggaagggggtcatcggagcagattcccctttttggctcaaattgaattcatcattgaattcatcatttttacacgaattgtatgcgtggacaaacctttgaaggtgtagttttacttgtaaactctttatcagcaaagctatttaaaacaaatgattgattcaaaaaaaaaaaaagaagttcaaaagatgtagataacattaaagccaaagtag

SEQ ID NO: 256868 - DNA, 386 bp, Gossypium hirsutum
tccacgcgtccgattttagatcaggcaattggggtgtgggaggagaatcactcagaatacctttttttctttttcttttttaaaagttatttttgcaatttgaggttatggatgtctgttaaaaatggccatagttttgctgtccttttctgaatggtcctagcatgaattttccttgtgcttggcatcaaataagccaaattaaggcctctgtaatgggttttgagatttctatatattaatctcctagaacagtgacaatcatactcctgctcttgtctctccgtattcaaggtcaagggcctgtttttttttttttttttttgaaacttcctatataagttttttgtacgctgtctattcctcgaattctgactatgaaaact

SEQ ID NO: 256869 - DNA, 459 bp, Gossypium hirsutum
tgagtttaatccaagttccatcccacattctattttaaagagacatattcacgatcaataccacgagtggttacatccttcgagtaagctaactgctggtaatggtgatatcccgcacaagttcaataccatttcacactcgtatttcggtttctatgcggaccagttttggccaaagggtcaacccgtgatcccaaagctaatacaccggtggctgtctccgattgtacttgcatactggtatatgtacgggggctacagaacatcagccggggatatccttttgaaactgaaagggagcagcgaaggcgtcaagaaagtggtgaaagcattgaaatcaaaatccttgaattgccgagtgaagcgaaaagggagagtgttttggatcggatttctaggacagattcatgtggttctggaactggtggaaccatacgtcttagatgacttgaaagattt

SEQ ID NO: 256870 - DNA, 384 bp, Gossypium hirsutum
tccacgcgtccgcccacgcgtccgcacacgcgtgcggccacgcgtacggattttgatagtttgttaatttgttacaaaattaaaatgtcaaaagagttctaatgttcttaaagagttgtaataattcaaaaaagtaaataaaaaaagagaaaataatttagaaaataataaagccatttacaacaaggtaacaaggtgttaaaaaatgacaaaaatttcaatgcatgattaggagaaaattcaaagtaaacaaaagtcattaaaattaacaaagtataaaaaatacattttttaaaaagatatttattataaaaattacattttttaaaaagatatttattctttcctctcactttcccccaaattggtgtattaagaaaatga

SEQ ID NO: 256871 - DNA, 448 bp, Gossypium hirsutum
ggtcatccagggcataactgaatcgttaggaatatgaaaggaaatcacagctagcttagctcttagttcagaccatatctcaacaacttaaatcagtactttcaggcattagatgaggttgggggatgttttacttgagcagttccttgtatggttgaatcatgtaggtatctttgttggtggaagcaaggtggttcattttagacctgaacgtaacttggattctagcactgagccatcttctgatctatacaatcctatatctcctcgatcaacttgtccgacttttcccgattgtggcttccggcagccgaacagtggggtagtactctcatgcctggattgctttcttcgaaacggattgctctactgctctgagtatggggtgaccccatctgttttccttgccatagtgcgtggcggcacatgcaccacagcaatgtctgac

SEQ ID NO: 256872 - DNA, 475 bp, Gossypium hirsutum
tcccacgcgttcggttaagtttgagaatttggcttctattcactcattgaaaattaaatacgagcagtgcttggagaattgtggaactaagatggatgttaatgcaccagacccatgaaaacgaattgatgagcgtgctttggagaaagaggaggaagattatttcaacgaggaccgtgatgaagatgatacaacctcggcatctcatcctaggaaagttcagcctcagcctgtttcatccaatggattgaggccaaccgctcatcattaagcccgagatctggtggactggttgactatgaggacgatgaagatgatgaagactataagccaccgcctccgaggaagcagactgaaacctcggaggaagatgagggaacgttggagtccattaggtcaaagcggaagctgaatcccaaggaaaaggagcatgagctatccaagaagcaacgtttggggaaaagccctaaatcga

SEQ ID NO: 256873 - DNA, 265 bp, Gossypium hirsutum
tctaacataattctcattgccgtggacgctgatcgaagatcatttaataccggtgcttattatttattcgatgtgatcatgcccgcgacggattatcaaggaactttgtcaccgttgacaaatatcggccgttcgttattaccagtgaggagggatcaagtacacgccatggaatcgccgatcggtggatcggcgtctaacgaggcggtgatcgagtcctttcaaaggcaagtagctgacagatttcacgatttagcttctgtcc

SEQ ID NO: 256874 - DNA, 507 bp, Gossypium hirsutum
tatttataaggtgttttatatcccagtatgtctgtagtattataataattgttgttcagtttatactgtgtggaagtcctaacatgtatatggtcataggatttgatgaagctaaatatttgacttgcaaacaaagtttgagcaaatagtttctcgattctgtttaaaacttcgagggttgaagttttgcagagtttcttgtaattgcttgattgcgctagaaacaatgatagaattaaatattcaatgatagattatgtttgctgtcatcctggtgtttcgaagcattagtgtgattgttcttacactggtttaagtttgcagtcatagatattgtgttctcctgaataaatgactggttctgcaggatatccttcccattttgtagttatttggtcctcagcatgcatcatggtttggtccttgggagaatttgagatgtcattcatttgttaaagtaaacatttttgtgatgtgtctgtgtgcggtgaagtttgacatggaaca

SEQ ID NO: 256875 - DNA, 336 bp, Gossypium hirsutum
tttggttttcgtttcgttgaaagcttcgttcgtgttcggttcggctgttactcaaaaaggacatgttattacatccgtggaaactgtcctttttgtttgttcaatggtgatgggggttgctcatataattgcaacatatagaacaagttgttgagaaagaaggatactattggatgacaagattgatgatgaatgtatcaaatttcatgtgagtgggttttcaagatacgagaagagtctacaggacgaaagagtgaagcttcatttgaatttacgatgatatgaacttgaacaggcttaaaaataacaataaaattaaatcaatggtgaaacatg

SEQ ID NO: 256876 - DNA, 529 bp, Gossypium hirsutum
ttaatacctctcgagtatacgtgacagttagtgtttaccttggactggtaatcctgttatatgatatgtgactcgagagtgtgttccttgattaagtgccttaataggtactcttgaatatgaattgatggattattaaatcgtacaccttgagtgtactacttgagtattcatcgaaatttcaatgattcaatggccataaaacttttgacatggcatgagaattatgagatgaaatgataatgtcttgaatgataaatgcatgatgagctcatctattcttactcgatgtatatgtaaactttgtgactaacatgtttgattggatgcatgtgtttagatggatgaaaaacttgttattgtatgcttagatttacgaaacggaattgcttagtttagttttcattatacgaacttactaagcatgtaatgcttactccgtttatttttcccctgtttatagtgtttggaagctcgcgacggtggagatcactagagcattgttacactatcactagtcatttgagta

SEQ ID NO: 256877 - DNA, 201 bp, Gossypium hirsutum
caaaacaggaatgaagttgcttgaccctggaggtgctggagaatatatatatgcatatatatctcactagtgtcaacttggcgcgcacacacatatatctatatatatacacctttgagggaatcttatacagagttgctgctgaataaaccagatcgtaaatgctgagaaataattctatcttatttgctgttataacct

SEQ ID NO: 256878 - DNA, 363 bp, Gossypium hirsutum
cccacgcgttcgctctctcctgcgcctcaacagcaactgggcaatagagaggggtgacttagggtttgccgaaacttgactcaatttttggggccgtttgggtctgttccagctattgggccgttgtatttgggctatggggcattgggtatcaatattggttgtaatatttgggcctttatgatagattattagtttggtttcattctttggacttttggtttaataattcggtatttattttgggttttggttctaagtgggccccggctaaattggcccattacatatacgtatttctaaaagtattgatcaattgtatattcttctagtttgaggcgcaaccgaataatctgttacatt

SEQ ID NO: 256879 - DNA, 510 bp, Gossypium hirsutum
tccacgcgtccgtttggccttcacaataccaaatctaattttggcatctttaattcccatgttctttctagggttttgaattccccctccctggttatccctaattattcatcaagttccaattttcattgtctgggtacttttagatctccttttttttaaaaaaaaaatttcggatccttttttgttatcgtaaaaaaaaaaattcaatgtcacaaggtttctcaattgagctttacttcgatccagcacttgagaaccaggtcttaaaagcttggaatgttttggctcgtcgtcaaatcagcactcagttaattgaaatcgaatcaaggcctcacattactctcttttcaagcccttttctcgatcctgcaaagcttgaatccgttataaagtcctttgcttcaaagcaagaacctttacctatttctttttcttcaattggggctctcccaaatgaaaacaatgttctcttcctttcaccagctccaacaatgacgctcctacaat

SEQ ID NO: 256880 - DNA, 524 bp, Gossypium hirsutum
tccacgcgtccggaggccaggccttaggcaaaagttttgaagtgttgatcaggttggccttggtccatgggtatctctgctaacaggtgggtatggtgagaattctcaagtttcaggtaaagtaacttttataagcatactagaggagccctctatttgtcataagctgactggactatgtagccttatgttccatgatgctcttgtagtcaactgtgaagctttgttgcacggagttatatttgataaatatgacagttccatcattttcgtttcttctagattcaaacaaattagcaaggccagtatacatgttcattttgtaattgtgatcaccattatcgtcatcattgtcatttaattactagctgggcatccgtgttcagataatttatttcattatgtgtagtgtcaacttttctttttgttgtgagttatacgttaagatgtcaatttatggctttttgcaggaagatatttggtgtttttggttgcagaacagtggagtgcaatctaaagatggc

SEQ ID NO: 256881 - DNA, 397 bp, Gossypium hirsutum
tcgttcacgcgtccgcccacgcgtccgggagcatgcagtgactgtactttggagcgtttgttgtttgtttagagaggagaaagcgcaagaagcagtggtgggttgtagtaacgggctgaccaagtttttgttgctgatgcaaagcgattgttcttcagccactaggcaaatgtcggcggatttgctaaagctttctcggttaaattccaactcttgtttgtcaagttacgatactaagactacccatattatgccctgttgatgaattttgcttcagctttctctgttctttttttttccttcgaaggggggaaattacccaaatgttgtaaatcgttagaaaattttgttagatcaaattacccaagaatattgaatgaatcaatttggttttcgt

SEQ ID NO: 256882 - DNA, 438 bp, Gossypium hirsutum
ttcacgcgtccgcccacgcgtccgcccacgcgtccgcccacgcgtccgcccacgcgtgcggagggatcctggaagataccgagactattcacctccttataatcgagggccaggtggtgagcggcaacacagcaaccggcgttttgatggaactggttatggtcctggacctatcggaggtgaaggcatgactcgaaataatcctaatgtacgccctagggaaggtgactggatatgtccagatcctttgtgcgcgaacttaaactttgcaaggagagaatactgcaacaattgcaagagatttcgctatgcgcccactggaagtccccgtggaggctaccctggtcccccacctccacatgcccctcccaggcgctttcccggctcacccgtggatctatcaccacctggcaggaacataaacagcaacttcaggtc

SEQ ID NO: 256883 - DNA, 255 bp, Gossypium hirsutum
gctatgccccatgagggcacctttctatcactaatactctacactacgattatgaattttcttaccgcaagtaataacacatataaggctaatttaggtaagaaaatcaaaatgctcaaaagcattgctagagactatggaagtggaatgactggctctagaaatcgtatgaaaggaaattcatattctatagacagaaccagcaacaccatcgccctcgaacccaaacaaggaaaccgacaaccaccgaccaag

SEQ ID NO: 256884 - DNA, 306 bp, Gossypium hirsutum
aatgactcagacccaaaaattttagaaccttgaaggactcgacctgaaatttttagggcactgcccccaaatttagaagttaaattgttgtgggtactgaattttgtagagattgtaagttaggcttaaataaatgctaagattttgaatttttattttattttatttagagataaatatcgaatttatgtttaatatgtaatttgacatttaaactttaatttggtacaattatatgctttgaaacttaaattatggtttatatatggaaatgaaaatttgattttgattcagttgtagatattt

SEQ ID NO: 256885 - DNA, 183 bp, Gossypium hirsutum
catgagaagaaaggaaacaagcgacaacttgctgaagaaagcttctttacctggtttgctgatgctcagcacaaagatgacatggatgaaattcatgatgaggtagcagagattatcaaggaggatttatggcccaatcctctcacttatttcaacaatgaggctgatgaagaggattttgac

SEQ ID NO: 256886 - DNA, 165 bp, Gossypium hirsutum
tttttcccttggaatcttaattaataaagcgattgaataagaaagtatggtaattaactgcttgttataccagaaattctggggttatggcgaagaaccactttcatcaagctattgaaagccacacaggtggctgatcaactaaacaaccagctaagcacaccg

SEQ ID NO: 256887 - DNA, 282 bp, Gossypium hirsutum
aatatatatccacccaaagtttctgcaccccgaaatttacaaacaatccgctaatttccagtcataagaaacatgtcaagagcaaaaaccagaatttgaactgggatgcctagtcacatttttaaccgaataatgctttttccggcaaacaagctcatcaaccaaagcaaaacagaatcttcacttatactactccggagggaagacgaagaacaagctgccctccaaagacactcttaatataatagtaacagaagtctgctaaaatgaaagtttggacaa

SEQ ID NO: 256888 - DNA, 172 bp, Gossypium hirsutum
gttctagatcgcgagcgccgccctttcctttttatcatttttctctatttataaatattcaatccttcggtgttagcttatgcttattatcaggatgcactgatttttcacattgcgtgcagtgtaaatctctttaagaatttagataattgattccttagtgtcgtttctt

SEQ ID NO: 256889 - DNA, 417 bp, Gossypium hirsutum
cccacgcgttcgcccacgcgtccgaactgctccatcctctcctctgtttttcaagccgaactccccccttccaacttcgatttagacgaagagaattaaagatgtcgacggcgcgcctcttttggatgaacatgcatgatggatgcgaggaatcgctgaacgtggggtgatggggccgttgctgcagatggagaacgtgcgagcggcgcgatctgcagtttatgcttccattgctgttgaaaacatgttgtgggctagggttaactttgggccattagggccaaatgtatttggtttattgggctgtgcaaatggttttgggccccgggcaacaattgggtatcacatatcatacacgtggattttcacgtagcatttaattattttttaatttaaaaataattttatatttttaaa

SEQ ID NO: 256890 - DNA, 497 bp, Gossypium hirsutum
gacatcatgctatctttgctgaacattcttcttctgctactcatccatgccaatatatagcttactttgggccaacgattcatccctcttcctcaaattccagtggaagtatttcagatagttctagcttcaacggtcactggaatggtccatctgtgcctagtgagatacctccatcttatgcttttcctgcaatgaatctccattatcaaggttgggagcaccattcccctccattctctacatctaaccgtcgaattggtggttccggtcaaccttcaattccacctgtcagtcaaaggtctgccaggaacagttcagatatgccaagtctgggaacttttatgcatccatttgttgctagccacagttctggtactagaatagcaagtgcagttgcttcctcatttatccctccttaccctggtagcaatgcccgggctcgtgatagagttcaagctctccaggcatattatcaacaccaccaccctagcacc

SEQ ID NO: 256891 - DNA, 349 bp, Gossypium hirsutum
cccattcgttcgctcttcatatggggcttcaataaaaacaaaaaaaaaaaaacacggaaagccgcataggatcttgctactgatttacataggatattactgtctcataaataagttagatgtgttgtctgtatggggtttttgttttctttattaccttctgtcttaaaacttttttatcagtttactaccatgatgatgtttggtaggcatctgattgtgagtgttttgttgggtacatatggtttgtattgaaatgggaactcatttgtcagttaatgcatcttgttggttatacccatgtgaggtatagacccacagtagttaatggatgatgatgatgatgttt

SEQ ID NO: 256892 - DNA, 435 bp, Gossypium hirsutum
tccactcgtccgcccacgcgtccgagatgttgaaggcactgatggtggtgatggtagtagtggagaaggtgtcatagattttcatttgcctcttgatgatgacgtagaacaaaacaactccggtggcggcgaagagtgggattgtaactttcagaacttggaaccgccgcctgctaatgttctcgccggcatgtcttccggattttctggtgattttttcaatgatagttcgccgaaatgccttacgggttcttgtgatggatcttctcagctaaaccagtggtcgagcgttacagaagcatcctccggcagaagtgttaccctacacagtgagtccaccggtgtcaaaggttcaatccggttccagacctccagtcctgtatctgtgcttgaagcagtagtacttgctctgctgcaaacccggtacctattaac

SEQ ID NO: 256893 - DNA, 459 bp, Gossypium hirsutum
cccacgcgttcggtttttttcacaatccgatggtggaatccagtgaccttcgaagacatgcagcctgaaggaacatctcatagaatttcgtggccttacgtagaagacaaagcttacctttggacttggctgtttggggttccattagctgcttataccctctggcaagttctttacttcctcattgtcaacgtgctacgtcggcagaggttattaagagatcctgaagtcatgacatcttacagggaactttcgaagaaggccaagaaagcaaataacatatggtggcgtttaggtgggttgcttggggatcaaaaccgattcctgatgtacattctatgtcaagccatttttacagtggcaaccatggcactcactgtctccatcttcctatcatacaaattccacgtgattttccaaatactgaaggtttctgcgtcagtctggaatggaggaagc

SEQ ID NO: 256894 - DNA, 480 bp, Gossypium hirsutum
ttcattcgtccggtgcaaggttggagatgataacggcagcttgatgttgatatgggaagatggattttgcaaaggaagggttacaacagaatgtttggaagagattgaaggagaagatccagtgaggaaagctttcagcaaaatgtctattcagttatataattatggagaagggtgggtactgggttggagatgataacggcagcttcctcctgaatggactgatcaattggattcaggcattcaggttctcctcttatattgttgaagatgcagatgttctttctaccatgttgatgttgcatcccccctcgcaatgttgaagtctttcaccatattgaggttgtaaaagtcttctcactgtgttgatgttgcaaaacttagaattgttccccctctcactatgttgaaattgtaaaaggctttccggcattcgaaacagatccaccttggtcatcacgaatgccacccaccttgcta

SEQ ID NO: 256895 - DNA, 198 bp, Gossypium hirsutum
gttaatgcttgagtgaagagttacatttccatattgacccaaataatcagaagtttagaggtgttgtatttgaatatttagttttctgtgcagcataaataggaaatagttaaatgtaacaaggtgttttactagaagtacacgcttacagctttgagtactgattatttttgcaatttttatacgcttttctcagat

SEQ ID NO: 256896 - DNA, 100 bp, Gossypium hirsutum
gcagtatctacattctcttttgctttgagccttgctattctctcaatctgggccggtgatgctggtcaccaccatgcgacagggccatccccttcttctt

SEQ ID NO: 256897 - DNA, 442 bp, Gossypium hirsutum
gggattagccctgaattttgttagttccattttgatcttgtattcatagtgtagtcctgttaataatatttccagggtttgttttgtaaattgacttgtactcggttttgggatgtcctgtggattggttggtttctccaatgtggttcccaacactgatacaacatgatttgagctttgtaagcttcgatgcagtttgcaaagacaaatccttggcctgcaatacaacagatgaagggttaggtttagttccagtctgatttgctattagaattgaggccccatattatcctgtcctcacctccatgcatagatcaaccagcaagattaagcataggtctatgtgagacattaaccacattgtttgagttgtcaacttgacaattaacacgtttgccactggtagagaacttcctaacccagcgaggtatttcagcttcag

SEQ ID NO: 256898 - DNA, 488 bp, Gossypium hirsutum
gtgcattggagtttctatcaacctgcaagctgacaaacttaacggtgaaggcggagctaggttgctgcttgcttcataggagtggaaggctaattatagatgaatgcatacttcagtgtgaatcaaacccgttggactatctgtcatgcccgatcatgagtacagccggaagtggggtgtttccctccaacctgaagagtgatggtgatagcatttctgtatcgcacactcggattgaaggaggtgcaaaggcttttttgacgagtggagatctagcactacagcaagttcgagtcatttatgctcgaacttgtctctatttctggttcgacgttggttgtagataattggattagggaattcaatttaattcctgaatgttgttttgttttctgtaggaacaatatctaatgtagccatagccatagccatagccaaaggcattgtatgttatcagaccatttgcaacaaacgttccttttctattt

SEQ ID NO: 256899 - DNA, 439 bp, Gossypium hirsutum
tacattttcgatattaggtacaatgcttgcaagccatcccaatcaatccgatctcatcacagacgagtcttcaaagctgtatggcatcactctttaccccttctcatttccatatcttctgatcttcaaatcggactgcacaaaatgtagaagtacctttctgtatctgacagcatgttcgttcccatgagagagcaacttccgcatttgctctcattttgctctgttgctgcttgatcctcgtttttgcttttgaactgaagtcttgcaactcatccaagaagaggagttggtcaatgaacatgtttttgattctgaagctaaacttatacagtatcgacaaaccagtacggaatctggattttattgaatcaggggaaaacgtatagctcaagaatgctcaaaatttttaatgttttccctttttttggacgttaca

SEQ ID NO: 256900 - DNA, 155 bp, Gossypium hirsutum
cccacgcgttcgtgtgaaggagctttgtgtctgtaaacagaatagaatgttgttttccagtttatctcatcatgtttgtgattggattgatgctattgggatggtttatttaatgtaataaatatttcaccatgaaatcctagttatttttactt

SEQ ID NO: 256901 - DNA, 357 bp, Gossypium hirsutum
tagggtttcaagctgatatagctgtatttaatcagatgggggaaatattgtgtgaaacttatcatactgagaaagcaaagatgcttatgaacataatgattaaaaggggtatatgcccgaagatggtaagcttcacatctgcaatcagctaatagtgcaggagtggggatgctgcgtcatgagactcataatgttactcagtgacttggaacttatttgatttggctgagcatttttgtatcagatgcatctaagtgctccaacgccaatatatacaatgttaacgtatgattcgcgtcttgaattgacatcctagatgatgtagttcacccgcctaattgtttatgcaataagatt

SEQ ID NO: 256902 - DNA, 497 bp, Gossypium hirsutum
ggcgtagatcttaggactttggtcattaaagaggctgttcgtgttactgaagcttttactctatgcacatttgttgatacatacaactccgtaccttcttttatgcgtagtctaatattcaatggaaatggagcgctggcgatgagcagtgctgaattgcaaagcatgatggagctccgggaccaagtctttcgaatctgggggcttctacggtcgtcagaaaactttgatccagcacttttgcagcctattttacaaatccttcaacaacccgaggcacgcagtctaggtggccgtgtagttggtgggatcactcagcgtctggcagctcgcttactgcaacaagttcttcgaatgccaatggctcctacttcaagtttatcagcattggacactcggtgagcaaacctgaaaatagacaaccattctttttttctcctgttagttattcaactaaaaggaataacattagagagattatagcaaaaagaataccc

SEQ ID NO: 256903 - DNA, 479 bp, Gossypium hirsutum
agttattggtggacgtgagataagaattgtttttgctgaggagaatagaaagactccccaagaaatgcgtctgactgcccgtgtaagtggtcgagataggggaagcaggagaacaccgcctaggtccccaagacgccgatatcgctcttactcttgctcaccttcacctgctgggcatgattcaagagacagggatcagagggggaaagattatcaccactcccctaggcggtctagatcaatttctcaggatcgtggtatgagagatgattatcgctctcccagtcggtccagatccatgtcaagggattgtggggcaaaagatgattatcgctctcccaggcgatctagatctgtttctcggtctctttctccacgttctccacatggtgacagggacagggaatacagaaccaagcagaggtcccctagtcctagggagaatggtcagagtctacaagatgagagagatcatgtga

SEQ ID NO: 256904 - DNA, 243 bp, Gossypium hirsutum
atgagttcttgttatagacaagcttctttttttttttttacttggggtttaaatttttttgtatttggtctctttatgtttcaagggaagaaggtttgggtgaaaaggaagttggttttgccagatttggctatataattcagataggctagttttaactgaacgcccattctatttctatggtagtaagaaatgattccattaaaaaaaaaaaatcaaaaaaaaaaaaaaaaaaaaatataa

SEQ ID NO: 256905 - DNA, 308 bp, Gossypium hirsutum
tcttccttgcgtgcgtccacgcggacgctttttggaagacaccacaaagccatcctccaatcctcaaaacccaaactcttcgtcatgggaactcgggatggatttaccagagtcaagcaactaaacaagagatttagttccgcagccgggcgcaatgaaatatatttaatggaaggagttagccactttgaaacggaaggccctgcttatgatgctgagatggtgaagcttattcttaagttcatttcctcattgtaagacatgtagccacttctttaaaaagattagtgctcgatgaattgctatta

SEQ ID NO: 256906 - DNA, 511 bp, Gossypium hirsutum
gaacttttgttcttgtgaggttacctcctctcttctttcgttcgagtctcgaagcgacttaactagcttgctagtggtgtcaatccgaactccattgaacttatcaccaaatcggtgtggcgttcaaccatcttcctatacctttggttcttacctccatataggtaacgggtcaaggtccgcttctatccttcatcaaaattcaccttaagcaatataagactcggggcaatactttttagtattgaatcattcttaaagtttgagttctttatccatttccacctatttatcatctttgtaacttaattctttgttaaaccgaacctatctttcatcaaaccaaaacccatcctttgaacccattttgcctaccttccgcttataaaacattcaaactccatctatctacaaatttgaacgagcttctcgtcgacgatcaggcatcttaagtgaacccgactcaatcaatcgggccggatcacatcatttggtatcagagctactaaaa

SEQ ID NO: 256907 - DNA, 489 bp, Gossypium hirsutum
cccattccccactgtcgccgttctcaaacgaaccaacctccggcgttcgaaggcgcttcgggtcttagcctttcgccagcctcccgatttggagcggtgcgagtgtaggtttcaacggggaagcttcaaaggttcggtggccgtggagtgcgcccgtacgtggaggccgaaacgtgctgcgattgggcgttgggcgctgcgtgggtgctgttgcggcgctgaggcagatgcggctctccttactgcttagggttttttctgtgtaattttgatgtgttgggctgttagctgctaggtttaggggttattgggccacttatttgttgggccttagacgagtttaggcctgctgaaattgcctgctttgtttttgtttgggcccaggcaatttgggcttgtacacaggcaattaaaattcaagacacgtactagataaatctgtgataagtttaatacttctagatccaaatattccatgaactaaacaat

SEQ ID NO: 256908 - DNA, 502 bp, Gossypium hirsutum
gtgagtatatcttctaatctgttaagctcttgttttgcatctacattaattctgttacactagtgaaggaaccattgaattgtgtaattctttttgacataactaatctataacagctaaatttacaaggaaaaagacctttgaggaaatataaatctcccactgctgagttgtttttggttttggtgtgtcttattgttgtcattcttgcaattgtctgtcctaactcttaggtctttcaccatcacaacagagaatgactttctaagaaggttttgttaagtgaatttagggaatatcactgctattttcaccttgctcccccaatgtgtactatacaatcgaatatgatgatgtggtttgatttactagtgaagttacttgtgcatgtgtcttgttacaggataatcattcctaggcactgtaatgaatattttacttaataagttccctctttttcttatatataaaaaatacaaatttaactatttaattatagaat

SEQ ID NO: 256909 - DNA, 329 bp, Gossypium hirsutum
  unsure (1)..(329): unsure at all n locations
attttttgctaacttacataacccacacaaagaagacggagaaggtggccagaaattcggattctgtcatcgggggaatcggcatttaagggtttttgatcgtttcatttttcttcatcatcgtgaagtgcaccattggcatccactcttgtatgggaacgggatttcagttcctccgaggagttgattacagaattttgtcgagaatgcaggatagttaacaaagggctgaggggggacctttgggaaataagcgtatagaagcattgcgtcttgtcaaagcgggggtgattcacttaaatctagatccacgatggtacgccnnanna

SEQ ID NO: 256910 - DNA, 427 bp, Gossypium hirsutum
ttccactcgtccgcccacgcgtccgcggacgcgtggggaagtatttcaaggacccggcttcgtggacgagaaagaatagaagaaagggcatgcccgacccgagctactaggccagggcctgaggagaggaactatttcaagcaaggatgctatgacctcagacttgagaccgattcaaagatataggaatgaatgaatccaatgtcatctataccgtgtttttgggctgtcataatgtgacagtttcgacttctgtcgcctctgtctattccgtttagggaatgggcttattcattccgatttctgtaaatacttctgtgtaaatatctcccccagcctcggtctaaaaagctcatgccttcttgcttgctgagcccggtgcgaagcccgttcgttcctttctttctttgtcgggtcaaggagaatc

SEQ ID NO: 256911 - DNA, 199 bp, Gossypium hirsutum
tccacgcgtccgaaaaattccatcaatgtttcactctagcttttcccaatgctgttgtatgattctgtggcatataatctcaatttggaactaggatagagtcaatagaccgaatttcatgcacttgcatattatgtgacatcttctctctctctctctctctctctctgaaaatgaatacctctttgtttctttcttt

SEQ ID NO: 256912 - DNA, 432 bp, Gossypium hirsutum
cacacactttgaggcgacgaactctgaggcggaaaagttacacaaagatggagcaaacattcatcatgatcaagcctgatggcgtccagaggggtttggtaatgtttcttcttctttctctcttgcaattttcgggttttttttcagctgtattattcttttatccgatagtttgattctcttaactgctagaaattacaaataaaaaacgataaagaatctgtagtccttagtgaactcttgtagttaagctcgtagatctaatgtcttgaggcagggaatattggttcaacttagctaggcttcacagaatgagtactgttgtttctgtttctttttgaaatctattcttttgcatgctaaggctataaaatcaaagacttcgagagatgaattcttaaaaaaaaaagtatttatttgggacatatgaaa

SEQ ID NO: 256913 - DNA, 232 bp, Gossypium hirsutum
ccctttctttcgggtggtgtcaatatggagaacaatcagtcgacttttaagtgatttttaccctttttttgtttttttctcgtccttggctgttttttggcattttctttgcctgactctgtaacttggacgtagcatgtgatcacaatgtttgtaataagatccaagatgtctcagtttgaagttatagttcatgtgatcataatattttgggtttaaaacacatagatgc

SEQ ID NO: 256914 - DNA, 318 bp, Gossypium hirsutum
ccctcgtgttcgagcgggtgcaatcccaccattgatacaaattctggaaggcaaggtaagggaagccgatgaagcggttgtgaatgcacagaggaaagctattgcaagacgaaatctgggaaaacggaagcgattacattgctaaaaacgcaggcgtggaagcgattatcaaaatcatggaaaccgcaagtgtgaaggctcaggaaaaagcgctttggatattggaaagggtattcggagtagaggaacttagagtgaagtatggggaatcagcgcaagtggtgctaattgatttagctcaaaaaggtgatcccaggc

SEQ ID NO: 256915 - DNA, 373 bp, Gossypium hirsutum
gaatttcattgtttggtggtgctcgcccacgagaactggttctaaaggaaagagggatagatgatagaaatcatgagccagttcaacatgttgatagggtcaaacataatgttacgaggactgaaaaagctgctgaccatgcatatggtgaaagagtcgagaatcctcctgttgatcagagaggtggaagaaaatctgagaggaaccatcgtgttgacaatggaagagttgacatgcagaggaggaattggcgaaatgaaaataggcggaatggccgggaaactgaaagaccgcagcaagcaccgccagtgaaggagaggcagccttcacctgagacttggcgtaagcctgtggagaatactaatccagtatc

SEQ ID NO: 256916 - DNA, 261 bp, Gossypium hirsutum
ttctcaagctgtagtggattgacaaaaagaaaaggttgtaattacttggttaagtatcagagacatgatggaagtacaaatgatttacaccatttgatcatctaatttatcattttctattcatgatttctgttggtaactggatttaggttagttttcatgattgtagttgatccctcatttgggttttagacaatatatatataggttgtcaaaagcacattgattcagtgattgagtttccatctattggattcaaaa

SEQ ID NO: 256917 - DNA, 107 bp, Gossypium hirsutum
tttttttcgtgaaaactgagattgtattagttttcactaagtttgtgataacagtgttgtaaagatggtactgcagaatctggttcagtgattccatttacttgttt

SEQ ID NO: 256918 - DNA, 427 bp, Gossypium hirsutum
cttgttagatgttcccgtgcggttgccaatgcttgagttattgtctgtaaaaacaaacatcgaatgttttagtttggtggcgatggttatcaatattttactagttaaaagaactcaggtgctcttttcaggggggaaaattggaagaagattgaaaaagagggagggagttgagcattgcttgtttcgggtacaaggatcgtagtacctgttcagacaaaggagctccagcatccatgctgtgactagcaacctttccggctataacatttgcatcagtttcgagaatgatgctgcacaaagataaagaacagtcaaacagggataagagataagcattgtcacgggggcagttgcttcgggtgaccgccccttatcattctttttctttttctctctttttctttttatagagacaaaccgctat

SEQ ID NO: 256919 - DNA, 368 bp, Gossypium hirsutum
ggcctgttccaaggtaatcctgaaattgaaagtgcatgtactaaagatccactcaattccattcaatgctttaaagcacacagccctcctgaatttgcctttcaatctttaggggggttgaatgtatcagccacattctcaatgcccgaagcccttctggctacagaatgtcaagagccctttgggggtatgctagtagagggtgccggaagttctaaagacttgagaaacttatgcccttcagcagcggaagccgccgtagatgagacaccacctccatattctgatctggctctcaagcaggccacaactacttatactcgatcaacacccaatttaacagctaggcaggaaaaaacaagtgtgac

SEQ ID NO: 256920 - DNA, 314 bp, Gossypium hirsutum
ccctcttctttccgcgggtgtttgttcttctgtagagaatggagatctcgagtctgctatggtaaatcgtaaatcaaatgccatgggacgaaagaggaagagagaactggaggaaacatgtcaaaaggttggcagtgatggctctattagaagcccatgcgaagggctgaggccaagggctcggaaagatgcactccagcagttttgatgcagacaaagcatcctcagaggggctgcagacaaaagagacgaggaaaccttcaactcatgcccataggaagataatcatcaaaaaagggtctcatggatgtgac

SEQ ID NO: 256921 - DNA, 358 bp, Gossypium hirsutum
ccttggggattcttggggcaggaccatcagataaacgtcttgttagtaatgagagaccgtatcggatgcattaaattggatttgcacaaaggcaatgctttccacggggcatcaactacagtaagctttttgtgctgtgctggatgatacttgagcctttgaataatgggtgggattcttttttgggcatggaaataaaagttggtatttaaagttgagtgcttatgggtggatttaaggtgtatccaccaggcgggatttgaatccatgtaaaaagtcggctgagctaaaaaaggttttactaacatgtgcagggcatgccggagcggcctttccacaattttttttttttacagtt

SEQ ID NO: 256922 - DNA, 432 bp, Gossypium hirsutum
aaattttattgtacttggtttttcttttttacttctattattattttgctgctgagttttgttttttatgaaggagaaacagttatgtttatgggttgaaagaagaagtagatgaacatgcttttttctctgaaccttccggtacaatgaggagtttctcaggttcatctgtggatgattcatggcaacttgcaccactaacaatgagctcctcttcctcaaagcagaggaactgttctggattacagagtgaatactcttacttgcagcttcaaagcctcactgatcacaacccgaaacaaaacaaacaggatgctgatgaacattcctatatcaaatatgaaatgactgatgaattggagaaaggcgaaccccaaaagacagtccatcgtttctttgatgaatggccaccaaaacatagagattcatggc

SEQ ID NO: 256923 - DNA, 224 bp, Gossypium hirsutum
tcctctcttccgcccacgcgtccgctcaatttattctctaagaatatgaatacagcagttgagaactttcagttagttctggattcgcatcgatgggttccattaccagcagttggcttttcagccactagcatcagtgaagaaagtcaggaggatgtaacgccaccatcttatttgatggaacatccgcctcttgctgtgtttgttaatggtgtttccgccgc

SEQ ID NO: 256924 - DNA, 291 bp, Gossypium hirsutum
caccaatcttcacttatttatgttgtttctgacaagagcttgatcgtcagcttcagcccaagttaacatcacatgcagcgacaataattcatcagtgccatttgcctccctagttgccgttaatgatcccctcaggactggtcctgagcctgactcggagctgattggaaatgttcagggtattgcgctcctggctggaacgaatgcatcaagcacgcaatacatagattttggatccaataccggtaagtttaacggccgctctctaagcgtatttttaaggggagaacc

SEQ ID NO: 256925 - DNA, 233 bp, Gossypium hirsutum
tttcttcgtccggttggaacaggatgagaataatatccatcatgtttaaagaaattgaccagtttttttcttttcattataatttttcttccaatatttctaaattagatttccgttgctgccatctcaaaatttatgatacttcgatgatggtggtggtgatgatgatgatgatgatgtaaccttcaactgaagttggttgcttaattgctattccaaatagcttcgttttt

SEQ ID NO: 256926 - DNA, 291 bp, Gossypium hirsutum
ccctctcttccggttctagatcgcgagcggccgtccttttttttttttttttccccttcctttttgtgtttgattttactacgttgctgatttttgttttctttgcattttccttctttaagttatgaagcagaatagaaaagctttattgctcgggttttgaggttcggttggggaacttgttttcattctttcccttgcccgctttgtcaaaaacagtcagttttatgcatatcgatatttaagtttgtatgctgtaaaattgaattggattgatcatgtttctggttt

SEQ ID NO: 256927 - DNA, 388 bp, Gossypium hirsutum
gcttttctcgccagtagtccgctcccagttactggtggttcggtatcatggccaagcagtttgaaaggttccaatcaacagaactcaccaaaatccaaacccttggagcctcaaggtgaaaaagatgatagtacacagggaagcaatggacaagctttggtggaagattggttgctgggagggaggacatcgagccaagaacttttccctcagctgaatgggctttcaccaaacatggatgaaagggaagaagtaatgagatgccaaagagaagagagtgctgacatgcctacttttcgtggcctgtgccaaggggggttgaatgtatcagccacattctcaatgcccgaagcccttctggctacagaatgtcaagagccctttgggg

SEQ ID NO: 256928 - DNA, 283 bp, Gossypium hirsutum
atcttttaaagcaaaggaggaggtaaaggatgagaccccggaggtgcagacagaaacagttacagaggagttcattgatatcataaaatcagctgaggtgaagaagaatgcctaaggttttcggttggaagctttgagagtacttgcagtagctgatgcttgggaatggaaggtttaggatctgttccataataagagttttataaagaaaattaaatactaattttcaaggaataattcacgcctttattcacaccagtaccttaaactggattttctgtac

SEQ ID NO: 256929 - DNA, 293 bp, Gossypium hirsutum
ggcatttttggcagctcagttggaaacattcaaattgttgaatgtaggatataattaaatcccttatcccaatggaaaaatgcaatgaagaaatgatgagtgaggagtggacccatatggtatatacgatagaaaagttgggtccatttggtaattgcagatttttttaggtgaaaataagcaaaagaaattgcaggtttggggttggtgagtggggtcaatattgctgtaatatttgctttacttgaggttgaagttgtagcattgggtctttagattaaatatttaagaca

SEQ ID NO: 256930 - DNA, 306 bp, Gossypium hirsutum
gcttctacttccttcttcttctctttctcgtgaaccaaacagaaatttcctaaggaaaaaaaattcaaaagctgatgttaatttatgaataaatgttgaggatctgaattttaaaccaagcgagggagtgaaagagagacgagagaaggatttgaggaattgttagatacactagaagagattggagggaagttttttgctggttctgataactaatcgtgaagatttctttttattttgttgaagtttttcagaacctatgcatttggaagatagaagagctacttcggggagaaatttcaactg

SEQ ID NO: 256931 - DNA, 351 bp, Gossypium hirsutum
gcgatctgaggtggcacttgatgatgtgatcctctttctcctgattacagccattttttgccattttcttgctaacttgataagcttcttagcattgaccatattgctttgctctaaggttaataggaaagaactccgagatgaaaggaaaaagagggatgatttaggcttgaaactcttctggatataaagcaatggaaatttgatgaatatataactagaaggtgagaaacagtccctttaatgaatagtacaatgccggtattcattggaaacaaagacgtggtaggtagatatgtgtagtctgcaaggtgaccatgtttacttttattggatgattaacccccagca

SEQ ID NO: 256932 - DNA, 327 bp, Gossypium hirsutum
ggattttctgatcgtctaaaaaaagctaccagagctgacgagttctgaaacttgcagccactaaatgatcggataaccaggaaagaggcttttttccccataactgaagctgataattcgttgcagatgcagccgtggggcctttacggagctctgtaatcataaaaagaaaagcttctctggggaacacctttttttttgtttccctcattctctcattactcttagaagctaatatgttttcagatcatgaaagtggcagccaaatggttcaagagtttattgctatttgtaattttgtagagaaaatggagtttgctgattata

SEQ ID NO: 256933 - DNA, 182 bp, Gossypium hirsutum
cccacgcgtccgagtttactagctcttgaaatttgaccttagggttttttttctctctgtaatttggcggaattcgataaatttaggattagggttttatggaatcttaaattgttgttgttacccttgtgttggttgatgtggttttgttgtaattacaagttgctaatggaatttggagt

SEQ ID NO: 256934 - DNA, 388 bp, Gossypium hirsutum
atctcaagtaaaaaggtagaagatgcaaagctggctagagattttcagaacacgctccaagagttccagaaagttcagcaactggcctctgaacgcgagtctacttactctcctgcaccccctccaccctccttgcccgcaacgtatcagtctttcacatttaacaccatctatgtatatgtatgtatgtatgtatttgaggtcttttatagattggatgctttcgatgcagcagctctggctccgatgagtcgttgcctcaagagaaacaacgtttacttatggaacagagaaggtgagttcagttcatcgtttccttttctcccccaaacccttttgtcacttttcctttttcctcacctgtcatgcatagaacatcaatagcttt

SEQ ID NO: 256935 - DNA, 440 bp, Gossypium hirsutum
  unsure (1)..(440): unsure at all n locations
cctttttgtccggtgctagaaaggtatcccatcactacagaagatggagggatcattagacacaacaggaaatgcagagatgttgcatttcttgtcatttttatagcattttgggttgctatgatcgttaactctagctttggatttaaccaaggaaacccattaaggcttacatacgggctggactacaaagggaatgtatgtggtgacaagcatgctcatcctggccttcatcagctggaactcaagtattggttgaatccaaatcaggtttatcaaagtggtgtgacggatagccaattcaaattgtctaatgctcggagtatatgcttattggattgccctactccattagaagattcactaagttgngatctgtgattatccagagggggatatgcacctcttaatggatgactggatcgatagaaattatgatt

SEQ ID NO: 256936 - DNA, 420 bp, Gossypium hirsutum
  unsure (1)..(420): unsure at all n locations
ggaccgagtccatgcctgccacacttaaagactcagcttcctcaacgtggctttccattgctgctaatactagaacggttttcatgatggagcaggcatccggagtcacccacagttttaatcccgattcgaagacctggtacggacccttcgatctccgtccggatcggagcatttacttttcggtgataacttgtgttggggacaacttgattatgctgggtctgcttggagatgccgaggatgtaaactatgtaaaattgtgggagctaaacggggagtcgttagagtttggaaaagaaatcggggtgatgccgacggagttggtggagaagctgaaaggagagggaacaagcttgaattcaataagagtaagttgtatgggtggntttttctatatatataatcctggggagcctg

SEQ ID NO: 256937 - DNA, 277 bp, Gossypium hirsutum
gtgtctggcggaacagtcaacttggacatcaagtacgacggcttcatcactgttgttaagaagactgaggacatctgctccatcggaaatggtgtgacctgccccatcccctctggctcctactctgagcaaatcaccgagatgatcccatcttccgtcccctctggctcctactccggccaagtgaccctcatggaccagaacaaccaagagatcacctgcatcaacctcgccttcaagctgtaattgttgtgtttctattctattgtgccactat

SEQ ID NO: 256938 - DNA, 363 bp, Gossypium hirsutum
tttttaaccaatttagaaagctcgattttattgggtgcaaatgttatgcttacagcttatccacaactaagtccattattttaatattctagatgatattggcttgcttactcactttcaacctattctagttgcagttattgcaactttttcactatccacaactagatctaattatcaatgatgataatttatgaccatgattactgaatgaatactttaggtatgcagggagaacaaaaacattttgttgatgctctatgattattcatattcatgtcattatatgttattcatgttgagggagagatgaaactaaaaataagtgtggaaattattactgactgaatagaactctaattc

SEQ ID NO: 256939 - DNA, 174 bp, Gossypium hirsutum
ccctcgcgtccgttctaattctttttcgtggaggggtttttttgtacttacaaatttatccaatgtaaaatctgtgtattcaaggtgcaaaagatcttaaagccaaaatgcaccgacatttgtaagatacaatattttaatcaaattaatgctaattgagcagctttcattttc

SEQ ID NO: 256940 - DNA, 411 bp, Gossypium hirsutum
atttaaagagaaaagggggatttttctctctggggaagacccagaaccggccaagggatccggccaacccccaccgtggctccgccgtgcgccgcagcctccagcagtcgccggccactgcacgcggtggccggaattccgaaaaaggcaaacggtggtggagcagaggccacttgcaggcgtcggtggtggatggcgtggggggcatgtgctgacggctagggtttccttagcttcttcttttggttttttctttaatgtaatgggctagggtttcctttgaaattgggttttgggtaggttatttgggttttaggcttagtgggttcaatgggttttgggctaagggccaaaattgggcttgtacaattgtgttgaattctttaaatttggaaataaataatttagata

SEQ ID NO: 256941 - DNA, 478 bp, Gossypium hirsutum
gtttagtgccatattgcctttgttgaaacttttgtctcttacggtcataggattatttcttgcacatcccaaaactcaaatcattccaagagccacatttaagctcctaagcaagcttgttttcgccctattcttgccctgcctaatttttaccgaactcggtgaaagtattaccattgatagcattgctcggtggtggttcattccggtcaatgtgttaatcagtacttttgttggttgcttgctggggttgttggtggtcattatatgtcgtccgccacctgagtacaagcgatttaccatcgttatgactgcctttggcaatacgggaaatctatgtcttgctattgttggatctgtgtgtcacacttcgaattccccgtttgggcctcattgccactcgaggggtgtggcctatgtctctttcgcacaatgggttgctggtattcttgtctataccctggtttatcacatgatg

SEQ ID NO: 256942 - DNA, 530 bp, Gossypium hirsutum
ttcacgcgtccgcccacgcgtccgaacttttgccatgttgtttccaagcatgatatcatgccaaggctacttttagcagagattgtaaaccacattcctcatatacaagccctgctgcagttctggcactgctgcatggcttctcctcacctccctgttgcaggcctttcttctcaagtgcccagtgatctaaaacgtttactttttcttagtgttttaaaggacttggaattgttaacccaagctgacgatccatcagagagcctgttttggcctttcgggagctatgttttctgctgccaagagggtgccatttgtgtagagaatgttgcatcagttatgaagatgttgcatttgatgatggccactggctcaccgaaccaaagcattgaggatcatctcaagtatggagattatgttgccaaagtttctagacagtttttgcaggctagaaactttgaagaggggatacctgattctagctatgaagctggtgtcgccttggcattgcaatcatcagacctaaccga

SEQ ID NO: 256943 - DNA, 326 bp, Gossypium hirsutum
ctttctttcatcggcttctcaggggaggaaagatcaacagaggtggaaaacgaggccgagatggagaaaatggttctcctagaggacgtcctaatgaagctaaaagagctcgagcagcgtgagccagccatgagggtgatcgataaacttgaaataggttttgagatcatttttgtgccatagcttgaggaatgaactgtggctcttgtttatttataggtttaggttaaccataagtagtagtacatttcatgggtaaattaagcttgtgctgcttttgattcccttggattttgatgaggggggacaattaaaaagatgcaatt

SEQ ID NO: 256944 - DNA, 404 bp, Gossypium hirsutum
gtttaaacagaggaagagaaagcacaggcccaaggtaattactgagggcaaacctagaaggcccagaaagccagcgactccaaagcctgatggttctcaagaaaccccaactggtaagaggaaatatgtacgaaagagtacagtgaaaaacgacacatcaatcctcccaggagtagcgaatgcagagaaatcaacaggtaagaggaagtatgtgcgaagaaagggactcaacaaagactcaacaattcccacacaagaaggtggaaagggggccactcatccagaaacactcgagcataataagaaaccatgcaggagggcattagattttgacacagtaggacaagaaagagaagcttggtgcgcattgggaagttattgctcctatcaaatattgattcata

SEQ ID NO: 256945 - DNA, 404 bp, Gossypium hirsutum
ccctctcgtccggcacaaaagagttttatctgagaaaagtaggttctttgctgagaagttgagtcaaaggaaagagaaaggagtttctcacactgtggaaatcagtgaatgtgatgacgtggaggtttatgtggaaactgtggttttgatgtactctgatgatttgaagaagaggttgattggtgaaaatgttaacaaggtcttggctttgcttcaggtttctgcggccattatgtttgatgctggaattagttcgtgcttaatttccagaagtgtggatcagtcgcttagaagaaactattgtttatttttaggcaaatgtattggttttttgttttttctaatcatcttttaagccatgatggtagtgggtaggtccaactttgtgcttattatgagtgatc

SEQ ID NO: 256946 - DNA, 452 bp, Gossypium hirsutum
ttttatctccaagaaatcctggaccttcaagatgctaagcagaagattgccagggaaattaggtttaaagatggtgcagtccttgcttttgctaataaacttaaggaggcggagcaggttctcgatgttctagttgatgattattccagttatcggaagccgaagaggttgaaattggaggataatggtgtgaaggatgctgctgctgctgatggtgattcttgtaccactacagttgtatctcgtttaaatttgtcagatattttgtcctatgcacatcggattagttacactacttttgcacctcctgagtttggcgccggacaagcaccgcttcgaggggcgctcccccctgcgccacaggaggagcagatgcgtgcttctcagctttataactttgctgatctcgatgttggtttacctaagacagcctagactaaggagaaaactgt

SEQ ID NO: 256947 - DNA, 390 bp, Gossypium hirsutum
ttttcattttgttctaggattcttcctattcgtgggtcatttatggcacgcgggatgagctcgcgcagccgcagcgggatttgaaaaaggaattgatcgtgattttgagcctgttctctccatgactcctcttaactgagataactgagacaggagatccaatgcttaaggtaggaatcaatttgattacactatatatattgaaggaatcaggtgatatttaaaaagtattctgttttcctttcgtttcaactcattttctatctaaaatattttttttctggctcggctattccacccagccgagccattaccttttattaatattaagattcttaattaagaagccaggaaaagagcaataaagttttaataatgtcaatatttttt

SEQ ID NO: 256948 - DNA, 158 bp, Gossypium hirsutum
ttataaaaccctaaaattcttgccaaaggcagcagacctaaatgtgctagggtagcaggcaagtaaattgatcaaaaaaagtatagtttttaggcattaataaaatagtaccacgtcattaaattttaaagataatacactatctatattcaatatct

SEQ ID NO: 256949 - DNA, 192 bp, Gossypium hirsutum
ttatatcgcgagggccgcccttttttttttttttttttggtaacaaaaaaactttttttattaatagaatagaagagttggagttaataaggtaattgtattatttacatattacaactaaatattgggaaattcattggctataattgacaaagttaacatatgaaaaatccaacaacatagtgttaaaca

SEQ ID NO: 256950 - DNA, 438 bp, Gossypium hirsutum
cccattcgtccgaaaagatcggtgatgactgtgaaagcatcttctgcaagtactgatggcgaggaacaggttccggcggaaagcaagaaggaagatttaccagtaggacaacttcctttagaatcaaagatgcagcagatggcggagcagaagatgaagatgaagatggcgaagaagataaggcttcgtagaaagcgacttgtccgcaagagaaagttgaggaagaagggacgatggccgccttctaagatgaaaaaattgaagaatgtatgaccttttgcttagtcgtttcaactttcttattcctactttgtagatcttatatactgttatgcagtgatgaccttaaagaactgaatctgctgttatccaatttcattatgaaaactgaaagattaatgcctaatgtgcttgcctgtttttggcatctcttatgcg

SEQ ID NO: 256951 - DNA, 283 bp, Gossypium hirsutum
ttttatacgaaaggtttattatagagctgagggggacttttatgataagatgttgttatggggaaaagtagctatttttttaagtactgatatgggattgctttaactagacaacttaatactgtcaattaaatcatgtcagtatttcatgtaatagttttgatcattgggtttggtcgtacaatgagaatcaccttcaacatgtgattgttgccaatgttgaatttaaaatttgaatatttatattattaataaaaattttatttcaaaaggaagaactaag

SEQ ID NO: 256952 - DNA, 267 bp, Gossypium hirsutum
tttgtttcgtgggcggacgcgtgggcggacgcgtgggtgtttgaagaatgctaccagtagttggcgaagaccattggaaagttcaaaatatagcaaatgtccatgtctacatcatcaacactgaacaacaatatttagccaacaagcttggtgattctaccttgttagacagcttaaattagaagtagaggtacaactttacagattacatttttaaatattattttaatagtgaattatattgctacgtgtatgtattttacatgc

SEQ ID NO: 256953 - DNA, 267 bp, Gossypium hirsutum
tgttgtaattgagtattctctatttattttgggacgacatattaatcatgagattcgtttatggagaattaactatttttttaagtactgatattgtattgatttaacttgacaacttagtactgtcaattaaatcatgtcagtatttcatgtaatagttttgatcattgggtttgtttgtacaatgagaatcaccttcaacatgtgatttttgtaaattttgaatttaaaatttgaatatttatattattaataaaaattttattt

SEQ ID NO: 256954 - DNA, 385 bp, Gossypium hirsutum
ttatatacgaaaatttcacatacataaataacaaggactcataaatataagatctttttctaaaacccagcataccccaattcctctttattcccccccccccccaccaaaaaaaaaaaaaactcccaaatctaaagagagactttcctcgcctacaaccctttcttcgtcttggattatgagctcgaaggcgaaacccactctcggtggaccgcggattaagacccgcaaacggaatattgctgcacctctggaccctgcagcatttgctgatgcagtagtccagatctatttggataatgctggtgatctggaacttgttgccaagaaccttgaatcttctgatcttaacttctcaagatacggtgacactttctttgaggtt

SEQ ID NO: 256955 - DNA, 239 bp, Gossypium hirsutum
tccttgcgtccgcccacgcgtccgagaacgggggctttgattgcgtcgtctctggcgacgcgactcttttacgcgccactatctctttctccctccctcacctcaactgccttgtctaccctttctgtgattcctctgtttcacgactcattccgacctccatccgctcagctttagactgccctttgaactacgctcgaagctacttagccaatctccttccttcatgcggccaccga

SEQ ID NO: 256956 - DNA, 212 bp, Gossypium hirsutum
tctcgtcttcttcttcactatgggttttccacagtaagattatcttaagttgctttatctcattcttacattttcagaataatatttttttttcgaaatactcgaaaatcaaacttataacaaacaacaaacaactgttgagttgtgaaccattttacattttttgtttttgttatgattttgaggggaatataatattcttacctgccaaa

SEQ ID NO: 256957 - DNA, 431 bp, Gossypium hirsutum
tttaactccccgcttctctgaatcccgggcggttttaatatgtctttcatttcttaaaagaccctgtcaagaacaaacctaaactatcatagcaggtgtttttggtttttctgaaagccaggtgatcccagaatagagatccagatttcccttttttgtttttgtttttcaatatttattatcatcagctaagagggtttatttttggtccctcaaggttgtttttttttttaatcaaactagtacctgttctttggttttggttaagatacaggtttttacctagttattgaatatggcagcagctatagatatgtataatagcagcagcaacagctcagttttctcagatccttttagtgcggagctgatgaaagcgcttgaaccttttatgaaaagtgcttcatctacctctcctttatcttcttctt

SEQ ID NO: 256958 - DNA, 177 bp, Gossypium hirsutum
ctagtattttgtaaaatctgttgagaggaaggatgggctttgctttgttaatgtggttggctaattatcgtggacttctggtatttcatgtaatacggacatatactgattccttgtgtgttttacttcgtccagatgtgacttcatgcactcaacctatataaagaggaggcttag

SEQ ID NO: 256959 - DNA, 391 bp, Gossypium hirsutum
ttaaaacttgtgaagacagcactaggcggcgccctgcttattagttggtcacctttggcagacggtgaatctattggagaaagcatacacactgagacaggcgatatgtttgaggagtctggtggtcagaaaatagattcagttactgcagcagggtttgagatgctggatctgctaatacttgctgctcaggtattaaagggaaaaaaccaaacctgctctttaaccacaccctgatattattctggtacctgctcactctcgatttcaacttcgacatacatacatgtggtccaaactgtttgtattgaacaattacgaattgctgaagaaaacaaagttctcggtttccctcaccgcagcctgctggcaggtaagaaaagcaaaattt

SEQ ID NO: 256960 - DNA, 234 bp, Gossypium hirsutum
ttataattattcaactgtggaattgttgataggatctgttggttgttgagtgactcggcatatatagtcgtgtgttgattaatagtggtatcattgtcacggtattggtttacagcattggccaatgatgcatggctgctgtactctttttttttttatagctcataattgttgtaattagaccatggttatattttctgacattcatctattgtttgtgttgctggtggtgag

SEQ ID NO: 256961 - DNA, 397 bp, Gossypium hirsutum
tccatgcgtccgcccacgcgtccggagaaagtgcttgaaaactgtgcatcaaagcttcaaccatacctaacccaagctgtagagaacttgggaatttcttttgatgattatagtagtatagttgcttctatatgtggggcgacagctggtgctgtagagcgggatgatgctgctgttggaaaacttgcggatgatgagaaaataccagcagaggcacctttggagaacgcagcccagggggataaaaagattcctaaagaagcagtttcaattgaacaagtggcccttgtaaatgaaaagactcccgtgccagttgcttgcaatggcattatgcgaactgctgattcaatctctgtaaagaagcaagaggatgatcacattgctgataagtccgaga

SEQ ID NO: 256962 - DNA, 209 bp, Gossypium hirsutum
tccacgcgtccgatcaactttaattttttatggcgtgggattatgttttgggtgtttgacaaagaaatttgtactcgatagttcacttaactagtgagctcattataagcaaatgctcatccagaccatgctcattcgttgtgcttttcataaatataattcatggtgattgttttgcttgtctaaaaaaaaaaaaaaaaaaaataaaa

SEQ ID NO: 256963 - DNA, 418 bp, Gossypium hirsutum
tccacgcgtccgctctcggccagcctgcgagcgacggtggaggcaagtgtgcctcgtctccgtcacggctccaaacagaaccctacgaatccgcacgcctctgaaccggagaagtggccaccgactaggtcgacgccggtcaacggtgttcgtaaccaaaaaacaacgaagtttccaggcctttatagccgaaaggaaagaaaatcaaaataaaaaaatacaatttccatcctttcccttttgctgtgctgtggttttttgttttcttttgcacgtacggagtgcgtggcggcgtacggaggctgtgctggcgacgggggttgctggtcgtacggggcgagggctggggcgtgcgtggggagctgagcggcgctaaggtttttcttccctcctttggctgaaaatgtttaggataatc

SEQ ID NO: 256964 - DNA, 126 bp, Gossypium hirsutum
attacattgggccggttattcttggagaataatattctggtgtgtcattacaattggagaagctccttcgtatttcatcttgtcatttccttttcctttcttcgccggcattgtttgaacatgggg

SEQ ID NO: 256965 - DNA, 226 bp, Gossypium hirsutum
tttaaccagtctatgctgggttcacagacacaagagctcaaccgtggctcgttcccaagctcatcagctcatggcaacaatggtgtacgatcatcgaaacctgatcagccgacaagcgttgcaaagaatcccaagaagcgaacaagggcatcaaggagagcacccactacagttctgaccaccgacacaacgaatttttgagcaatggtgcaagaattcactggaa

SEQ ID NO: 256966 - DNA, 136 bp, Gossypium hirsutum
ctcttgcaaatggttgaccctcccaactcacctctctataaccccttccctcggccgtaaaataaccggaactctctttggccatcgccgcggtcacgtcagcttcgccgtccaggacgatcctcgctccgaaccg

SEQ ID NO: 256967 - DNA, 135 bp, Gossypium hirsutum
aattctgggcatttgaggaaccctaaccatctggtaaaatcagatgatgataggcaccgctctagaagatcaagatccagggagaggggcaagaataatgatagaaaacaaagaaaagatttggatggaagatgt

SEQ ID NO: 256968 - DNA, 320 bp, Gossypium hirsutum
ttttgtgataaacatgctatatctcagaaactggtgcgattcatgcctgtagtggagttcaggaaatctaaagttggatgatcacaaacattttgtttgtttccatgatttagtaggtcttaaaatgttgggaaattaggcactgcaggctgaactttgtaataatataaaaaaagaaagaaatgttcaagtattgtgtgtaaatagtattgatagggccttttaagttatgatacccatttatgaaagttttttattgtaatttattccccctttttaaggtttttttttaaattatgtagctattataatattatatg

SEQ ID NO: 256969 - DNA, 243 bp, Gossypium hirsutum
acactatgttacctaccactatgagaaatgctcttcgtgttaaactgaagccgtttgcaaagtctttaactgcatcaatatacgatgcttcccttgcagcggagtggagcttggcactagtgcggattttggaatggttggctcctcttgctcacaatacgattaggtggcaatccgagcataaccttgaagagcagcatataatttctgggtcaaatatacttttggtacagacactacact

SEQ ID NO: 256970 - DNA, 355 bp, Gossypium hirsutum
  unsure (1)..(355): unsure at all n locations
ggaaatagcagccgcaaagactgcctcaacctctcctctgttctttatgccgaaactctcctttttcaactttgatttagacgaagtgaaccaagaggtcgacgtcgtgcctacgttggtaaggatttcctttctcccttttatttttttttgtttggtgtacataagaaacaaagaatcaaagaaatcaaaaagaaaagagaaaaaatgacggaaaaaatcaccttaaaaaaaactctttgcttcgattttccgttcgtattcaatatcccaaaaaaagccccctcttagattttacaaatcggctttctattggncgaatctaggattaaaaaataatatttctctattttcc

SEQ ID NO: 256971 - DNA, 399 bp, Gossypium hirsutum
gtttgactcacgagcaagagaaagatgttgataaactcataactcgtttggttaccaaggaagaagcacatgttgcactgatggagctcatgaaatggagatcagaagggttagaaccactctatgctcaagccgttcaagttaaacaacgggactctgtgaccggaaaactgaagatcgctaacccccaaagcagtaggctggtatgggaaacttgtcttagcgagtacaaatcattgggaaaggttgcagtgaggcttatcttcttacatgcaacatgcatgcgggtttaaacgtaactggtctttgatgaagtggtatttgtgtacacagacactcacggataggccttgaaagggctcaaaaaatgatattcattgcagctcattcaaagctcgg

SEQ ID NO: 256972 - DNA, 273 bp, Gossypium hirsutum
tcgttcacgcgttcgcccacgcgtccgcccacgcgttcggaggaattcgaatattgtgagggttcctagtgtttggtgtatgagtttttttttcttagaggacagcaattggctttttagacgttgaagaataaatggcccattgttctcttgctatcatgccacctcatctaaacatcttctttccttcccttttacctattaattttgattccacattgcattcgggggcacaattacttttcaataccataagtaatgtaatgctaaata

SEQ ID NO: 256973 - DNA, 346 bp, Gossypium hirsutum
tctcactcgtccgcccacgcgtccgaacttctttgtcaagattgtcaatgcaactgctcagagatattataaaaaacagatggacgagcaggtagacgataacgtatctgcttcaactcattctgattaagaagagtctgactgcatttatctcgataaaacagttgtgttagtgaactacaaggtaacctgtctttccataaattattacccattggaactacttcaaaagaaacccctgcactaagctagtcccttgttagaaagtttgtatagacagaacaaaaattaggaacacagacaacagaaggtagaggtttaattttattatatcccatgtaatgct

SEQ ID NO: 256974 - DNA, 106 bp, Gossypium hirsutum
cgtactgcctactactactgcttctactacctaagataattaattatctgcgcaaaaccaagctacctttcttcgtcctcatctgtgcaaagcctctgtttctagt

SEQ ID NO: 256975 - DNA, 292 bp, Gossypium hirsutum
gcattggccaacagacatagtattagtaggaccagctaaagaaccagagaagaaagagggaccaaagaaagaaggtgatgccaataaagaagatgaacaaatgaaagaaggtgaacccaagaaggaagatgaacaaacgaaagatgaatcaggacatggatgcaagtgtggatcaaactgctcttgtgatccatgcaactgttgaaaagcttgatgaaagccctagattatgaaaaaagaaagcagcataataacaggcctctgtaatgatttattttcaaggatgaatgcc

SEQ ID NO: 256976 - DNA, 291 bp, Gossypium hirsutum
cccatctcgtccgcccacgcgtccggtcctgttcaaactcagatggctgtggcagtgtttaatagtcctcttggaggggaatatcctaggaacaatgcggtggaagagaaacaacctacccgaagaagacgggtttttgttcagactgagaccggctgtgtcttgggcatggagttagatcgcagtgacaatgctcatacggttaagagaaggttgcaggttgcccttaatttccctacagagcaaagctcgctgacttttggcgatgtggagttgaagaatgatcttagt

SEQ ID NO: 256977 - DNA, 320 bp, Gossypium hirsutum
caatattggcccttttaaagtctttgctccattctcattacaagacaatgagcaaagaagggcagctataatagcccaattttacctgggcccagttccataaccaaaacaaaaccaaaaataaaaattgagtctaaaatataaagagtccatttacaataaataagcccaaattacttaaaaaccactacccaaactttacaagcccaaacagcccataaccgaaactagaaacagaaaccctagcccccacactagcctccaaagaagccaccagtgtatgagcctaagccaccaaagccaccggtttacacgccacc

SEQ ID NO: 256978 - DNA, 185 bp, Gossypium hirsutum
ctttgctgataattggatctattgggttggtccattggttggtggtgggttagctgggttgatttatggtgatgttttcattgggtcatattctgccgccccagcttcagaagattatgctcaaaagtttgaaactctgaaactgcttgtttatggcttttgtgtcaaatgctttgaatgctttt

SEQ ID NO: 256979 - DNA, 173 bp, Gossypium hirsutum
cgtgtgtatttgcttcatgtatcaggtacggtagcgatcgccataactgatgctccaagcattggcagcatgccagcttcaggattgatggcatgcaaaccagcagtgacccctcccaaccctccgccggccacgtcaacttgctgctccgccctctcccacgctgacatgcg

SEQ ID NO: 256980 - DNA, 230 bp, Gossypium hirsutum
ttttggggtggaacccgttgttggttgtttacaaggtgttgaacttgaagaagcttcggttcagagggttgaaacattgacgagtggtgaattcacggaaactgttcgagtgaatgccacagtgaagatcttagaagagtttttgcgtcagaaagatgatggggtggttgaaattttgtcttctaaaagcgtggaggccaacaatgataaaggatccaatcccaagacta

SEQ ID NO: 256981 - DNA, 257 bp, Gossypium hirsutum
agcgcatcacgcgcgagaaagtgaacggttccaccgtcaacgttgggatcaacccatccaaggttgtcatcaccaagctgaggctggacaaggataggaagtctttgctggatcgtaaggctaagggacgcgccgctgctgataaagataaggggactaagttttcagctgaggatataatgcagagcgtcgataaggttgtctttttttttcccttctcaatcatgtgttttgcaactgttgaagttttagtttta

SEQ ID NO: 256982 - DNA, 151 bp, Gossypium hirsutum
tcgattgaaagagctcatctcagacttcagcagtgaacacagttcaaaatgctaggattcccaaccgaagctgatacggggtaaagctactagaatcagagctatttgcttatttttcaaaagctggagaactgcatacatatttaatgat

SEQ ID NO: 256983 - DNA, 103 bp, Gossypium hirsutum
tcggataattgggtgctgtgccgtatattcttgaagaaaagaagtgctaaaaacgatgaagaaggcctgcaatcttgcaaccaaagaattggtaaattaagga

SEQ ID NO: 256984 - DNA, 160 bp, Gossypium hirsutum
tcgaactgtgaataagtgaattgacatccaagcgttccattccatttccgtatagttcaaaaacacttgagtaccttcgatcatattttagtgtcaaaaatggccgaggagcataccagtaaggcccctgagttggagagcaacgttagcggtgaaggag

SEQ ID NO: 256985 - DNA, 370 bp, Gossypium hirsutum
gttaaagcaaagctaattcaatctcgaaccatcccggagttaaagatccttttatccgaaccgaacatgaccccctcgataatcgagaaatcattaaaactgctggaaactttatcatcttgcaaagaagggagggtggagatatggcatgatacgatactgttacaagcgattgtgcagaaagtgttgaaagcatcgagcaaagcgacagagcatgcagtgacgatactctggattgtttgctatttatttagagacgagaaagcgctagaagcggtgggttagtggcaatggaatgaccaagattttgttgctcatccaaagcaattgttctcctgcggttagacaaatgtctgccgatttgctcaag

SEQ ID NO: 256986 - DNA, 391 bp, Gossypium hirsutum
aattgaagttttaaacttttatttatcattcaaatagctagatttcacggttaattcatcagctagatgaactagctaacggaaagcacagaatccagcaaacgacgaaactgggaaccatgacttcagccttcgtgctcaaggcaaagtgtattctccacactggtaaccaacaggacgatcagcaatgttgcagcgttttggaatagtgataaatcataaattattggcagtggccttggctccaccagaaatggtagatttgccatttaaccccttaaatttttatgaaattgcatgctagtataacggtaaaattgcactttggccctcccaataatttatgatttatctctagtccccctaaagcaattttctggcttggttccct

SEQ ID NO: 256987 - DNA, 433 bp, Gossypium hirsutum
cccacgcgtccggagcacaatctgaaaatcctcttgcccagtcagttcccaacttttctgatctcagaaaagaaaatacaaagccctcttctggagctggcaaggtgacgagccatttccaagcgagaaactatgctcgtagcaagagtaataatgaagagattgctcttggcaaggatgaacagtctcgacggtctcagtcccataggaaaagcttcgctggtcctgtagatgtttcagatgtgccagccttgaactctgatgacataggtttggcacctttgaaatttgataaagagcagatgggccagagcttcaatgacaaatctctgaagaatgaggaagcaaagcctttcctctggaaaggtaatggtgttggtcctggtgctggagtaaaaactgcaaagttcaaagcatcagagacatttgcgac

SEQ ID NO: 256988 - DNA, 398 bp, Gossypium hirsutum
cccactcgttcggctatatctttctctctgtcttgggtcagctcacccagaaaaaattactaaaaaaaagggcaaaggcaaaggcaaaggcaaagcacaaagaatcgtcatatttaccatttgtgagaatttcgcttattttctttacagttttcccctatcctcggatggacctttattgtttctttccttttattggtgcaattcttcttcatttcttcttctccttcaatgattatcgtgatgctgttgttggtttcatctatttttggtaaattaatcgagttctgatctggggttctttttggagagattccgtcaattgcttcaagtgattataaaaaacccataatttagatgggctgttggatagcttgattcggaggtaattgaagact

SEQ ID NO: 256989 - DNA, 365 bp, Gossypium hirsutum
cttcgtaacactaactatattgcatcctatcctttttttccacagtaaacttgacatgaacaccatatatgacggacagaactcaacccgacagcacgactgctatcgaaattgtgaaactataaggtgattgaaacatcaccttttattgaaatcaaagaagcatatcaactagtgaacacaatattatggtggatgcatgtacatcaaatacaagttcatatctcaaactcaaatctctttacttggttctcaagcaacccctagttgcttctcttggagtacttgtctgtttgtttgtttttgcagtttgtactgcacttacttataggttttgtatatgctataatgatttttgagtggat

SEQ ID NO: 256990 - DNA, 237 bp, Gossypium hirsutum
cccactcgttcgaaaaagtttaaataccctctgaaagaggggagaggagaggccctcctggctctggcctccgtaggccacgcgccggtcatcaatcctacacgcgccgtcgtacacgatggtctgagggtctaaaaccttcggcattccacagcaatcgagcgagggaatctctagcctctgattactgcgccgatcacggatcctagaatcacggcactgatgaggctactggaa

SEQ ID NO: 256991 - DNA, 102 bp, Gossypium hirsutum
ttaatagaaggattagagttgccattaatggttgctgcattttagctattataacttttggattcttccggcatgtcttttcaacaactaaagagatgtttt

SEQ ID NO: 256992 - DNA, 425 bp, Gossypium hirsutum
cccactcgttcgcggatgagtggtggtgtgaaccaggacatggggattggtgtacttgccttgagaaatatacactttgtagggacggaatataccataagcaagaccaattcgaacgtcttttgccgacctttgttcaagtgattgatttgactgctcaagaagaatctgaatattggactgttatgtctgctgtatttgagggcaaaccagttgaatctattgaattaaggcccaacctagattatgttgcttccaattcaattgaagctagcatcaaccgcaaggtacgattgttaaggaccatgcttcaatgggaagagaaactacggtcggaatcaagttttggaagacaagatggtggcgcaaaatcaagaaaccacgcagattcgggttgttcttgtggaagtagttattatatgttg

SEQ ID NO: 256993 - DNA, 299 bp, Gossypium hirsutum
tggactcgtgggcaaaaaccaagaaaaaaaaaataagaacatgccagcccaggatgacgaggagcagggccaggtattcgttgatgaatccgacataatccacgaagttgatgtcgacgaagaagatcttcctgatgctgacgatgaggatgatactgaaaatattaaggatacagatgattccattcacatattcactggccatacgggtgaactttatgcagttgcctgtagcccaacagatccagtgttagtggctactgggggtgtagatgataaggggttcctttggatgattg

SEQ ID NO: 256994 - DNA, 162 bp, Gossypium hirsutum
gccaattctgttagggtttctgccttggctcttgttgtagacattgggcctattgggcctgtatttgggtcctgggttttaaaaataggtctaggttatgtaattgggtttgggctatgtaattggactttaaacatttaatggactgttataattttattt

SEQ ID NO: 256995 - DNA, 423 bp, Gossypium hirsutum
ctcttttaacctaaaaaaccaattaatgggtgcaagaataaggtttgtggctcttgctttagcgatattgatgatggtgagttactgcttggctgcaaaggttataaaagtggatatgctgaagcacgaaaacaccgcggtcaatggcggccggcggctgctccatgacgacagcaatgccaaaagtggatacgcaaaagagagcagtgtgaacaaccaccattacattcctaggaacgactttaacaactaccctggtggcagtgaagatggaaatgggtaaattaatgagattagcaataatatggggactaaaccggtaactagataataattgcatgatgttgctgcgtgtttaatgagtttttaagacatatatatgtgattgtgatctaattagtttctgtacggcagtacgtatat

SEQ ID NO: 256996 - DNA, 345 bp, Gossypium hirsutum
atctcgtacaattacagtgggcggaaccttttccctctttgcactgttgtcagctatttctgttctctttgcttacaaatgtgttccggagactttgaagcctcatgtgggttcttggtctacatcgattgagcaacaacaaccggctgttgttgccgttaatcaacaaccggaaccaaaggcggcgaacaggtgtttctatttgtaggaaaaaggttggggtaactgggtttaagtgcaggtgcgagaatacatctctgtggggagcatcggtacccagaaaaacacgagtgctcatttgatttcagggtattggacgtgatgccattgctaaggcaaatcccg

SEQ ID NO: 256997 - DNA, 109 bp, Gossypium hirsutum
tcctgtattctctcaattttgagctaaacaaacgttcttaattgtacccaactttggcggtgaggtacttgaattactaataatgcaattattttcggtttttgttaaa

SEQ ID NO: 256998 - DNA, 332 bp, Gossypium hirsutum
gtgaggcatatttaagaatctgcgatggtaacctctagttttagtcaattagaagacttccatctgatatagccctcgatgtcctaaataatcttaagcttgagtggctggttacagggcttttgtcggttgtgattttcccatgctagtattaaagctaaggttctattttgtcctgtggctctggattgtctctcctttttgctacctaaaaagatcatgtctggatgattctgctggtccagctttgctatgcacccatcagccaaagtcgaccgtgcatggcggaaaaccgaggaccatcttaacaaagacaagacatgccagttcaa

SEQ ID NO: 256999 - DNA, 427 bp, Gossypium hirsutum
cccactcttccggtcatgtttcatatccaaaaaacagacaataaattttatatcatgaaaaagatatcatgattgatgaaatgaatttacttaaatatcacttgaacttaatctggtgcaactcttgaagacatacgattatatagaacacaaaagagatcacgggacattaagccagactgtcccccaattaatccttaccaatgaaccttccccagttagactactttaaagacacggtggctttagttgtccgaaacctgtccattcgccttccatcacactttacattattcctcacattatactcaatataataaacaataaaaaaattacttatttttatacattaaatcagagagtaaattagttatttctactcaaaatttcacacatttatacaagtaaaaattgatgtagctaataa

SEQ ID NO: 257000 - DNA, 359 bp, Gossypium hirsutum
cacattgcttcggttttcctcgaggaactcaggccttttcttccggttaaaaaagaggttcttgagattttattggaaccatttgttggaataatgggtagagtgagtgataaaattttggttgggaagattagaattaatgtgtttgatgagtttgttaaaatgggaaggagattgttagaacttaagacctccattgaggaggttgatcaaggtgatgatgtagttgtgttggggactatcagtttggtgatgggattctctaaaaaattttatgaattgggttcttcagtggattgctgtcagggtaatagaaagattctgttaggagtacatgaagaattcttgaagttagagaa

SEQ ID NO: 257001 - DNA, 361 bp, Gossypium hirsutum
catcacttttacagtcaatctgatgaaagctcggaacatttctttgtacctgtttcatcatttaacttttatcatgggggaccagagaataaagttggctccataaggagtaagaaattattttcaactcaaaaagacaattccttgcttgatagtcgtgcaagcgatggtcgtattaggagtaactatgatgacgtatcacacatgttgaacaagttggattctcttaatgattatgatccagtaaacgtatttctgtcagctgctgcttctagtagttcagcttctgatgggcagaggtctttttttgacttggaagaagcacaggatcaggtcttttctcctttttttctgatggacg

SEQ ID NO: 257002 - DNA, 374 bp, Gossypium hirsutum
cccacgcgtccgcccacgcgtccggctttggaatgctattatatttgggtatattatgaaataagactagagaatctttatgtacttgctttttagattaaagttctattaaattgtgctaatgtctttacttgatggatttgcagactaatgctaatgtctattaaattctggtgttttggtttgaagcatcaatttttctatgttcgtttagttgatttgttcgattttctctttagaaggttgccatgctcaatatatgttgatgtaatctatttaaaatttctgagcgggtttaaaatttattttgattattatgtgtggctaggtaacaaggggaataatatcgatgattattactttgattatttatg

SEQ ID NO: 257003 - DNA, 141 bp, Gossypium hirsutum
acgcgtccggaagaattcactatggaaaacttgtagctgaagtgaagttcagggacgaacggaaagactatgaaccggcaattcgtgctcaggatagatttactctgacatatttgttgacgtttacaaacgttgaagaag

SEQ ID NO: 257004 - DNA, 384 bp, Gossypium hirsutum
cattcattgggcaactgtagtaaagcgggtggttggtgacgagacgatgcaagatagcgaattgactagttgtgcatagagcgctaatggctataaaagatgtcgaacgaatgttctcttctttggatcctgagtactatgatatccttatgaagtatttgtatagaggattgtcaaccggagatcgccccacatgtgatcagtgccttaggatccatgagaagctgacggagagagctggtttgggctgcatacttcgttcccttgcagatactgtgaatgcaatttgactccaataggcccttcactttggaaaatgttttcaagtgttgttgttcttaaatcattgaagtgctttagaagcttttatgttacagcttttct

SEQ ID NO: 257005 - DNA, 466 bp, Gossypium hirsutum
cccacgcgtccggcagaggagatatataagctgttacgtacagcatattgccagttcccattactgtcactggacttgtcaacttctcaggagttgtcaatggccggaaacagcgggcagaacaaagatgagggtagttccaaagatcaagagtcacataatccagatttgaacgaaatcaaattgtcaagttaaaatgaatagtgggtcgttgatcggaaggggaaaggcatagtatatgaaccgaattggatcatagaaacatccgtttaaggctctgttaatggtggcagtgggatatagggaatagtacacaaggtgactgtttttgcttcacaaaaactatacaaatttagttactttgccattttaattctcacactcaatgggggcaaagccctttgatatgtatacatacttcaacattgtatagtttaaaggaaagtgtttattcctgttgatgtgc

SEQ ID NO: 257006 - DNA, 392 bp, Gossypium hirsutum
cccactcttccggcttatgatacatatagaaatcaacaactgaatttctctggaaaagaagaagcctcaaatttcgagaggtttcttgctggtgctgctgctgggattactgctactctgctttgcttaccattggacaccataaggacagtaatggtagctgcaggcggcgaagcgctggatggtttgtttggaacttttcgtcacatggttcaaactgaagggttcttttctctctataagggactagtgcccacgattatcagtatggcaccttcaggtgcagtcttctatggcgttgatgatatgtcgaagtcagcctatcttcattcacctgaggggagaaaaagaactcaagacatgaagctaggtgttctggaactgactgcatt

SEQ ID NO: 257007 - DNA, 382 bp, Gossypium hirsutum
gaatgcttggtggacatcggccatgcagatcatgtatttttcgctgacccagagacaagcctgcagaaagttcaccctaatttcatcgatgtttccaagaacaagttgagtactccagatgataaatgtgggagaccaagaccaggtcagccctattatccttgcgtcccagaccctaatgatagcaaaaaaggtgaacattgtaagggaatttacaaagacagcaatagaaatcgtggatgcaagtagaattatcttgcagattatggatttttttagttattgtttatgtaaactaaataaagatttttgctattagtttttgtagtttttttgaaaattatgaattttaattcgatgaaatttaatatttatatttttc

SEQ ID NO: 257008 - DNA, 478 bp, Gossypium hirsutum
ctcatttttccctcttttatcttccttttagattcttgaattatcccccgatttttatccgattccatcccatcgccgatctatcctctttacattttcatctacccaacgattttttcctgatctaaaaacctttgcttcggagaaaactacgccgaggaacagcatagcaaaatcggcggttgtcggttcgggaggaaggcaaaaagaatgtcggccgaacagaaagaacaagaacctaaccctaaccctaatggttgcagcaacggcaatgaaaatttgaacactgaaagtgaacatgaagaaagacaagaagacagacaagaacacgaacaggaacgagaacagccgccacgtcagtcttcgacaagaactcctttcactaatctcagtcaggttgatgctgacctggctcttgctcgaaccctacaagaacaggaaaggggcgtatatgatgcttaggatgaataatgatggt

SEQ ID NO: 257009 - DNA, 324 bp, Gossypium hirsutum
tttttgtccaaccaacaaaagggaagttggtatggtttttggacaaaccagctgcatcgaaactggacaatcttcaattttcagagtagggttgaatttatttcttttgccaaagtgtatgtttgtatgtagtggaggtttttcaaaccccgtcgaccctcgtcctcgattagttcctacttcttttatccctttttattttcttaaaaaaaaaaaaaaaaaaaaaaaaaaaaaaaaaaaaaaaaaaaaaaaaaaaaaaaaataaaaaaaaaataaaaaataaaaaaaagaataaaaaaaaaaaaaaaaggggggggccgtttt

SEQ ID NO: 257010 - DNA, 203 bp, Gossypium hirsutum
gatgggcatttgcatatccattgcatctacagagattcatgatcaagctgaagagcaacatcactttcatgaaaatgttcttgactcgaccgagaccaatccgtctattgtaactcagacacatggttctctttactcgaaacaaggaaccaaaggactcaaccaggatgctgccatccttgatcaggagtatgggatgaaag

SEQ ID NO: 257011 - DNA, 339 bp, Gossypium hirsutum
atctaaaataaagtaaaataattgtatcatcttctttagattatttatccaccaaaattagggttattaaacttcatttttgatgttttaaggttcaaacaagtcccttacttgcaggatcaagatagaccacgtacggatttagattggggaaaagctaaatcctcagattagtcgatttcatttctatgcctagttgtcgaggtaagttcgtatgtacggattactatattcatgttattcacttttatattattatgtatttataatgttattgaataatgtatatccaaagcaatgttatgacggttattaagtcctgattgaaccttaggaatt

SEQ ID NO: 257012 - DNA, 384 bp, Gossypium hirsutum
tgattattgtggtaggtttgttctttatttcatcagtttgtttatggaaagtgctcctaaaaacttcagtaccactggtggatatccttactttatgaaggaagactggtttgctcctcaagactttgattgcttttgcaagagatttaaactctgcagctagtgaaatgaactctttttaactttgacttttacatatggactatattacttggattcggagttgactattttacttaaattatgagtgcgattgtcaagtataggtatataatcgacacgaatatgttcaacttttaattttttaatgtatagcttgccttacatattgaccatggttctggcattgggtattgacaatgttacttaaaactcatttggtta

SEQ ID NO: 257013 - DNA, 511 bp, Gossypium hirsutum
tccacgcgtccgcatcatcagaagctgtaaacacttcctccgagactggagatgtccaaaatgattatgtctatgacgagtcttcagggtactactacagtagcactttgggatattattatgacccatctactggattattttgctcagcagcaacagggcaatggtattcttttaatgagacaactggaacatatgatgaagttaaggaagttgcatcttagtataaatttgatcctgagttgctcttgcggtggaagatgtcgtacaggctatcgagtaagtccaatgtgtgaaactctcatcttttaagtatgttccatacgttaggctccttaccttttattgccttttgatgtctctaaccttaatagttacaatgctgttgtagttattatgagttcgaacttgaggcctagtctagctagttttcgaggtcattcttagaggttgcagcttctcgtgtacccgaaaacaatcatattttatcacttagggaactcctttgatt

SEQ ID NO: 257014 - DNA, 364 bp, Gossypium hirsutum
gctacgcacagcaactgtctggacaatagtgaatcttacttgtccatcgagtcctggtgcaccttgcaggcttgaaaagctgcgcaatgctgggatagtttctcaaataaagaatatggttaatgatccttgtgttgatgttaagctccgtgtgagaactgtgctagggcaatctatggctttcggggacaattaagcatgtctgtgttcattcattactcggaatacaaaaggcaagagattttgaagcagttagtttttcagtcttctttaccgcttttcttctgtaagatattttcaaggctttctccagtggcttgtaaaaaaatggtgagttttggttgatttttaattgctttgattg

SEQ ID NO: 257015 - DNA, 397 bp, Gossypium hirsutum
gaaaaataaggagagagaaagggttagtttctctgaagaaggcctgggaccggccaagggatccggccattcccccgccgtggctccgccgtgccggccaccgtacacggtggcccaaaatcccctgaaggtacacggcggtggatgtgacaatggcggtgctgcaggtgttggctggtcaaaggtccctaggtgcggtgcacctagggtttgtttattatttttctgattttgggtagtgggctaactgggctagggttaggcattaggtcttgattgggttctggggttatttgggcctgttttaggttgggctttagttgggttagttgggcctgcaaattggacttgtacaaagctaaaacatatataaacttttattttgtatgcctgctta

SEQ ID NO: 257016 - DNA, 365 bp, Gossypium hirsutum
ttataatgacctacattatgtccatatttgtggaactacttgttggtgttgatgcatgccaatgcattaccagggctgtaaagctctttcattgcttttgtgtgtttttgcagtcggagagtgcacagggagaagctgctgcaagtgccatgggtggcagaggtcgcggaggtggtttccctggccgtggacgaggaatgaggaggcgttgagatagctgtttcatttttttgtatcgaattttggttgtgttatttccttttatgccgtagatgaactaccgttttaagggccaaaatgtgaaggtgcctatttagatgtggcatccgaatgaccaaaatctgggattgaatgttggatttttt

SEQ ID NO: 257017 - DNA, 472 bp, Gossypium hirsutum
gtaattttctttgagagaaataaccccatcttttccctttatacaagtttcaatttattcactctttcaaattcagtaattgacatagttctctaattttttagcctgtcattctgatccgaagcttgttaaaaagaccctctgttttcagttgtacttattttcacttatgtcatccaattttctcactaattcacgttgctctagctcttcctggacacctaaacaaaacaaaacgttcgagaaggctctggctaaatattacccggacacttctggcccgttgcaccatggtggccaaggttggggggggaaagtctgttgaggaagtcaagctgaactatgatgccctagtcagggatctcaaagacattgagtctggccgctacccttatccatatccaagtggaagcaacagctaaagcggttcccaaagagttaaatcctaaaatgaacaagaacatgatactcg

SEQ ID NO: 257018 - DNA, 332 bp, Gossypium hirsutum
cccacgcgtccggccatgcaaaacaaagtttgaagctggtttgggaagaaaagaaaggagtcctgcaaatccatcttcattatgtaacttccgagatgagtctaagaaaagatgaagttccacaacttttataagagcgagctgacatgtatgttctgcatctatagctgcttctcttcatggaatgttctggctggtagcttgctccagtttttcaaaatttttccaaagtttttcagctttcatggtctggaattttgacaatttgtcaaaaagtttgttttaaagtgtagaaataaattgcaacaccccctataagcagttctctgttt

SEQ ID NO: 257019 - DNA, 372 bp, Gossypium hirsutum
ttttaaacctgaatcatagaatgaatacgaatgaaaactgagaaaattagacacaaatatttacatggaaaaacccctctaaagaggataaaaaatacgaacaaagaaaacttaactaaaaatgacaaaaactgaaaaggagagtacaagatggagaaacaaataaaccctaaactcgaaatacaaagattccctaaaattcccacaaactcttaattttgttgttgttattctgaactatcttgggttgctaagaagcatatttatatgcttaatttcatgtacaaatatgactaaaacatccataaaataataagagtttgaactggaaaaatataatagatattagttgaatagttatgagatattagt

SEQ ID NO: 257020 - DNA, 225 bp, Gossypium hirsutum
tttttagtgttcctcaacatagtccttcaaaatcctcataagaacaccctaccgaagccaaaactgaagccgaggcagaggccaatcagcaagattccgatactgtgggtgccgggaatcccggaatccttaatccaacattaaatgaaagggttgtcgaagaaccacctgtggctcccgccaatgcttatccatatcctgttgccatgaggctagtgagagaga

SEQ ID NO: 257021 - DNA, 164 bp, Gossypium hirsutum
gttaaggttaatgttgatgggtcttctaatatgaatggacactatctgatggttggttgtgtggtgagagattctactgggaattggttggaaggcttcaggaaatatattggcagaggctctgctctaaagtctaaattacgggttattttaactggtcttga

SEQ ID NO: 257022 - DNA, 341 bp, Gossypium hirsutum
  unsure (1)..(341): unsure at all n locations
acaacactgagagtactggacctgatgggttgttggcttttaactgaagatgctatctcacaattcataaagaaacatcctcaagttgagatacgacacgaaattgttcaaaacctttcaacagagcagcaaacaatttcgaactggctattccacataacaccatttttggaggggacttaatgggaccaaaaagcagggaaatctgcctatgcctcagttttttgttgatcaaagattgaaatataacagagaggagctacttgcgctacagttttcacctctagcccttcaatctccccatgantgcaggtagtgtcacacccaatatataatcatat

SEQ ID NO: 257023 - DNA, 145 bp, Gossypium hirsutum
attttcaaattcaatagaaaacatttttttgttgaaaaaaaaagaaaaaacacagatgaatttgaaagaaccattatggagcaagagaacagagtcaaacgaacctccatctccatcatcgtcattgccaagagacccagaaaca

SEQ ID NO: 257024 - DNA, 387 bp, Gossypium hirsutum
gcttactattcctgcctcccctcgccgaataccaattcagcattaaaagttttcatctttacccttctcatttctttctcatctgagcatcttcttttttttctcacctctgcttcccatttccttccaacagtcctcgtagcctccacaaattcatcctcaagctcaacagtttcaatttcctcttagttttctcgagaaaatccgacttcggtgtgagaggaaagggctatcgatccaacacccagatgttaaattggtgctgcatcgagtgaagcagttcgctgacaagggagaatcgactgcagtttgcaatgaggaaatttgataaggatgcccttactagccttctgatggttctttgatagttataggaagcaagaaact

SEQ ID NO: 257025 - DNA, 410 bp, Gossypium hirsutum
gtataaagcaatgttcttcatgtgatttcatttcattggatcactacttatacacagtttaatgcttgtttttactctaatgcatgcagatttaagcacattttgatcttgtttcgaatccctgctgttatcggtatcgagaaaagttcaatttttgtcataaattcggtgtagctttggagatgaaaagttttcaggtaagctgcgattgatggacagtttatcgccgagaagcagtgataagaagacattgaagaggtggtttttcatagataaaagggttggctaaataagtgtacttcgataaaaaaggtgatttgaagctaatggatttgaagcctaatcattcatctcctgttcttactgatccgattccgataaacaagtcaaggttaggcattcattcaaat

SEQ ID NO: 257026 - DNA, 108 bp, Gossypium hirsutum
accatatttcaaccctcgacagtctcaaaccctccaaagatgtcaacatgctcttcacccaactcgtcctcacatgcatgccacccacccatatcgatgtcaccaagc

SEQ ID NO: 257027 - DNA, 104 bp, Gossypium hirsutum
ccatttgtttgccggtgaagctgagtgtagcaatgtgggtggtaatggtattcaggggtttcttgatgaaacccttgttgctggtctgggaaatgaacgcaagc

SEQ ID NO: 257028 - DNA, 474 bp, Gossypium hirsutum
cccacgcgtccgcccacgcgtccgccccagtttataacattggagttcagggttatcttcctgagttgatatattcatcagctaccacaaataatggattctctatctgcagtcttctggtcttggctatagcatacttaatctcctcttgaaaagatttgaatttggctagttaatagggtatccctaagggaaaacagtattgctggtggtaattcaaattacggagaagatgaaactttcaggggatgagtaatttccaggagactattgccaagacagtgaaaatcactaacagttgatagttgaatttaagtcaaatatatatagattctttaacaaaaattcttaataaaaaaatggttttgatgttgttgtctacactacagtggtcggaaatgtatttgtataccaaaatagattggatttagtattgttatataagcaacattaagaacttacttgtctttactt

SEQ ID NO: 257029 - DNA, 367 bp, Gossypium hirsutum
gggaggctttggaattcaggagaaaagttttttacaatatcgttccctatttacaagcagagacagatattttgtatttggctgatagaagaagatttttgagagatgaagaagtgctgatgaaggatgttcctggatgggttgtaggagaaagcgtctacaaaactcgctggatgcctcctattcgtatggcaaacaaataagaaatcgaacgtttatgtgatctctattcaattaactttatatcaagattggttcttttctttttccttttgcaactttctcttgctttcaatattttccagcaaacccaatgtaattaatatatctccaatattatccttgaataagggtagtgtattcaaaa

SEQ ID NO: 257030 - DNA, 216 bp, Gossypium hirsutum
tcctcgcgtccgcccacgcgttcggatatgtggaaaggataggcacgactccaaagagatttgaccatgagatagacatgagtggctaccatgtgatgatgatggagcccctgttgtacacctcctcctccgccgtacgactgctccacctgcggccgcttcacctgctccggcgattgctgagaaggtcattgtgaaacccattgtgcctaatga

SEQ ID NO: 257031 - DNA, 429 bp, Gossypium hirsutum
tccacgcgtccgcttgatttctcacacaataggaaattccaagactgcccttttcgagggagcgagaggttaataatgtttggagggtattctagagtttttcttttctttgattttttttcctttttaaatttgggttatatagtttatttccaattaccttattttttctttttttttttgtaaaatcatttagttgtccatattgttgttcattattttacgaggaacttaaatataatgtgaagagaatcccgtgtgttagtctgatagtcaagatgtttactatcccagttgtggtctaggtttgagttgtgccagtctcgttgctgttagagctttaagactgtgagggtgttaaaagggattgtatttacgaacttacatttttttaatgatttttcttttttcataatacatttttttgga

SEQ ID NO: 257032 - DNA, 307 bp, Gossypium hirsutum
cccacgcgtccgcaaggcttgaaattcaatagcaaaaaacaagagatttgggatccccaacgagattgtttgatcgagaaatggatggaaaacaaggtttccgagaagaaaattgcagggaaaaaacagggtctcaaagatttcaaaaggaaatcacatcatcatcatcatcatgtgagtttgattagctcaagttctagctcatcggattccagttccggtgggtttttttcatcatccgacactgaatctttgaatggttcaaagacaaaagctccatgttttgttgctccaccatcactaccaa

SEQ ID NO: 257033 - DNA, 394 bp, Gossypium hirsutum
tttttttttttttttaaatgaaatgcttacttgagatagaagataatagatggcgtatttacttacattccaaagtcaagaaaggggatggggtaaaagtaaaacatctttgtacaaaaggggtgaggttgcaaatgaaaaggccatgcttgaaaatctaaatgcaaaaatgagttttaaaagtcaaaagtctgtttgccaaattcaatagtattccaatttattgattcagaactggacgctgataaactcagaaattggagcacatttgagttcggtgctatgttgtcttttattcagatgtaaactcaaaagaaaataataaatatatctcggccgtaacagaattaatcgattgccttgttacgaaaaatattacaagaacttggctttt

SEQ ID NO: 257034 - DNA, 344 bp, Gossypium hirsutum
cccactcgtccgtgtaaagcataagcactagggtcattttcgaagctctgtaatagttcataggcacttcttactgtgaattctcttgaagactctccccgccagaccaggaagtcatcgtgaggctcttttgcaagtgggatacagaagattttctaagatatctccgcaggaaaggattcagtgagttacaacctgagagtctgtgccttagcttcccacatccgaagcaaaaagtcggcaatttttcatatttaaaggaaatccaccatttattcttattattcactgagacaaaaatacctctttaaaggggtttctgcacatagagatttatttttaga

SEQ ID NO: 257035 - DNA, 417 bp, Gossypium hirsutum
attttagacatttgctcattgtaaatagatttccaccgtttgcaagtcactcccattctaggtccaggtacaacccttaacgccaattgcttaaccactctagtgtcaataaaattaatgaatgctaccagagtccacaagcatactgatggcatgctcaccagttttcccattgcctctcatagtttgaaaaccaagtgaccccatcatggcctggagaaacaatattggctgctcattctcaactgctagagcatcaaggttgtctcaacagttcgagaatactttaggttcactcttctcgtccatagattctgctaacaactgaatgagttggggtttcatacacttgtgaccatacgagaatttcaagccacaccagtagcagagaccttttttccttcttcccccagtttc

SEQ ID NO: 257036 - DNA, 421 bp, Gossypium hirsutum
ccctttcgtccggccgataataatattcaatttattacccaagatgaaaattgaagaatccaggcattgatcaacaccaaatttaatcttttccattgacttttggaggttagtgtttctcatggattccttcgttttcatcctgcccaaggcctctttagatgctactatattttctccggaaaaatctagagctggggaaagaagagggtggattttgaaactgcagttcttttgcattgttgatgaacccagtttaatggaattatcattcagtgaaaataagacactggattaatgaatcctcaatttgcttctatatttcagaaatgaagatgaaacttatattattgggcatacttcaattttatccaatgtactttaaagttgttttgaatcaagattaaaattttatgttctt

SEQ ID NO: 257037 - DNA, 329 bp, Gossypium hirsutum
tgaccaccgaaagtcaagcgcgtggtaggcatggactctgacgtggaggcgcgagtagtgcgggggtggaggtggaagccgtgtgtggcgagggcagttgagggttacagcgcaaggctggttggtagggttctgtcaaaaatgttgttttagttagggcttaaaagttgggctagagtttaaatgtttgtattgcgctgtttgtattttgggctatggtttaaaatttgggtttgaattggtaaacaaaaatgaactatttattttggttttattcaagggcccaggctgaattgagccatatcaacgatattttaataaaaatataa

SEQ ID NO: 257038 - DNA, 193 bp, Gossypium hirsutum
atattggttgtttacttgtttcttttccaagagacaagtttgttaatgtgcagtgagtaatggtgcaatggtactagtttgatacgatcgacccattgcatttttttttagcataagccaggttgccttctcttgatgttggtcatgggcgtagtggatgtagggatggatgtaatgtatgtatgtaaggatg

SEQ ID NO: 257039 - DNA, 460 bp, Gossypium hirsutum
cccacgcttccgggggaggaaaaacctaagtgcccgccctcttcttcgttctgctaaccgaccatcctcattccaccattgaagttggtaggcgatggcacgtagaggaaccatcttatctccccactttggtcctcgtatagagactgagttttagcctcgagagatcgattccgagctttgatttttggcgaagaggaaatcgtccccaatggctcgttcgcgaaggtaagcccttcttttcttattctttgatctcttaacaaaacaatgaagataggcttaacgagaaaacgaatcaactcgtagaaaactaaagcaaaaaacctagaagaaaaaccaaagaaatcaccttttgttatttctttctattcaatatgtgaatcagctcttttttttgtgtgagtatattgccttttttagaaaaggagtttccccccgttacaaataaaagaaaaat

SEQ ID NO: 257040 - DNA, 453 bp, Gossypium hirsutum
ccctttcgtccgccctagaagcctaaggaaaagatgaggccgttgccgatggaattcgtgacggacccagacgaccaaggttcagccatggaagccgacgacgttgacacaccggagatcttcggcgaaggcgtcgtcgcttccgacgattttgatgactccgatatcgactaaaacaacaaacaagaatcgtttcaattgaatctgaactgcgctatggatgcttatctgtatgcaaatcctgtgaatcgtcacaggtcctcgggttcaactacataatacaaattcgacctctgaacttcatttttccttcaaaataaagcttcgatttgatctcttttagtgagacaaatggctgaaaatcttatgcatgctttacaatataacagctatggcggaggcactgctactttgaagcatgttgaagttccgatcccaactccaaataaagac

SEQ ID NO: 257041 - DNA, 534 bp, Gossypium hirsutum
gtttgcaagtttttaaatcaatgtggttttaaaagcaatttttttaatgttctgcatatactttggagattggatacctcaaactttaatatgtctgcttcatgtttcgactatcctaccttttttttgaagaaaatgaaaaaagaaagattcattttctcaagggaaaaaaatgtcaatttttttttgaaaataattagtcttttaaaaacgtctatttgcccttcttaattggcattgagcttgcctcatatgaagcttttttgagctaatttgttgatgatataaccagaaggttagttaatcttttcttttccttcttttttttcgtttttaaaatttttctatctttgtagtttggattattttatttaggaatttagatattatttatcataaattttaatattatttaattgtcataaagataaattttatttattttaatatttaaatttgttattttatttttggattaggtagttttggttgctgttagctcactaggaagctcatcttttttactcatgaacc

SEQ ID NO: 257042 - DNA, 511 bp, Gossypium hirsutum
attttattattattgttataaattacattatatagtaaaaatagcataatataaaacattacaaacttgaaaaacgggccaggtcgggtttgggcttgagcttggccgttgaatgctctagctcgagcctagtgtttttgcctaaacccttacaaatttcaggcaggcttttgggccgcctaggacaatgaataggtctcagtggtaccatgtaccccaacaagtgacctatatggaataggttagggggtcaaacccagtaagggcgagacactcaggttgccacttgttgtgtggtcgtacacccacttacgatcgaggcgctcctggctttgtgaactaggcccttagggcagccgctcgtggcatactggctctcagcagagcacgggagacaataccttctcccggaggacaataccttatgttgttaagggaccggatcgactgcttggtggacgacactttgaagacttctccctaagatttcttttagtttagccctggaaat

SEQ ID NO: 257043 - DNA, 511 bp, Gossypium hirsutum
tttttatcgcgagcggcccggacgcgtgggccgacattacgttgacccttccaaaaaaaaaaagaaagtaaagaaaagaaagtgagagagaaaatgcgagaaagcgaggaaactgagaaagtgaagaagatgaagaaacgagaaaaaatgaagcacatttttaagaagctgcacataggaagcagaaaaaaaccttcaagaaacttttgatcttttgtattgatttcgtgtctgtgtgcgtaaccttacaagaatgaagcaatcggccctttatattgccgaatattacaaaaatggttttttcctcttttttttctattatttcttcccttttttatatctgctggcctattgttgttgttgttttgctgtgttgttttcgtcttctttgcaggtacggtggccagctggtgtatggagccgtacggtgacgtggcgcggaggctcgatgcatgctgaaggtaggagcggtggctgagtttagggttttggtctttagggtttgctgtta

SEQ ID NO: 257044 - DNA, 225 bp, Gossypium hirsutum
cccacttgtccggctagtaataagtttgggctagggcattggtttgggtattgggttagggtatagttattgggccatgtaatggggacattttaatggcccattcaattaatttatatttggtttatttttatttattttggtttttttgggtgttgggcccaggcaaatttggcccattacaatatgatttacaaaataagttatataaaattacttttttat

SEQ ID NO: 257045 - DNA, 326 bp, Gossypium hirsutum
cccactcgtccgaaacattgtttttatcccttttttcctggactccttacaaatctggctaaagcaatgatgatgaagcatgagtcaagaatcagcttgaaaatgcaagatccggtctcattgaagtggttgttagagatttataatagtatttgtgattcaaattataacacattaataatattaattaatagtattaattagtgagatttatattgtattgggacaaggagttgatataagaattaatttagtaaagaattgttgctattatagatgaaaaaaagaaaaaaaaaaaataaaataaaaaaaaaaaaaaaaataag

SEQ ID NO: 257046 - DNA, 228 bp, Gossypium hirsutum
gttctcatccttgtcgttctgcacatcctgctcgtttctctcctgatgataaatttagtaaagaacgtgttacatgtaaaaaacgatttggtatcttacccacacaacaaccagctgtacgatattaagcaacagcaatcacacacattcaatcacatgtcatacatagaatagaaaaacgcagcacttggataggtggaaaaaagcaacaaacacgcatcgtcttgg

SEQ ID NO: 257047 - DNA, 247 bp, Gossypium hirsutum
attattttttggttccccttttctttcttcttccccctttaacgtgcttgtgcattattagtcatcgctgagataatctccttagtttgaatatgcaagcaaaaaccctattgatgcagcagaaaggaaaattttaatacccaacaaattcaaaagaaaattaaggatcgtgaaagttacccagattatttgaccattttaatcttgtaccaagatgaagttgggaatgatgttttgcaagtaactg

SEQ ID NO: 257048 - DNA, 168 bp, Gossypium hirsutum
gcctgctctcttccactacccccccccccaagcggagcggcgctcaaagagtatcagcaccttcaaagaaaccacaactcaaagcaatggcggacaaggctgttaccataagaactcggaagtgcatgaccaacaggctcctttcaaggaagcaatttatcatagatg

SEQ ID NO: 257049 - DNA, 222 bp, Gossypium hirsutum
gccacttctatggctatatagatagatcagtacttacaaataagagcggcggccagctcgttccattttcttgtatgccattgttatcatgtaatgttttctttgtatgttaatcctcttgttgttgaaccctgtttgttgcagttcactgtatttcttttcaaagttttaacacatattaataaatatttacgttggaataaatattgatcgtgtttatgg

SEQ ID NO: 257050 - DNA, 160 bp, Gossypium hirsutum
caatactttgatgtactttgggttcataatcccgtatttcttcatgaaattggttctttaagcagtttgtaagattttacttcgcaataatcgagttttatgttggataactccaatatggtctcaatacaacagacaacattgtagttgattgatttag

SEQ ID NO: 257051 - DNA, 136 bp, Gossypium hirsutum
ccttcgctctaaatcagtagttgagcaaacctctttcacaatgagcagatccggccagcctccagatctcaaaaattaagctgaatgcaaatcggttggttgttggtacacttcgcggatttgatcagtttatgaa

SEQ ID NO: 257052 - DNA, 329 bp, Gossypium hirsutum
attctgaagaggatccacaaattatgaggctaaagagaagcttaaggccagaactaggagaacctgtgattttgaggtgtcagccttacaaaattccattgaccgagcttctcttgccacataaaatttcacctgtcgagtttttccgtctatggcctagtttgccagctattgtggaatacactggcacatacatttatgaaggaagtggcttcaaggctactgctgcgcagcagtatgggtcttctccatttttgagtggactgaaatcactgtatttcaagcctttccacagagtttgttcacacatcattcgcactgtggctgga

SEQ ID NO: 257053 - DNA, 127 bp, Gossypium hirsutum
gatctgaccttcgattcttgggttatatagctaatcaaattcatggttttacactgtggcttggagtggaacacatgactgttctatctgctgctgcctgctttggtttgatgaaaccattaatgag

SEQ ID NO: 257054 - DNA, 206 bp, Gossypium hirsutum
gatccgttttttaatcttttatctgtattgaattagattcatatacccgcattttcaatcgtttagttattgtttaattcctcacaattctccattttcctcagttttaagtgcagtagagctccatttaagaaagaaaaaaaaagttgaaatcttttttgagcaatggaaggatcagtttttactccatcattggaaggaatgaa

SEQ ID NO: 257055 - DNA, 140 bp, Gossypium hirsutum
cgtacgcgtgggcggacgcgtggggtttgccgtagcctgcctgttcttccactacagatccacccattgcgacggcggaatgaagatccgtcaacgccgtatgcgactattttcgcatgtatgaaagtcgaggaggacgt

SEQ ID NO: 257056 - DNA, 216 bp, Gossypium hirsutum
cctactactgccgttttgcctctatgttcgaccaacagccacctcgcgagggcctcatctgaccccgttcgaccatgaacctgagggtctcgctcctagcctcagaatcttcgcctagactccgatttcaacgaagcaagcaaagactcgagggggccaaaactacgataagtccctctttctttattctttcttatatctacagcaaataaagat

SEQ ID NO: 257057 - DNA, 215 bp, Gossypium hirsutum
cctacgcgtccgcagaaatttacgcccaacctctgtgtaatttgtctcacaattacaataaaccattatctgttttatttgtttttatatttataagaagagagtgagagtatctaatcattcccaaatgcctttaaattgcttaacccttggtttcagagtcccccattttctgccacaaaccaactacatagctttcactacctacgtaggaa

SEQ ID NO: 257058 - DNA, 278 bp, Gossypium hirsutum
gttgtttctggagcatcttgatctgtctggatgtgctaacttaaccagtcgggacattctgaacgcgacatcaaatctgaaggatatgaaggaggaacagaagccaaattgttatcttccgatttttacatgagactccctatcttttattcttgattgtttccaaatatacgatgatcgaatctttgaatcagataattatgggaagttttccacttcattatcatcatcatcatcatcttccatggttgcttcttctgctagtactaagattattt

SEQ ID NO: 257059 - DNA, 105 bp, Gossypium hirsutum
ccctcgcgtccgatttaattgatgggttgttgacagaagattctaatcagacacttggagccaaaggagcattagaggtgaagcaacatgtatttttcaaagata

SEQ ID NO: 257060 - DNA, 132 bp, Gossypium hirsutum
tgtggtgcacgttagaggattgtcggcgcatgatagcgagtgtcgataagaacgaagatggatttgtctgcttcgaggacttgtacagaatgatggagctgcagcgatgatcatatgattatgggtttttat

SEQ ID NO: 257061 - DNA, 116 bp, Gossypium hirsutum
tcttatctcttatttgcaatcccaaaagagaatggctatcagcaggaaatcaaacaaattggcacaaacagcaatgataaagcaaatcctgaaaagatgttccagcttagggaaga

SEQ ID NO: 257062 - DNA, 253 bp, Gossypium hirsutum
atctcgatgccgtctttgacgattacgacgactttttcgttgaccctacccgtgaagggaaggaagaagatactcaaaaggaattattacccgttggagcattcaaatggcggaaggggcgagttgtgagtgagtcacctaggtttcttgagaaagcgcccaagatcgtgaatgtgaaagtgagtccgaggaatattcaccaaccaaggtagatcgattcctgcagatttgaaattgggaggtctccttagag

SEQ ID NO: 257063 - DNA, 186 bp, Gossypium hirsutum
ctgtctcgtgggtttaaaatgaagaaaccttccatggctttttaaagcttcggcacttacatagcaaaattcacatcaagaatgaataacatggaattggatcggtggaaaacgaaagttgtcgagtaatcgatcgtgtccgccgatatccgagatcttgaggtgcatacaaacacgggatcgtca

SEQ ID NO: 257064 - DNA, 313 bp, Gossypium hirsutum
cttttcgtccttccacgcgtccgggaagatatagaaatttcttctgataatggaaatgctgaaattggtgacgaccgacagcaattacgaccatctagttcaaaagtgcctgtaattgaaagctttgaatttgtatcacccaatttagataccgagacactcgtcacacatcaaaagcgtgacaaacaaagagcaaacaaggcacaacctctgaaggttgtttcatcagaaaagtcatcacttcaaccaagtaccagtgcaaagaatatgaatgtgaaccaagagagaaaaactgtagctgtaaaaatatctg

SEQ ID NO: 257065 - DNA, 256 bp, Gossypium hirsutum
ccctcgcgtccgtgtactttcactgaaccaacaaacctccccgtttctctttctctttctcctcccttaaaacatctctcactcagctctagattgagtgagaccttgccttagtggactttgtccacgcccgacactcgtacagattcccttgtatttcaccctttctcgtaaaagcaggtcagcctctcctcagctttctacacatattcaaaagtgtatgtgtatataaaaaaattaaatgcacataattatt

SEQ ID NO: 257066 - DNA, 194 bp, Gossypium hirsutum
ccctctcgtccgcccacgcgtccgacttaatatatgctgtatgatgcatgatactgatgtagtttcaagtatgtgagttgaagatgatgcatcattgtgtaagcatgccaggttatattttgttttagaatgtgatatattctcatgccgtgctcaaatgggttgctgcctgctaatggagctacaaatacatc

SEQ ID NO: 257067 - DNA, 228 bp, Gossypium hirsutum
ggaaactccagtctccatttaatcttcttcgatgaactgaagcatggcctcgaatgaaaaaatcaggccagtccaaacgaacccaagccgaatcagtcatttgtttgggaagtatctctcgtctcctctgcaatcaccatgtctctcaccgccatcgagatgtcctccatccaaaagaatccaaatatgctcgatcaaaaccttcatggttgattttctcaattaccg

SEQ ID NO: 257068 - DNA, 99 bp, Gossypium hirsutum
tctccggagtaagggtgtctggcactattgagccgcttacaagacgcattggttccgggcagggtttgcatggtgatcaatctagatacagatctgatg

SEQ ID NO: 257069 - DNA, 158 bp, Gossypium hirsutum
ccacgcgtccgtcgaaactgaactgtgactcattcattccaaagctgaggaataggtgcaggaatcttgggatgacaatggacaaccccatcttatatgaaccggctcgaatgcaaatattttctgatgggaatgcacttcttcaactgcttgaaaat

SEQ ID NO: 257070 - DNA, 248 bp, Gossypium hirsutum
ggatgatgttgaagctttgctcttgcaatgtgactttccaatttcaggcatcggttcaatgccgattccccgcttcacccggtcctttcgcatttcggcggcggagcccggtctctgtctcttgttccccgctgagtagactcaagttgacgccggttcaagccgtgctgtcaagccagcaaaaagaagttgccaaggttggtaaatctgggtcggggagtttggccgacctgctccgcttgggtagc

SEQ ID NO: 257071 - DNA, 372 bp, Gossypium hirsutum
aatcatgccttggaatgatgcaaaggcatgagtctcccttttggcattggcgcattgcttttcaactatttcatatcaatccttctttgattctgctaccaccatttaggtcatgcatgtgcctggaaaatagcctttcgttgcgataaggtgggctcggttgggtttcagccccatgacatctggtttctgctaacatggaaagcacctgttttgtgtctttaaggcccaaatatttgtttattgcattcacagcgaaggaagggaaccacttctatatttctcctatgatacagagagacactactgggttgactactgaaaacaaggaactgaaactacggctacaggctatggagcaacaagcgcagc

SEQ ID NO: 257072 - DNA, 213 bp, Gossypium hirsutum
acccgaacttgttctgtctttcaaaaccagcaaccggacgaccccaatgcataaaacccacagtttttccctacccaaacccgaaaacactcccctctataaaacacactccaatccacattagacactcaaaaattccatcttcaatttctcaaggttgtttttcttttatcaactgttccaatccaaactcacagattcaatggccgagga

SEQ ID NO: 257073 - DNA, 336 bp, Gossypium hirsutum
tttcatgcgtccgcccacgcgtccgagcaggtcgtcaccttcagcaactgcctccgatgccaacattgcctacaaccacactcccaccatttcccattctatcccctaatctcccacagccatccataccatctttcccaaggcccggtgcactttctccatttcctaccatgcctgggttgcccacattgccaagtgtaccaagggccacactgtctcctctgccaagcatacccttattccccacaatccaacctacaattccctctattcctttcctttctccaccaccttctccttttaccccttaaaaatcccttttggcttatgggaccc

SEQ ID NO: 257074 - DNA, 270 bp, Gossypium hirsutum
tcggtctcgtgggcagttttgagagcttcgtcgacatcaggtaactatcattgttgcctccttggagaaattagaaactgtcttattagtgagtcctgtttgtatgtgacttgcatgaatattccaatgcatctctttatcagatatttgttaatgcagaaaccaagcctgaaacattcatttagaggatacttgtatacttgtatgacccttttgttccgctctttttgttttctatactattaattgagatgaatatgagtattctaa

SEQ ID NO: 257075 - DNA, 99 bp, Gossypium hirsutum
tttataaagtttaccctgaaaacaaggtgccgtccttggaacataatggcaaagtcattggggagagtcttgatttgattaaatatgttgatagcaact

SEQ ID NO: 257076 - DNA, 377 bp, Gossypium hirsutum
gcagcatctcttttatactctttgtaatttacttcaaaaaaatgccactctctaaaccagacaagaacaacgtcgtcatcgacatcaacgacgagagcagcaacaattgtggtgaagataaccaagatgagcaagacaagttagatgccatcactagccatctttacattaagccaagccattcgaagcaaacattggataaagatatggttttgagaaggattcgtcaccgtaaacgtatgaataatttcaggtccgcatttcaatctttcattggctcttcttcttcttcatcatcatcgacgaaaatgaccaagaatggcaaaggttctagcaatgaactaaagtgggtcgatgatgcttttgcagctctttga

SEQ ID NO: 257077 - DNA, 408 bp, Gossypium hirsutum
ccctctcgtccgtaaaattaggagttttctcacaaagttcccttcatccttttgattttctaagcatccaaatacctttttcttttccattttgttaaaatattcatcctttctccttcaattttcttttattacttagctcgtttttgctcaaattgatttaatttcatggagatcttcaaataaaagcctctaatcacgagggagcatccacgagaaaagaaaatggcaattagaagatggtgtaggttcaacagtatcaatgaatcaacagggcattgtggctcaaatatagcgttggagaataagggaatgtcgagtatagctccattcaccgtagatagtgtggcgtgtctgaagagtgtgagcacttgtgctacacttattggagataacgcaagactcttt

SEQ ID NO: 257078 - DNA, 443 bp, Gossypium hirsutum
ccctcgcgtccggtgaattccgaacaggaaagattgtcgattccgttattcttcttcccttcccactatgtcaaagtggcgcctctagatgagctagtgaatgagcaaaacccagcgaagtataaagaatatagctggggaaagtattacattaatcgaaccggcagcaactacaagaaactcgaggctgaaaaccttcaaatcgaccatttcaagacgccagaatccgaataattgctgcactctatcatctctgattctaaaccattacctgttttttagtttcagcttcaagttgtcatcatatgatataatgaacatagtttgcatcatatagaaaaatatgcttttagtatgtttcagctacgtgattatatgcttttagtatgttttggctacgtgattatatgtaagattttaagttgaacaaaaagattgttttc

SEQ ID NO: 257079 - DNA, 326 bp, Gossypium hirsutum
tccctctcgtccggaagaggatactgaggaaaggcgcagtgaggaagctgggagatgatttcgagagagtggctaaggataaggatagcggcgttgcgagtggaggaaagaggggttttagtgatgggatcggcattgacgtgatgaagattgtggaagaggttaatgttgagtcagaggagataaagaagaagaaaaagaggattgtaaagggtttgaagaagggtacagatgaggtgcagagtggaacagggacaacgacaagggcctcccctagactggccaaacgagggtgctaggtctttgtaggatggatgtaggatttt

SEQ ID NO: 257080 - DNA, 431 bp, Gossypium hirsutum
ttttgttggctcagttgtagctgctgtaatgattgtttttgtattattggcttatcaccgagcgcaagttaaagaatttcgtggaagaagtggatttagtgaaacgactactgtaggtgatgctaagttgggcgggttttcacgaccttctgttttcaagttccactctaatgttcgaacaccacaaacttcgttgagcttttcaaatgatcacttgcttacttcaaaatctaggccattgccctactcgaagcagcattattcaaagcttgtttgctacataaccaaagagctaatggatacagagaacccacctcaagtcctgcctaacggctatgtctacagcactaaggctctcaaagaaatggccgagaaaaacaatggtaaaattacatgtccgaggactggtctggtctgcaattattctgacc

SEQ ID NO: 257081 - DNA, 359 bp, Gossypium hirsutum
gagccatcaaaaaggaatcaagagatatcagaatggggaaatctaggactttgagcacgaagtggcggtggcaacaaacttgctagttattttaggattggatggtggaaccacttctactgtctacatttgtatgtcaattatgtctttctctaacgcccttcccaaccctcttcctgttctcgcccatgccgtcactggctactccaatcataacagtgtcgacgatactatggccagggaaacattagatcaagttatggcagatgcactttcaaaatctggttctaatcgatctgcagcatacatttcatgtcttctttttgcaatggcattttaaggatgcctttttttttctt

SEQ ID NO: 257082 - DNA, 395 bp, Gossypium hirsutum
tttcttcatctataaacaagactgctggagaagaccatctcaaagcttctagtgttttggccgagaaccgtttcagggccgcaactatggtgggtgtcgaaggtggtcagcattgggcttcagctgccttcccagctaatgattccaaaacacggtcagggtcgaaattgcagtccttggggaagcacaaactgcctgcatcagacacagcctgacctaaatcaaaactgaagaaggcctcaacggagcatagcgatgtacctaacttacatgctgtgcaagtatttcaaccagtatcaacaattgcattaaaagaccccaacttatgatgtgacccaacattggtcactaatgttggcagttggaccaatggtgttggcagcattttctgttcg

SEQ ID NO: 257083 - DNA, 102 bp, Gossypium hirsutum
atttacactgtttctacttcaagtgtatgcatccattgacattgtccatttgtttaagctggcttaactataagctgtccacttgtatgagtgatcattctg

SEQ ID NO: 257084 - DNA, 416 bp, Gossypium hirsutum
  unsure (1)..(416): unsure at all n locations
gagtcatcaaatttttatatatccaattaattaaataaaaaattattatcaaaatcttaaaaaaataaatcatttcatgtttagtaaagtttttgattcactaataaattttttttctgaggaaattatttgcaatggaacaggcacaagtgcatcggatagccaacattcaagactaaggaagagccatggaatactgaatatgctaagttggggcatattgatgataatcggagccatggctggtcgctacttcaagcaatgggatcccatgntggttttattcccacgccgctattcagtcatgcgccttcctgctgggccttgccggtatcatttctggtttcgtcctagaagatcgtctcgtccccgaagtcgacacccacaaagctctaggcatcctcattctcgtgctc

SEQ ID NO: 257085 - DNA, 171 bp, Gossypium hirsutum
caatattaaaattttagggaagttaaataaagtaaaattagcataaattgcttagatattagaaagaaaaagtgaaaaaataattgttaaaattaatcagattaatttagttcataattgttaaatttgcacattacttttaaattaatggatcaaagaacttttggtggt

SEQ ID NO: 257086 - DNA, 244 bp, Gossypium hirsutum
cccacgcgtccggtcggtgtctttggagacatgtacataaagaaaagaatcttagagaacaaaagataagaatatccaatgatttagtcaattttgtaggagacagaaatgtaagaactgtcgttttcttttcctcttttgaagtaagtttatgacaaaagtcctttaggatacctctacgcaacatcaaatgaatcatttagtttatcatgtgagattgggcatataaatctatgttttgttg

SEQ ID NO: 257087 - DNA, 412 bp, Gossypium hirsutum
cggtcgcgtggggaaaaatagttcttaatacattttcttttcttctttttaaggtttcctctcaaaaagttttttccttgtttcttccctactttccaacggtcaaagtttttgacatcgtgggaatatttatattggagaaaaaatatccattgtatactaaaatatcacctgaaaccctatgacaaatcttagtttgagcaatgaaaatggaagaaatcttaatctactctttgctttcggttcttatactatgggtggccaccaagttaatcacctcaactcacaaaaatcacccaccaagtcctctggctcttccgattctgggtcatctccatctcctcaaagaacccctccatcgaacactcttcaccctctcccaaaaacacggccccatcttctccctcaagct

SEQ ID NO: 257088 - DNA, 342 bp, Gossypium hirsutum
ctcattcgtccgcccacgcgtccgcccacgcgtccgtttactcttcacttttaccttttagtctatgtttcttgactcttcaattttttttttaagtgcttatgtgcaacacttacgtcaataaatgggtatgatggatatgatctccaataatcctccaaatacatggaaaaactaagaaagatctgaccatagccatgtcagacacttacccgcatcacacacacacccaagtccgagtaacatagcttttagtaactttaggaagcaagaagcaagaagcaagaagcaagtggctttcattaatccccatagttgctcgactcttgaggagtatatgtt

SEQ ID NO: 257089 - DNA, 208 bp, Gossypium hirsutum
cccactctttcgcccacgcgtccgatgctggatactctcaggtgtgaaggtcttcaaacatgtttgtagaaaattttggtagtagaaaagggaaatacagttttcttgttgctattaaataaagttgaggaaggaaaacagacttttatgtatatatatacaatatacatgtaatgctattctgtcaattgattctcatatttattgt

SEQ ID NO: 257090 - DNA, 390 bp, Gossypium hirsutum
atttttcttttaaaaatcatcttattttatcattttcttttggtttagctgtccaactaagttagttagggctaaattaccactttagtcttacctcaattaaccttcaagctatttaatcaactaaatgcaataactaccaagttttgcaccttttacaatttagttttttttcattaattaactatctaaattttaatattttcgaaccaaattttgatatgaccttagtgactcataaatattctttttagaatatttatgagtcaacatgacagaaatttgtggtcccaaaaccactgatccgtcaccactaaaaatcgggctgttacaactctcccccttaggacatttcatccttgaaatggttacctaaaaatagattcagat

SEQ ID NO: 257091 - DNA, 224 bp, Gossypium hirsutum
agaatctatgcatcaaggttgtcagccactcagcttagtatatgtatcaagacgatgaatccaacacatacttgcggagggtctgctgtgacagttgggcatcaaagctgggtagccggtattatcaaggagaagttgaaaatttttccagattacaaacctaaggacatgtgagatgacattgaacaagaatatggaatacaactgaactactgccaggcttg

SEQ ID NO: 257092 - DNA, 217 bp, Gossypium hirsutum
ttgatactaccattaaccagtcttatgaatgcccggcttgtgtgcaagaaatggagacacttgaccacaactcctcggtttttacagatgagacgagaaggttcatgtcaaaaaccatggttgtttctctttggtgctgttaaggatggctattgctctggggagatacatgcactggacgtgtctcaagatcaatggcacaggatctgtgctgata

SEQ ID NO: 257093 - DNA, 333 bp, Gossypium hirsutum
ggaattcatgcttttggaatctaaatcgctgtcctttttatcatttagagaaccttactagtcctaaaccccaaagtaaaaggagaatcaataatagttcgaagttggacaggctgaccactattaagtcaatttctgtagggtcagttgcttttacttatggaatggttgttaaaacaaataagagaaagtaaaaaaaaaaaaaaaagtggggagcaggatattattcctggtctttggctttgcctggtaagatgaaagaaaaatggaaatatggaaaattgaaggtgtagtaaagtagaaagataaaagaatatatttgttctttctatt

SEQ ID NO: 257094 - DNA, 381 bp, Gossypium hirsutum
tccggcgcgtcgtgtgtcctccacggcggtctcgaactcgaggctgacaagatccgcgccgtcccaccttcccaacgcctccaaatcgtcgaagcttactcgcccgacgccatcgctcccgcaccctcgtcctacggcacctctaagaaccacttcgccgctactcctgctctctccgtctcgtcgtctcctctcgactcccccgtctcttctgcccgctcgtccccaccacctcaaaccccacccatgcttgcttctccaagcaggccggcggcggttgctggtaagagcacggatgagatcgaagtcttgaagttggatgcttctgagaagctgtaaaaggcaatcgggataacttggttcttgacgtttgtgtgtgtt

SEQ ID NO: 257095 - DNA, 322 bp, Gossypium hirsutum
ctttaagataaaagcaacggcctgcaggagctgccaatcacagacaatggtagatcaatgaatgttgttgatggagctgacaatactgttaacattccagatttaaagaacaccttcagcactccaggaacataaaacaatatccaatatttcccttaaaattgatatgtttcgagcagagtagttcttcccaaggcggtaaaaactactatatatgtaatccaccccctccctattaagcacttttgtaactcaataatcatcttttgattgtactctttttttttctttaataatctaattaatttactcttgaggcttt

SEQ ID NO: 257096 - DNA, 270 bp, Gossypium hirsutum
gccttgcgttcgaccacgcgtccgaccacgcgtacgagctcggatactgaggcttgggcgtggcgtcgatgttgaggcgctggcatcgtacggaggcattgtccggttgcggcgcaagcattaggctagggttttttgcctgctttaaattttgggccacttgggcctaattgatttgggctcgggtttgtttgtaaatgggctgatggactgttaaaggctggactattataatgttttttattgcaataattttgatttatgcttgta

SEQ ID NO: 257097 - DNA, 308 bp, Gossypium hirsutum
atctatattctattattatttttcttaattttagtaatgtaaagttcgttcctttttcttaactggcttggttagacttggcaatccatgtatgagtgtatatatgtgtgtcctgtttcatattttttaacataaacctaaacgattaaatttgtcaaaatcctaaacatgaatactattatactcgtcatgtttatttcattgttttcgtgcttatcaatcacgtctaggtgtcattttgtgctcaaaattgtcagaggtttatggtgacttgaagtaacaatttactcagtgatatgattttctcg

SEQ ID NO: 257098 - DNA, 102 bp, Gossypium hirsutum
tggtattggatgttccttttgagatgatagagtattttgatccctgtcatcccattttggttggaggaattggtctcggtgaggaaaatattggatacatgc

SEQ ID NO: 257099 - DNA, 228 bp, Gossypium hirsutum
cttgttttttttgacttgcgctatcaacttgtcagtcaagactgtttttcttttatatgttgggaaatgtgggaattcagtatgttcaactgaaattaggagggatgttgtatggtagctatatttcacttgctagcaatttaccattggatttgttacataatggtgttttagttaaatgagaaatccattggggaaccctttatttgtaatttgtagagcttgggt

SEQ ID NO: 257100 - DNA, 137 bp, Gossypium hirsutum
cttttgtgtttgctattgaattctttccttcactttctcgagaaaaaaaaatgtcttcaggttgcaattgcggatctagctgcagctgcggcgacagctgctcatgcagcaggaaccttaaccttggatactcggag

SEQ ID NO: 257101 - DNA, 337 bp, Gossypium hirsutum
tctcctctcgtccgcccacgcgtccgctgtgattggggtcatagcgatgtgtcggatggagatgatgatgaaaatctggagaagtctgcagctggatctagagtcaagtctaagaggagcattgcaggattagcaaagtgcacagcaaatgaagatggaattaatattgcagacttgattggttacagaataaaagtgtggtggcccatggataagaagttttatgaaggtaccatcaagtcttatgaccctataaaaaggaagcatgttgcattatacgatgtggagaggggggaagtactccgtttggaaagagagcgctgggagcttgttaatg

SEQ ID NO: 257102 - DNA, 494 bp, Gossypium hirsutum
  unsure (1)..(494): unsure at all n locations
catttctaataattataaaaaaattgcttttaccatttttcttcatgggcttagattgaaatctccaggttttttttttaatatccgtttcaaattttggggatttgctatcaattttatgtagtagaaggaaattggagcctttctaatacttaaaataatagatatcccttccatcggcttagattgaaaatctccaatttttcctttgatttttagctttatttatttttcaacaaaactaggtnttcggtttcaaattttgggggattttgctatcaatttatgcagtagaggaagctagggcctttctgaaaaaaatataattttacctttcttgggtttagattgaaatcttttttttttttcctttgatttttagctccacgcttttttccccttttaaataattgatctattggaggtgggagggtttcaatttggtaaatccattgaattttgagggcctgggctataaatactgaatttgactc

SEQ ID NO: 257103 - DNA, 429 bp, Gossypium hirsutum
  unsure (1)..(429): unsure at all n locations
atgttatctcattaactgtcagtctaaccttaaaacctgttattttcctgtttcctttcttctttcgtttgtccgggaatctgagtgacaatttcttttcttttgaacggnggagcgtaatttaatttttgttataagcgtttccttattatggtgtagtggtaagtataataggcgaatataagttgaaataatacaggagatgagcaaagaacacctgcctgagccactcgatttcttcatttggaccgttgaggatgctgtatgtgtgggggaagatataaatcttggcagctaccgccagattttcaaagaacatggcgtaaatggggaatacctggaaggcatgtctatgttcacaactgaacagattcttagatttataaggcaatgccatatgaagggnggagacttcatcactctatgcaa

SEQ ID NO: 257104 - DNA, 134 bp, Gossypium hirsutum
ttcctcgcgtccgcccacgcgtccggttagttgctcatcgtggcattttcactatgataaaaatatacatctcccatatttgatcaattttatcgtttctcctttgatttccgcttaaccagtgggaattagtt

SEQ ID NO: 257105 - DNA, 301 bp, Gossypium hirsutum
ttctctagatcgcgagcggcgcccttttttttttttttttttttttttttttacccattctaccccccttggacaacaaacagggaaaaaattccgtttcacagaataagccttgagaaaacatgacagaatgaacaagcagagcgcttactcgctgggccagggtagataggggaggagacaatcaaacatatgataagaaaccccagagcacacgactttatagcccttaggggaaaaacgaaaggaaggattcgtactacctctttaacaattaattaacaaaaacatgcatgtttta

SEQ ID NO: 257106 - DNA, 378 bp, Gossypium hirsutum
tgggttgggaagtgaactatggagcagaattcgtacccagcggtgaagatagctacacaataataatccagaagagcaagaaggtgggttgttcagagggagaagtagtgtgtgacaatttcaaggttggtgagcctggaaaggttgttctcaccatccataaccctacatccaagaagaagaaactcctctatcgcttgaagaccatgcccgcatctgcttagacccaaacactaagagattcacttttgctattttgcttgcctcttaaaaaaagagaacgtttctattattattattatttggaatttggaggttgttcattttatttaattatttttagatatagttatctggtttgtgtatattttatttata

SEQ ID NO: 257107 - DNA, 389 bp, Gossypium hirsutum
ccctctcgttcgcccactcgtccgcccacgcgtccggattcttgctatttgccttttcacttcgttgtcctccatcatttcttccgaaaccaactcagatttctcaaacagctttcattttcgattgttttcatgattggctttcaaccatttgaatctttcttaatcgaggtagtttgctttttcaagttaaataatgccccgcgaagcatataatcaaaacattatctcgctaaccttttctctctttagcttttgatcgactacacattacatggtcggggcttttcttgttcgagttcagctcagctttgttaagatgctgctaattggtgcacttggtagcccgtaatttgttttttgaaggaacccgtaatttgtttttttta

SEQ ID NO: 257108 - DNA, 207 bp, Gossypium hirsutum
cactcacctcagctatcgaaatcctcttcttgctgtacactctcccaacgttcaacccctcgtcttccctttgccttctcacccttgcctgcctcatggagtcgaacaaatgcaagatctccccatttcctctcttccccacattggtaacgcctcgagaaaactctaccacccttggggtcaatggatgcgagcccaacaatcacc

SEQ ID NO: 257109 - DNA, 471 bp, Gossypium hirsutum
aagatctgcaagaattacttcattgtcatctgcattgacttctgcagagagattagttgaggcatattttcgaagaaatgtggtgggaagaaatcaggagcagccaccaccggttaacgatagagattccttgtcgagcaatgctgcagtaataaacacggagagtcaattagatgctgcggtcgaaatagactctgcgatatcagtctcaacttcatcttctagtagaagaaacaatgtttcaagggttttggatgtggatggcatcaaccctcgatcggttaggagaagactgaactaggagctagaaagagtttttatcatatctcaatgtcatgaaattgcccagcattgcgcttgtattgcttttttctgttttacaaagaatttagttaatcataaagctttcaaatatgttatgctcacattatgacaatgaaattgtcaatcatcctttataatgatccggca

SEQ ID NO: 257110 - DNA, 143 bp, Gossypium hirsutum
cccacgcgttcgcttttgagaggctgtgtagaatgtgtaagcaagcagtttgactgatctttgactcttgaaaatttatgtacagcaaactgtgtttcatgttgttcttagctaattcaaatatggattaatgggtttgattt

SEQ ID NO: 257111 - DNA, 342 bp, Gossypium hirsutum
tcccattcgtccggaaaaaaatgcttcccattcctctgctagggtttcgaccttgctttagggagccacataggagggtcatcggtgcttcagcaccttcgcctctgacgcagatccatgaagcgaacacaggtaagccctttctctttcagtttttatttagaatccgtttgtaaaaaaaacgaaaagaaggaataaaggaaacgtgaatttgaaaagaaaatcccagaaaaagaatgaaaaacaaccttttaaaccttggatctgatttttttattgctattgattttttttattcagtatccataaaaactttgcaccgattctctggctttttatagc

SEQ ID NO: 257112 - DNA, 407 bp, Gossypium hirsutum
gtttaaacggttttagaaaccatcaactttttccttccctccaattctctcttgctataataaaccagtcttcttcttcttccactttccttttcttcttttgcctctctccaaacaaacaacaagaatatatatattatatatatatcaaaaaagagatttctcactcactctctttcgctgttctgaagagaaaatcactagtgttacagttaaggttcaggtgagcgtcaaattttctcaatttcaatgaaatctactttctgatgttttttattcgatatcattttttttagatttttttgctgttattcctaaaagcttttccaagcttcgttcggaaatgcaaaacgacaattttgcaaccgtctatggcgacctcgcagccaagcaatcgaaagatcacc

SEQ ID NO: 257113 - DNA, 360 bp, Gossypium hirsutum
cttgaatatggaaatcctgaagctactttctgttcactgcaatgatcatttgaacatgaaggggccacatatttcgttttgacagtatctatacccagtatattcctttaagtgcaatgtcattagctcttgagttgatctcgtacgcatgttgttgatatccaggaaaacaagatgttagctttgtcgaatatcctgatcttatttccagtcattccagcattgattttgtttgctacaagatccttattactgtaatattgtagaacacacattgagggattttttttttctattttttgagaagtaatatttgaaactgttattcgtgtgaaaaaaaaaaaaaaaaaaagggcggcc

SEQ ID NO: 257114 - DNA, 147 bp, Gossypium hirsutum
ggccaagagctcctttaagttggaacatcccctcgaaaggaggcaggctgaagctgctcggattagggaaaagtatccggacagaatcccggtgattgttgaaagggcggagaagactgatgtacctgagattgattagaaaaaata

SEQ ID NO: 257115 - DNA, 355 bp, Gossypium hirsutum
gttctagatcgcgacggccgccctttttttttttttttttcgcatataaactgaaccagaatatgctcattcaacaacaagaggattaacatacaaagaaaacattacatgataacaatggcatacaagaaaatggaacgagctggccgccgctcttatttgtaagtactgatctatctatatagccatagaagtggctcagttcttcggatggctaggtgatgggagcttctccaatggagggtgtcctggatagtgaccagaaggtggtttttttggatgttcataaactggtggcttgggttctggtttctctttctttggaggttcgtggattggtggctttggtggtatt

SEQ ID NO: 257116 - DNA, 105 bp, Gossypium hirsutum
tcatcccttttcttgaacctcaacatgtttgctcttagttctgtattcaatggcttccaattctttgttcaaaacttttaaacacaatagaaagattatggggaa

SEQ ID NO: 257117 - DNA, 472 bp, Gossypium hirsutum
gctgctgtatatatgtatgtatatatgtgtatatataacacttgccttctattatgtgtatgggaaatttttccttaatcaatcaataagtcatttgtgttttgcatatgaaaagagcaagaggtgttttcggattgattatgatggtactatttttcaattggagtttcatgataatgagtccaataaatgttgattataaagggtcaaattttaccaaaagtctggatgacgcttgattcgttgtcaaatgcgatataatttcagtatcgtgttaacggatcttcgatctgcaagtaaggaaacaaaaaagagttaactggttttggtcctgaaatgatagaagataattagtgcatgagcttgacattatcatcatatgtatactggagatcatggctactaccttgaatgtatggttgattatagtgtgatgatttaaagtgatccgatgtcctatgttcatatctaa

SEQ ID NO: 257118 - DNA, 300 bp, Gossypium hirsutum
cggacgcgtgggtgatgatggccatcgcatcgctcgtcgctgctgtttggaccaaattctaaattcatctccaccaccatgatgatccacccatgtattgatcacatcatctcacactctcttcctatcctcacttcctcctccttccctttctcccctccttttggttatttttttggttcaatttaataattgtttcacctcctaacgatagtatccctctcctccaacctttgcctgcctgtcctcattatcattgtctcgatctcttttggttggtacatcccctcctttcctttc

SEQ ID NO: 257119 - DNA, 290 bp, Gossypium hirsutum
aacccaccttgcctgatccaccattccacctccggtgaccggccttccacgactccacctccgctctaacggtgcttccagcgaatctagccttcaacatcttctacctttgaatttcaaagaaacaagctattgaggcaaaaaaatagcaggcccagtcaggttgctatcacaaggctagcatagttaaataactagttttggtaattaattttatttggtactcaaaataagtaatttttaactacttttgtcttacttattaaattgagtatgaaatataatttgat

SEQ ID NO: 257120 - DNA, 242 bp, Gossypium hirsutum
atcatcaaaatcaatactgggtggtaaactttaattaaaaaaatcaaagttggtggaaatattcaataaaattcaaattttagtggcaaaattcaatcacattaagttaattgacaaatttacgtatattctcatagtataatgacaaatgtaaattaaaataaagtataatgctattgtgggtgctctctaaagaggtaaacaagatgaatagtcatgaaatgtgctccattctcatgaat

SEQ ID NO: 257121 - DNA, 125 bp, Gossypium hirsutum
tcgctctacgatgtaacccccataatttggccataacgtctaggctgagtatgggatgttacagttatgtgaccacatattgatccaattgcatcaatgattttaacctgacataatggtataca

SEQ ID NO: 257122 - DNA, 410 bp, Gossypium hirsutum
gttgtgaattatttggcagtgcataggcaaggtttacgtgtaaacgtggagaaattgtggtcccttcttaactccagttggcttaaaagtttgggggaaatctttgaatctctagcaaaagtagctaaaagcttataccccaagtggaaatttggtatccctgcaacagagtatgttgaaggcactgctacacttgcaagctcattgtattatcaggctctaggtgtgcctacaggcccacatggtgctttccgtgactaccaagttgacgcaatcacgttggagatttcacctaaattttcattggacaaagtctggcgcaatgacattcttctaagaggcggccggttgattgaaggagttatacgatcagtaaataacctcctgagaagtttcaccaatcatttttc

SEQ ID NO: 257123 - DNA, 308 bp, Gossypium hirsutum
tcgtagttttaaaagcttagagaaaagaggcctaattcccccatcagccaggagtggaaggaaatagagagaatttgtttccaaggatgactgttcaaatttttcggtgaggcaaatgagaaggcttttcaccagatgccattgatgggagaccaagctggatccatcttcaatctttaaatgctttccttttgtttttatgatagttaaattcacatatagttgctttcccctcctttttatgaccaaacctcggtcttatgtgatgtaacaaaaacctggaaaagataatttaatgctgttttttt

SEQ ID NO: 257124 - DNA, 372 bp, Gossypium hirsutum
gctttaccttctctaattttctcgggaaccaaacaggggaaatttgggttcttgttctgaaaattcaatgactttcaatgatgataacaatgatgatgagggaggagaagtggtgtcggagctgaaattacgagttgagggtgatgatgatgttaatgagaaaagggtaagtttgagacagagattattagaagaatgtgaagcggaagagaataattctttaagtttgagacagagattattagaagaatgtgaagcggaagagaataattctttgttaaaagagccaggtttttcttctcaatcgagaaggtctatttggtactggatcaagttgggaattttacttacctttctagggatgctggctgc

SEQ ID NO: 257125 - DNA, 247 bp, Gossypium hirsutum
ctaatatccagttcatcgacacttaggaactgcctagtcgagttcacgcgattaggcttagatcaatgcaataccagaccaaagttgcataacaccgaagacatcaaacccgaaaatcccgattccccagaacaaccttcggtaagaagcaatgctaaagacagaataacaaacgaacccaaatctctccaaggtttacggatactcctagcggaagatacaccagttctccaaagagtagcaacca

SEQ ID NO: 257126 - DNA, 491 bp, Gossypium hirsutum
ttcacgcgtccgcaatgacttcatatttacagccacaaaacttgggatgattgaagtttggttaaaagaaaggataagtagagttggtgccattaaaatgaacagcaaaggacatgcaaaggttacatctctggtttcagacatggatggtggaatgctttttgctgcttcctctgatggcaaaatccaggcttgggctctggactaaactgggtttctttttgtaaagaagaatgattagcaatcgatcaacaaaaaatcttacagcacgtttggttcgctgtattggattagaggtgtattggattagatgtgtaatggaatagaggtgtaatggaaaagctgtgtaatagcaaatcaactgtttggttgaatgtaatggaatagaggcgtaatagtaatcctgtgtttggttgaatgtaatagaggtgtaatagcataatgaaaaaactaaaatgactagaatacccttagcagaaatttgttttggt

SEQ ID NO: 257127 - DNA, 431 bp, Gossypium hirsutum
gtcctgtttgtctattagggactgaattccggaaaaaggtctgctgggaaattttggtggcgggttctgaacaaggtattgaggctggacaagttggacttagattgattactaagggtgacagacagacaactgttgcaaaggagtggagcatcagtgcgacaagtattgctgatggaaggtggcatactgtgacaatgactattgatgctgatataggggaggcaacttgttatttagatggtggttttgatggctatcaaactagcttacctttgtttgtgggtactagcatttgggaacaagggactgaggtttgggttggtgttaggcctcctattgatatggatgcatttgggaggtctgacagtgaaggagcagagtctaagatgcatataatggatgttttcctctggggaaggtgcttaaat

SEQ ID NO: 257128 - DNA, 298 bp, Gossypium hirsutum
tccacgcgtccgaaattgccgcgccgtgaattcagcaactatcagatccaactcagatgctgctctcggcagctcaatataatatttgctgaactgaaggctaagaaaaatgggcagaagagaagctattttcctactcaaaatcaaaacgaataatatattgtaactctttaatgcctacaataaaaccctacgacgtttgttgatttacaaaaactatgctctgtaactttttgtgtttattacttagaaggtaatataaaataagcttaagagttgaaaaaaaaaaaaaaaagga

SEQ ID NO: 257129 - DNA, 265 bp, Gossypium hirsutum
tttttatcaaggtcaaattgcagttttagtccctaaattttggttaaatttgaaatttaatttttatactttaatttggcataatttgatggttatctcacgattttggcttctaaattatacatgttttctgatttcggtacttcaatttttttttgtctgactttattactttgaagtattgttttcgctaagtactaaaataggaaaacaaatacagttcagaggtgaaatcatgaataaaaccttcgctcatcccaacaac

SEQ ID NO: 257130 - DNA, 507 bp, Gossypium hirsutum
tccacgcgtccgtgtaaatgttatttataataagatagtatattagtaggaattattttttattattaaaaatttaaatcccaaattggaatctttggattaatttcttcatcttcttttttgatgaaatctttgaattgttttcttaatttattttattgttaaattttatgaaaattttcaattatttatattttattatttacatatatttttactgttaaatactaatttaaaataaactaatttaagttgattgagtattaattcgattggcatcgatattattgttagtgcaagaggatgtgagtttgagtgtgttgaagcacattatcctcctatttaagggttagggagggattatgagtagttctaggtgtaagaaaaatttgattcgattaaaaaaaccgaaaaaatatttaatttttgagttaattgaattgagctattcgaattattcaagtcaacttgaataaataattcgagttttgagttcgaatcgagtta

SEQ ID NO: 257131 - DNA, 417 bp, Gossypium hirsutum
tccacgcgtccgttcgctgtatggcgtgctcgtttgggttgggcgtcgtctaagagtgctcggagtgtggattaactccagtctcctatcaggtggtggttatcgtaggcgattgattttggaaacgtttcaacttcaacccgtaacaggaattaatatttagatctattttctacgcacgtttaagttggattcacaacggatatggggtaggaaggtatttggaacgttcttcaatgagtagatctcttgtgaggattaaaggctaccgatcgaggagtgtgtgaaaagcttggatcatcggagtgaataaatctagtcatcaacttcggcaaaggtgtgaacccaagggccattgtggatggtggccgaatgtgagaaatcgcataggagatctcgtcaaggaatatcgcaaat

SEQ ID NO: 257132 - DNA, 371 bp, Gossypium hirsutum
ttggtgcgggtgttggtgaagtcgaaatgccgttctcttagccttgtgttctgggaattaagtaatatagtctgctttagtttcgttgatgatttctttgaatggggtttgattttctgcctcttaaacagctctggtttttttacttgtttcttgatgttgaatactattctttcctcgtctttttattctgtattgtgtgtcagtgtcatctgtatatgaatatctttttttcaagtactaatgtcgtaggcaaaaaacaagtactgctcttacagtccaaaattggaggagcatttctttgtaatagaatttgtaagattttcaaacaatatgaatggttgcttgcttggaacccctgttttgcttgg

SEQ ID NO: 257133 - DNA, 310 bp, Gossypium hirsutum
tttgggttcatgactcgatatctaaagaagctagtaacacacatgattgtggaagaaaggaatctgatctgatgtgaaaatggcttacctggttgtttgtgacgttctcgccaccaaaggattgatgtttgactggaaacgatttagaaggcaagcaagtttaatgcttccaaaatctcttgttatttataatagatcccaagtatgttatgctcgtacttccaccctacggctggaaatagttgcactgcagcagtgggttgaattgtatgtttatgtcaagataattcaagagcctcatttgaggatc

SEQ ID NO: 257134 - DNA, 511 bp, Gossypium hirsutum
  unsure (1)..(511): unsure at all n locations
tctcacgcgtccgcaagtatgatgtggtccaatgaaccgtcatttgaagctgaatggggcacacagatgaaccaagtccctccaaatggattctttaatatcaccacttgtacagctgctgctacatctacttggccactttccggaacaaccgaatcaaccatggacttgtcatattcggaccagtgcccgatagagctgcaaatgaatatgaacggtaaaacaaatatgctgagcatgccaatgtctcaaattgatgaaacagcagaaggtgtttggccatcccatcagcagtttgagcagtgtgacaataatggttggagtagtgctaatggctcttgggatccttacctctatgtttcctctgtgcttggttgagtattagccatttatagattcaatatttaatgcaattctttcattttccattttctttctaacttntactaatcattctttactttttgtgcccaaagaatccccattataagctgtaaattgattttttttc

SEQ ID NO: 257135 - DNA, 390 bp, Gossypium hirsutum
gtggtgcgagtcttttaaggaatcgagcccacagacaatttaaagccgtaaggaatcttataattgaccttcaagaagctaatggcttgccccagcaactcatacatctaaagtcatgggaacctaaattcaaaagaataaagcaagtcatcgcaaatatcccgtctttaccacaatcacaggcgaggctgaaactgctcgaagtagaatggtccttggagcaatgcctaaaactaagatcagaggtacgcagagaactagcaaaagcacgccgagtacaatcacaggtccataaacttggtgaagtcctccttaataatggggaattgagcacggaggctctagaaaaccagcttctttctgtgatgccaactatggaagaaattgctg

SEQ ID NO: 257136 - DNA, 204 bp, Gossypium hirsutum
atatggtggggctgatgatcgtggtgatcgcttcagagatcgtgatcgatacatagatgaccgttatgatggtggacgctatggagatagagaccgttttgacagtagagatgatagatatggaagccgtgatcgttatattagtgacaggtatccacctactggagatcgatttggtgatcgatatgctggatatgatcgttt

SEQ ID NO: 257137 - DNA, 176 bp, Gossypium hirsutum
acgcttaatttgtcttcattatttggtaattacggattcaaatagcgccgaaatagtggtatagtggccactatttagtggtagtgctgccggccgctacagctatcggaagaaaaactgttgagtttaaatcacaacaattgcggtgaatagtggccgcaataatcggtgtagcg

SEQ ID NO: 257138 - DNA, 157 bp, Gossypium hirsutum
  unsure (1)..(157): unsure at all n locations
cccacgcgtccgcccacgcgtccgcaaatcttcatgaggatttggttcttaattatgtgtaatgtgggcttttctgctatgtcagaatgtattatgatatttaagaaagtttgttttcaattgnaacaaanantacataaaaaacaacaataacaac

SEQ ID NO: 257139 - DNA, 211 bp, Gossypium hirsutum
gaagcttctgaaactgatggtggttttttccacttaatgtgatcgatccatttttgggactaaaagatggtaacagaatcttggtttcgtaatctttggaaaattccgcggaggcaagatggaatctctgagaaggttgagatcggagtgttggcattcgaagttgcgagcttgatgtctaagcttgtgcatttatggcagtgtttgagtg

SEQ ID NO: 257140 - DNA, 125 bp, Gossypium hirsutum
cccactcgtccggttgacccacccaatagttagatctcagtttcctttgctaccaaactttggcaatggcggatccagcactttaccaccaaatccaacccatcaaagaaatagccatagactac

SEQ ID NO: 257141 - DNA, 252 bp, Gossypium hirsutum
tctctagctctccaccgttgacttgacgttgggatcgccgctctcaaagcccataaccaccttagactttgttgaactagtggtattcgcttttattactatatataccttattatttatattcattgcatctctagtcttggtttatgtcaaataagtagtttgttttgcaatatagttggtgccgatgtaaattacataatatgaccaaaatatttgggatgttctaattctagctaaaatttcttttta

SEQ ID NO: 257142 - DNA, 261 bp, Gossypium hirsutum
aagtcacttttgctccatcttcttcacccaattcttgtaagccacttggaaatctgagcaaatggatgacaagcatgaaggagatagaagaagatctgaacaagaaaataagcttcttgagtggacttattgtggcttttagagatcaaattcacactgatattcagctcaaaccgggcaacgatggtccttccataccagctcacagggctttacttgcagcaagatcagagatatttaggaacatgctagactcagatg

SEQ ID NO: 257143 - DNA, 189 bp, Gossypium hirsutum
tgaatttgtgatgtaattgtcttttgctactctctcctctctgcttatagatattgttatcttcagtaaggctgcattctatctgtgtaagcagtatattccgaaagaactttaatgaaggattgaatggaagtcggtgacagtgtttgcttgttatcatgcattaaagaatacacaatctttcaggtt

SEQ ID NO: 257144 - DNA, 325 bp, Gossypium hirsutum
cattgttgctttaaatgatagaatttggttcgttcatctaggcaatttcccaacaaagtcggggtttttctctaggcaaattgtaactaatatttcgaaccaagtagaaatatccaaatcatcaatgaaacttgatctgtttgtcttatatttacaaaccgcggatttcatttggtgcaggtgctgaggttgccgttctttgcattacaaaatctggggaagtagtgaactatcaggcttttacaaactccaaggggatatacaccgtggccgaaacaatgcccgagagcgagcggcgggatgcatgcttggcacgacctatcag

SEQ ID NO: 257145 - DNA, 364 bp, Gossypium hirsutum
agaaattccatattagattcctgtagaagcttctagaatgataattctgtccatattaacactgatatagggcattctcggaaaagatggtccatcgtttccatgctgattcacaccaggggcaaattgcattagtaatttgctttctgtattgcatgttagctcgtgtaggcaagtgattctggaggttttccaaattgtaatcttaattttggagggtagatttaaaagctatagttttttttatagaaactactgtagtcggtttggaaagcataaacactaggatcttccgacctttgtaatagtttataggcacgatggacagagtattctcccgagagttcaccactccaagccaaga

SEQ ID NO: 257146 - DNA, 105 bp, Gossypium hirsutum
tcccactcgttcgcaaaatcagaccacgaccaaggtaagcttccttttcctatcatttcagggatcttccccagctatttttcacgctgttacagaattatataa

SEQ ID NO: 257147 - DNA, 272 bp, Gossypium hirsutum
gcagttctcacctgttagagaaacacctgtgaaaatcgagcagccaacgcagattatgacgccaattaataatcaaacagggcttatgcagcagcctaattattcctctgcttcccagaatttttatcaaagccaacctccacagtatttgctaaatcagcaaccatcagcttcagctgtggattacaccactccaaatccaacggggatgaagatgggtggaagcaacatttccaaccttattagacacagtagctcacctgcagggttat

SEQ ID NO: 257148 - DNA, 325 bp, Gossypium hirsutum
cctttgcgttcgtgcataaccgatcttgtatcgaggctcgttttggaatgtgaaatcattattgatgaagtgttccctgtagaacaagaagacgaagattaaatcgtaaaggaacagagagaagctataacagttgcagggaaagggattttcaggaacacaggggcagctctattgagcatgcaagaaattagaagagggagttctacttacgggcatttttctctgactcctatggatttgccagactctgatctcatacactgctttcaactcaactgccggatccccattgtttgatcacacaacttaaatgaaatttacg

SEQ ID NO: 257149 - DNA, 274 bp, Gossypium hirsutum
ggttgtgttcgattcaaccatgaagaacataacagcgaggggctacttcaacaacaacggtcagaatctgaaccatcacttcgaaactgatagtgttgctcatgttggaactaatggctgctcttcttcttcctcttgatgctgctgtagatgatgatgatgatcagcttcattgttctttttttttttaatacctcatggggggtgggggagataataacctgtttagatatagagtaagggactttggttattagtttaaatttttgtttcc

SEQ ID NO: 257150 - DNA, 275 bp, Gossypium hirsutum
tcttaccttgcttcgctgtcggaaaaccacataaaacctggcttggtgaaaggcaaaagacacaaggcagaagaatgttcggagtggtattccccaaccgaagcttcccaatggacatctctagcttcacccaaattgataccttccattgggtgctcgatatgaacactttcgttggcgaatcctaccatcaaattggtgatatgtgcatcttcctcttgaacaacttcactttgcccccagataaggctttggctgtctacgtccagtcccct

SEQ ID NO: 257151 - DNA, 191 bp, Gossypium hirsutum
gcccacgcgtacggaaaagtcaaaagtgagagttcatcttttgacaaaaaaattatgtttctctaatgaaattatctgcgaaggtgtctgaagcatctgcgagcagaaaccgcagtaccagggatgaagggtgggcagccttcaggaacatattggcagagatcaatgaggcatcaaggcttttcttattg

SEQ ID NO: 257152 - DNA, 106 bp, Gossypium hirsutum
tctctttaaaaaaattttcgtatttaaatagcaagtagggaggagtgacagaggatgagtttgtagtgtaggaattttcgaatataattgtcgttatggtggatct

SEQ ID NO: 257153 - DNA, 167 bp, Gossypium hirsutum
gtttcactataaggccatgaaggtgggcgatctgggagggttttactacaagggcgccaccgatcgccgagacgtgggggtgggcagcgtggttaaggaatggaacgcagcggagggcggagataaaaacagcgaggaggtggtggatgtgaaggcggtgggggaga

SEQ ID NO: 257154 - DNA, 197 bp, Gossypium hirsutum
atttcatcaccgataaagtcatggcactgatcaacgttgcactattgtgcacaaatcccacttcttcaactaggcctgtaatgactccgggagagagcatgcttgcaggcatggctgatgttcaggaatacctcacagagtcaagcatttcttcaaatcgtcaaatgcgcgcagagattatgaaacagttgtctcgg

SEQ ID NO: 257155 - DNA, 268 bp, Gossypium hirsutum
ttcattcgtccgattatcgtgagggatcaaagccgggtttactataatagagatggcttttgctcttgcagggattactggtaaattgtaccctgaacacctgataagagcagattcaaaatgccgttaggaggatgatcgaacaattgcatgcctggtacctagtcacggctgctgcaaaattagcttcacgggtgatctggactttccatggagattgcatcatagctgaaaactattatccttaagagagctttatgaaattacc

SEQ ID NO: 257156 - DNA, 219 bp, Gossypium hirsutum
ttcgtgtaatatctttgaaaatctctacctggggctgaattttaagggctctcttttttcctccccagaaaaaaaagcttaaacaaaaaaatggagaataataacaaccaggtcacgggagagttgaagtctgggaataagaagcaagttcgattgtcctactgtatggagtgtgaagagcttgcccgtaaagatgctgcttactcccaactcattacc

SEQ ID NO: 257157 - DNA, 165 bp, Gossypium hirsutum
ttgactaatgggtgggaggcaagattccccaaaaaggaatcattggagccaaggtagactacaagcaaattcttttatgtaactaagaaagtattatatatgctatgtatcctaaattgagatcctgcaaaagacttttttgtagtattatgtaacaagttcaag

SEQ ID NO: 257158 - DNA, 226 bp, Gossypium hirsutum
ttgtctcgtgggtttgaatgagaatgttgtgggctgtataccccattgccgcttctcttttttattcgttatgtggttttcttgataatttagtattatagatttactactatctgatttattctccccttagcttgtaaaagtaatcaatgtttagatttttcgtttctcggtgtttatgtttgatatatttgaacaaaaagtgtaagatgtgcttatgtttaaa

SEQ ID NO: 257159 - DNA, 288 bp, Gossypium hirsutum
ggatgaaacatagcacaacaacgatctataaatttggagaatatgtttgtacctgaagaacatgagaagtcgttgatgtgttaaaccaagtctcttttcaggacaagttttgtttgataccagatgctgatgagtttctagattcactatggactaacaacaggcattgcagtcctctggagattgctttaaagttgattggataacatcttggatttgagttcccaatcctgtcgaattctagtgcatttgaagaaacattgcatgttttttagagtgtggagatgg

SEQ ID NO: 257160 - DNA, 414 bp, Gossypium hirsutum
ttgtattttccacttcactccccactatacacaccatcagtatttgcagatgatcaaagcatgcagaggaagaagaagaagcagaagaacacgaagtagtttgcattattcatttctcatctaaaactttaatcagattttgattaacatagaaaaaaaaaaaaaaaaaaactgttcaccaccccacaacattttataattcactagtctttttgttttcttgttgggttttcttttaaatgggttttctttgccattttggggttttatgttaaaggtctttttcttttctttttttcccctttccctggtttttgttgcttaaaaatggagtccacagagttgtaacatagggacaaagtggttttcattttgccctttggcttttattttttctggactttttttgaaaga

SEQ ID NO: 257161 - DNA, 443 bp, Gossypium hirsutum
tcgtttacgcgtccgcccacgcgtccggccatgctgataaattaaagaaaattagcgaattttactcttactttatttgacatcaggtccaaaaaaaaattgatacatgatacgccttataaattacgagaaaaaaattataaaaaaaattaaaactaaatatcggtaagggtgagaaaaaaaatctagaaaatcaatttaaattatagcatttgatttgatttctattggtatttattaaatttgattaagttttaatttagcttgtatttagaagtatttatttggtttaattttctgttcttaagtaaaaatataaatttttctgattgtatctttacaaggccttcttctttgttgatatttttgaatggctgagtcacatatctctctgccaatttggttgtcaatttaaatttaaatatatttaaattatataaaaa

SEQ ID NO: 257162 - DNA, 440 bp, Gossypium hirsutum
atcgtttatggctaccgaagaggaatcgatagaacaagtcttttgcgtcacgtcgtgagttgcttaaagctcttaaagcagctcaggagctgttgaatgccccagatgaagattcttctcaagctgctgagaatcaaacggatgatactaatgaagaaaataaccccagtatgaagtttcgaaattatgtacctcatgataaacagcttcaggagggaaaggttgctcccccagtgctgccgaaatttgaagaccctgttgcagcagaacctccagcatctgaagaaaaagaggatccatttgtcaacattgctcccaagaaaccgaactgggatcttcgaagggatgtgcagaagaagctcgataagcttgaaaggcgcacacagaaggctattttcaaacttatggagcaacaagaacaagaaaaacagttagatgaa

SEQ ID NO: 257163 - DNA, 337 bp, Gossypium hirsutum
tcgttataatgggtgttcatctttctttcttcattgccgaaattgagaaagaaaaatattgtttaagaagccaaggcattcggccatggttatctcaatttaaaggtatgtaatgtgattttttttttgtaattgattatgaaattaaagtgataagtactgtgacaaccctaatttgaccctagtcgggaagtggtttcgggaccacaaaaccgagtcataaaaataattgattgttatattctatgcttattatatgtgtacatgcatatgtgaaagtttcatgctctaattttggcatttgtatgtgaaattattaaataggacttgtgtgaaa

SEQ ID NO: 257164 - DNA, 308 bp, Gossypium hirsutum
cgttcggcagactcaaaatacagctgaattcctgcttcttgatcctctccttgtcctaccttttccttcccctcattctctccgacgccagaaaggatgctctcatcgaaggatggacgtcgatcaagatcatcaaggatccgcacatgacagagatcacagaatttgccgtcgacgagcataacacgcagttaaaggggagtttgaaagtggaagaggtagtgaaaggcgagactcaggtgatctccgggatcaattacaagctggttctgcaggcaaaggatggaacagctgataactcatgcgag

SEQ ID NO: 257165 - DNA, 240 bp, Gossypium hirsutum
tataaaaaaaaagagagtgtgaggacagagcgatttccggtgggactccggccaagggtccgtgccaccggagcctcgctggcgccggcgccggccactgtacacggtggccgtagaggtggagcagtccggtgacagagggtaagtagggagagttggtggccatggcatgggtgttgcggcgctgaggtgactccgttgatgggggtaggtgggtaggttcggcgcatgtgggaaggt

SEQ ID NO: 257166 - DNA, 265 bp, Gossypium hirsutum
tttttcaagtggttcgatcactaaagaagagctcaactgagtcagctggagcttttgttagcagagtgacgcgagtcaagtctcctgttgtgctgtgctccgagggtcccatttccatgcttgttgaatgctttagcccttgaaataagtgtgtaacatgatcggatttttgttctttatgtccgattttctgtttatggatttcaagtatccattccttgttgtaaaatatatgacgtattaaaatctacggtacttttgattg

SEQ ID NO: 257167 - DNA, 358 bp, Gossypium hirsutum
ttgtcacgcgtccgcccacgcgtccgaaaacatagagcgttaagtccctataaccaagatcatttgattaggcactcgcttgatgcacctaggcatgctgttttgtaaggcaatattcataaaaaatgtctacatggttaaaaaaacgtgcttttttttttgcacttttggcatcttgcgccctttacaacattggttaagaaatttgttgttggataagcttgtagtgatttttgctttcccaatgcaattttcttttctaaattttaatgcttgctgtacaaacttggcatattttctatggcttctcctttgcaggtttcgcttttgactgataattatcagctgataatggatg

SEQ ID NO: 257168 - DNA, 226 bp, Gossypium hirsutum
tttcacgcgtccggcggctcggcgcagcgcatggaggctcacgtgagagggcagagcctgattgcggcgcgatagcttgctgcaagctgctagggtttctaatcctctttgggtgttgggctgggtgtagtgggctaggctagtgtttgggtcactttggatttaggcctgctattgtaacaaaagaactgaacattttatttattttattttatattttggtttt

SEQ ID NO: 257169 - DNA, 351 bp, Gossypium hirsutum
tcttatatgctgagcctcaacgtttcgaaaggacatgttaattcgaatttcgctgaccccaaatcctggctttcaggtgataatcgcaacatcatgaacggtaactcctccccgactcaccttccaactcactcttcactcacttactccaacgccaatctggatcgcgtcctctacaacgatctcgtcgagatgatccctctcgttcaatccctcatcgagaggaaaccaagtagttcatttacaaggcgtggttcgatgatatacaccaagaccccttcaagggaatccttatctggaaatgtttactgatatgaaagggaggaatggagctcagtcaattccaatgag

SEQ ID NO: 257170 - DNA, 303 bp, Gossypium hirsutum
tttttgcgtccgcccacgcgtccgattgactatcaacgttcgatatcggaaccaccatacacggctcttgagctccatcttctttacttaatgaagtgggatcttcagttgcctctataccagctaactcatcaaataactgaatcggtgcatttcggttgcttcgagtcccacaataaacagctaccattgtctccacgtcttcatcggctatgagttccatttcagtgaattttatgggatctgtcgaaactggaaacttgtagaaaagtttcgacatacttcttccacaacgtctataaa

SEQ ID NO: 257171 - DNA, 144 bp, Gossypium hirsutum
ttgtcgtttgatccacaaagacctacatggggggaatttaaagcttcttatccaattatcgtgacatccaggtcccagtaggagttgtttcccacaaagggtaaatagaaagtgagataaataggagggcataagagatggatt

SEQ ID NO: 257172 - DNA, 385 bp, Gossypium hirsutum
ctccatgcgttcgacagaatcaactagctttaacctaaaacaaactatacataagactaacaggcaaaaaagccaactccttttgtcttttattccttccattcccatgtccattacctcaacataagctactctactcatcatttatacacaatcagtccttttatagcttacccaattttctttcaacctccaaatccagcctcccagatgtctgccggaatctttgcatcaccaatcgccggctctggatttgatggcctgaaaaccaatgtttcaaagctggttccaactaatgattctatttcatggagccggagaactgtgtccaatggttcaagaacccactgcatgaagacatggaattcaatcaacaacaagaagt

SEQ ID NO: 257173 - DNA, 243 bp, Gossypium hirsutum
ccctcttgtccgtggggatgatcgaagaatgccagattgttttaacatgatctgacgtatcgaatcataatgatgttctgaggattatacaccatgggcgaggcgatccgttgctaactttgggttggataatggcgtggttaccttccacccaccactaacggaaaaaactttatgtgccattcagacagaaacgggtacttgtcagattttacttccagtaatcaactttttaattctctt

SEQ ID NO: 257174 - DNA, 106 bp, Gossypium hirsutum
ccctctgtcttccgatttggatagatgggagatggtgctggtggtggcagtggtggaggcggagccagtgcaggtggtacttctgggtatggcaatggaggtggcg

SEQ ID NO: 257175 - DNA, 102 bp, Gossypium hirsutum
tggctttcttgagggagtcaagagccttgtcatttaattagtgacacacatgaatggcttaacgagacaaccactgatcttgctgactatgcagcgacacca

SEQ ID NO: 257176 - DNA, 258 bp, Gossypium hirsutum
gcgttgttaaaggctgcacagccaaagaaaactctgaaaaccaaggataaagcagaggatgaggagagcgacgaagacaaagacgatgaagataaagagaagaaaaataatgaaagaaggggaggaagatgataaaccaaaaggcccttcaacgctgtcgaagctaaccccagaagaagcggagcaccgcgcactgcaagcagctgtgctacaggaatggcacatgttgtgtaaagatcgaagcatgaaagtgggtta

SEQ ID NO: 257177 - DNA, 367 bp, Gossypium hirsutum
cgcggagtttcattaccccatcaaaaccgaggagttcgatcataaacaagacaactcatcatcatcatcatcatcatcagttgatgaatcatcattagcaggatcattatcttcaccagaatctgatatcactttctttgatttctctgattccaaatgggaagacaatgaaattgaaaacttcagtttagataagttcccatcactggaaatcgattgggaagccatttgagtccctaaaaacacaactatcatgtaattttcttgtattttcttaggtctaagcatcttttacctttgtcatgtaggctttttttttctttccttagtgtctctagtggtctgtctacaatgggatttttgacat

SEQ ID NO: 257178 - DNA, 352 bp, Gossypium hirsutum
aaacgcactcaatgcagtgtggtgctgaattggtgcaggcaaaaacttaaataaaaaacttttgctgtttttattgtatttcatatgttgaagccttcaccaagagcctgaattgtgattcatagttagtgtttagtaagccagtgaatgtatgaacgaataaaatgcccataaatttatttgtttagtatattttccaaatggcagagaagttcaatgtttagggtggcatccaaattcgaaatcgttgtttgttaatatatatgtatttcataattctcaatgttatgatgttgataattaaacactttgctgtaatccaatgtgaatcacccagattatttatcttaaa

SEQ ID NO: 257179 - DNA, 355 bp, Gossypium hirsutum
cccacgcgtccgcccacttccattttctattcccacccaaaggtcacctatcgaacagcactcggtcaggtctctcctccgcatatccacctccgatgttccttgcttagggacccttccggtcacgtatgctcacgattcttctcttatcgcctctctagctaagttgtgagccactagatttgtagatctgtaggctatttggtgaaaacattgcttttgttgctaaatgtttcgtattatactcccaatcatcgatttaccaatcttatctgatttacttttttttattactgataccgagtctccttcgataacaactaatgtgaaccccatctgttttcccatgaaaact

SEQ ID NO: 257180 - DNA, 349 bp, Gossypium hirsutum
tttttcaacccgtttgttaaaggtccacctgtcggtatcaatctttcaatggatttccgtcagtttttcgtggttgtttttgctcttttcaaccttatcaactttgccagcactactgatgttgccatcacgtttggtcaagtttctaatttgaatttgtgtaccaccgacctggccaacaacggtgttgattttcaagtcagcgatttgactatcacattcgaagtgtcctacaacttaaccttcagttgtttgtatttcactagtatcgaaatctccgaccaaacccaaacccctgtttatttgacttattacttcgcaagcaaccaagcaagaaacaattatttgg

SEQ ID NO: 257181 - DNA, 302 bp, Gossypium hirsutum
cttcacgcgtccgaaaccctaaaaggtgttctttgttattcttgaaaagaaaaatataaattttttacagagtttgttcatcaaggaacgaatttgtacgatttgtcgttttaagagatgattgtcagttcaaatatgggagccgaagccgatatcatatttcgccaccaagttgttgatgtaatgtcgatttccacccaagtttctcgcttcgattcggttgcagcttgtgctgagaccattggagatgctgctattgagtcatctgttgtcaaatttgtgccaagaattcgttctggtag

SEQ ID NO: 257182 - DNA, 343 bp, Gossypium hirsutum
ctcacgcgtccgcccacgcgtccgcccacgcgtccggttcaaggccgctaaagcagactatcaagatgaacatcaatgctaaggccccatcaacttcaacctcttcgcttccactctccaaattgaaatctttcgatgtacacaacattgaggggttgtacactcacacgctagatgagtgcctgcaacatctcaccagcctcaaaagattaacaataggagattgcacggaggctgatttagagggcatgcaatgggaaccccttaagaatctctctcatttggagattgataatattccaaagctggcgtctctctccattcggcttcaacatcttgttca

SEQ ID NO: 257183 - DNA, 101 bp, Gossypium hirsutum
tcggtaaatctttatcattggattctctgaacttggttaacgttgggactcaattgaatattagcagctaaaatgttagattttctgtactccaatggcaa

SEQ ID NO: 257184 - DNA, 325 bp, Gossypium hirsutum
cccacgcgtccgcaaactttttatttttctttctcttgagtctacgtctctctcgctcgctctctctatttctttaatggcgagaggagaatcaaaactcatttgaaatcaaggcatagcaatagcagtagaatagcttcgcctattcacggcgcgaatctcgagaggacttcattggactctcttattattttctcagctgcagattttttgacaacggaacataatttttgcttgcatgaaaatttgagaaacaaggactctgcttgacaacttggagactaagttaaaaatgtcatctgtaagcaaggctgatcggaaaaca

SEQ ID NO: 257185 - DNA, 147 bp, Gossypium hirsutum
cttccgcgtccgctcatttcaaagtgttggtgggcctagtttattccacaggagactgtcttgctcaagtgtgggaatggtctgtcttgggctagttctatgcatggtggtcgcgccaagcttggccacggtttacaatgttggtga

SEQ ID NO: 257186 - DNA, 340 bp, Gossypium hirsutum
cccacttcgtccggttgtttgctttctctcccgggggggttctcttagcctcccccatggccaaccatggaatcctcggcgattgtccgtgcccacgtcacgaacggcggtcagtattgggcgaaacggatccttttggtcctcctccgaacggggtcgaagacggagccttcacagcccaccatgatagaagagaaaagggaaggcccctttctgttcgtcgttcccttccacggcccttggctgaacccccaggggttcaacgaccttcaaatcggagagggaacgccggagcttccccaaacagtgaatcggaggtgtcgcgtgacgcgcggaagag

SEQ ID NO: 257187 - DNA, 196 bp, Gossypium hirsutum
gcatgacataccccccatacttttgtttttcgatctattcttcattaaattgagctgtggttcgggtttgtgaattggtcttttggcatattctgtactgtcagcaatccagcatgaaaagatagtaacacgaattattggtaccctctttgccaaatttcattttagttgagaaacatgtaccatgatttgatat

SEQ ID NO: 257188 - DNA, 306 bp, Gossypium hirsutum
ctcctttcgtccgcttcatcttctccttcatctgccgggatactttctacacaatttgtgtcctcaaactctcctcccatatttcagatattcctccttatcttctcccacagatctgtaactctctctccttctgttcccatattctagctagcaaatgattatgatctgtgctaactggatgcttctatgattgatcaaagaatggcatttatggagtcagagtttaccaacttttaaagagaaaaaccctcagctggaggtggctaatgaactcattcatgggcagcatccacatttgaaagg

SEQ ID NO: 257189 - DNA, 408 bp, Gossypium hirsutum
ttcacgcgtccgggctgaggttgagtcaagccgtggtcaacttaagaagagcatgagttattctagttcgaggaggattgaggtagaggagcttttgccgtatgcgcatggatacaccgagctaaattttttctaaaggaggttacgacctgcattcaatgagcttaaatatcatttggcaagaatttcaatgtgcttctacctctcagcaatatttttttttttctgaatcaatcaggtaaaattcactttgaggagatccattcttgagggtgatagagacgttcctttgctcactaaccaaaaaaaggtgtaaacttaactaactcgaattccaactcaatcataacatgatgtcagcttacaacattccaatctcaatgcaactgattaacaaaaaagtccact

SEQ ID NO: 257190 - DNA, 168 bp, Gossypium hirsutum
attgtatatccagtgagataaagcaatcaagttatatgcacaagatgttattcttctctcaacatgatttatttgatgtcgacactggtatccgattccttcaatatgcaggccttgcgtggtccgtggtagatcttgtcccctccctcttctgtcacctgaggttgt

SEQ ID NO: 257191 - DNA, 251 bp, Gossypium hirsutum
ctctttgctcttagagctgttgttccaaacatgggcaaaatggacaaggctgggataattaaggacgccattgattacatccaagaattgcacaatcaagagggtagaatccaggccgagatcagcgagttagaatcgggaaaactgaagaaaaatccaggtttcgaatatgatcaagagttaccagggctgagatctaagaagactaaactcgataacatttttgattatggtggatcaagagcttgccc

SEQ ID NO: 257192 - DNA, 426 bp, Gossypium hirsutum
gtccggaaagtagcagaccttccttttcttcaataaccaaaactgctggttttcttgacaaggagcttgctgcaagtggatttacgagaaaagatgaggatgacattcagaaattcattgaaggtgatgttgaagaggatgatgtttctgatggtgaacatgattctgagttatgtcaaacaaatataaagggctttgattcattgcacttagatcaggaagagtcaacttcaagatgtaacgaggaaggtcaagtagttgaaaacctccaaagccctgaagtaggccagaggggtgatcctgaaagtcaaaacttgagcagcaatgagggtgacgaaaatgatgacactgaactcgtgaagagcttggcgaagcatagacgacgggcgatggcagcagcacgcaaagggcatcataagaatagca

SEQ ID NO: 257193 - DNA, 107 bp, Gossypium hirsutum
ttctatcttatctcttcagtgaatcctctgacagagggggataatggcttctttcaatgacatgttctcgagctttgtcctggctttgtcatttgcaagctttgatg

SEQ ID NO: 257194 - DNA, 140 bp, Gossypium hirsutum
atcggtacttttcgcagtctctctggtacttaaaagggaattcaaattccaaagagaaaagtgcgagaaatttcatatatttatctacacagcaaaaagaagagaaaaaagggaattcaaatttcgaaagagaagaaaaa

SEQ ID NO: 257195 - DNA, 342 bp, Gossypium hirsutum
ttcacgcgtccgattttaccaactctggaaaacaaggaaaaaactgacattatatgggtaaaacacctactggcaaggagctagctcgcgagttacttatcgcaatatctagttctgtacctgatactgatctgaatgcagaacatgcatctaaaaatatagaagctacaaatggtgctgcagtaacaaagtctgatggagctgaaaaatataggtctgaactgatctctatatcctatgcccagtctcctgatgatcaagtgcccctggttgcgcttaggaaccatgtgggttagtgaggactaaattgacatgggaaatttaataaaatacagtgtgtag

SEQ ID NO: 257196 - DNA, 263 bp, Gossypium hirsutum
cagatggaaaaaaagaaaagaaaagagaagaagctttaatggctggttcgacgattctctctagattatcatcatctcggttaaaggctcttcctgtaaagcttaaaagcagcaaaccagtgttacccactatttctccattgaaatcgagctctcagtctcagttttcttctgcttcttcttcttcttcttcttcttcttcttcttcactgaagcgcatttccgggattccaagattaccagtggagctgagctgcttaatc

SEQ ID NO: 257197 - DNA, 131 bp, Gossypium hirsutum
ctgtttcgtgggagccattgcaacagcttaaaaaatggaagttaatctacaccctaaaagtccttaaccatatctgtaccaacctggaaatcttatcgttgtaattttggaccacttcattaattgttggg

SEQ ID NO: 257198 - DNA, 128 bp, Gossypium hirsutum
ttcagatccacccattccgacggcggaatgaagatccctcaacgccgtatgcgacttttttcgcatgtatgaaagtcgtggaggacgtgcgcaaagtgctgaacgtggggcgatgttgaggcgtgggt

SEQ ID NO: 257199 - DNA, 145 bp, Gossypium hirsutum
cttattctcgtgatcggaggcggggcacggcccctctttttggacccttcattggagctgcacttgctgcagtttaccaccagataatcattagagctattccattcaagaccagagattgaaatgattaaatctgtgtgtgtgt

SEQ ID NO: 257200 - DNA, 194 bp, Gossypium hirsutum
attttgcaggcattcgcaaattcaagaaaaaaagtttgaaattctgatgcccggaagtgaaatcccagaatggtttagccaacaaagaagtgactcttcaattaagatacccgtctcgaaagatagtcaatggattggagttgcttgttgctgcatttttgtcaataatgatgcttcaagggatgacgagtcta

SEQ ID NO: 257201 - DNA, 221 bp, Gossypium hirsutum
  unsure (1)..(221): unsure at all n locations
cttgcaccggttggctccgccatttattttccggtgatccacagattttatcttacagtattcacaagtacctactatgccaatccgcattgtctacagttctttgttatttttcatagtcttatgtactctgtacttgattgagaatatatgtgatgttatttacanaaaaaaaaaataaaaatttaaaaaaaaataaaataaaataaaaataaataaaa

SEQ ID NO: 257202 - DNA, 143 bp, Gossypium hirsutum
  unsure (1)..(143): unsure at all n locations
tccacgcgtccgcttctttagaattctggtcagctaagcactctcgcaactaaagactcagatccgntcggcattatctttccaggcttagaatggagacctttctattcacatctgagtcagtaaacgagggtcaccctgac

SEQ ID NO: 257203 - DNA, 100 bp, Gossypium hirsutum
atcagtttaatatgaagtgttatctgcaggttcagctgaaccaggggatgacattgttgaagaatggatttctgcaagtccggctaacacattcctggat

SEQ ID NO: 257204 - DNA, 404 bp, Gossypium hirsutum
ggaaattctagttccccctcaactcaatctcatatgagaaccatttctgttgtgccaagaaatgcgcaccctttcccttggactagcatttccagttcaagaactagccacccatcaggttccattaatcctttagagagagctgctgcatcacgggaggaaccaaacataagaaatatcccgagaaacaatgcagagcatccaatgtttgtaccagcaacgcaagatccgacaggatggagtttggcatctgaaaatatcagcacatctggaggcgttccgtcttctaatcgacctgggcctagttcaaccatccagttgccgtctccttcctggattcctccttgcaacccgccaatacaataccaacaaagagtatcagaagttgcaccttggtctttatt

SEQ ID NO: 257205 - DNA, 322 bp, Gossypium hirsutum
agacggagcagaagccacagcccaggagaagctggaagcccaatcagaagcagaagccgtagccggagtccataccatgaggaatacaagagggaactcaatggagaaaggtctcccagtcaatgatattgtgctgccatcttttgtattgtttggtgtatttgatgatggatgctggtgtttgaacttaaaatttggatattttcaaggttttagagtccaactggttatgtcgtaaaaagagttattgcagctgagattctttcttaaggccgtctgttaactagtaatcaagtactgaaattgaggaaccgttttgccc

SEQ ID NO: 257206 - DNA, 121 bp, Gossypium hirsutum
atagagtcaagaacggagcttaaatcagaaacattgctgacaaatttgttgagagaaaagctgtattctaaagagcttgaagtcgaacagttgcaagccgaggtggcagcaggtgtgagag

SEQ ID NO: 257207 - DNA, 281 bp, Gossypium hirsutum
taatttggtttcgtgagttatgtgtggggttaatgatgatgatgattctcctgaaaccaattagcggcagagatgccgtcctagtacttaggagcaacgccacttaccagtgcaatggccttctcggcggctgcgttatccgggaagaattggagtcggagctggatttgttgatgatagattctaccgttatcagaatcctccagcaaggtagcggtcacatatctatagaggcgcttaatgctaataaggcagcagcgaagccttgccctgaaaattat

SEQ ID NO: 257208 - DNA, 262 bp, Gossypium hirsutum
gcggtttaaagagctagttgatcctaagcgtcgggggaacttcgatcacaaccaattgaaacaagccatctacgttgctgctctatgcgtgcagagtgaacctgagaagcgcccaaacatgaaacaagtggttggcatgctaaaagggtatgacactagaggcaacttgatgcagacgagaatggatagcgtaaagtacaaggaagaattgctggcacttgatcaaagaagtgatgatgatgatgatgatgatgatgatgat

SEQ ID NO: 257209 - DNA, 426 bp, Gossypium hirsutum
aaaaatttaatctgtgttcttaggggtgaagactttaaaaaaggagtctaatgaattcttggtcaggatcaggaagaaggcccagaatcatggcttcctcgttgtcattacctcaaaataccatcaccgacatcctctctagattgcccgtcaaatccctaactcgattcaaatccgtttccaaaaactgggccgacctcacttcagcccctgctttcatcgccgcccatctacgccgctcttctactgacccatctctcctcatccgccgctaccactcccagtctggttgggactacgggatctggctcatcactacccccacactaagttacgccacccagctcttgcgtatccccctggaagaatcacttcctctgttcccgaaaatcgtgggttccgtcgatggtttggtttgtcttgata

SEQ ID NO: 257210 - DNA, 230 bp, Gossypium hirsutum
gatgaagaggatcatgaggaagagcatgaccaccaccaccaccaccaccaccaccaccaccaccaccgacatcatcaccatggagaggaagaaagggatgagacagaggagcacgagggcgggttcatggagaagatccggaagtattctattcattattgaatataccctgcacgttttctaaaatgatcatagtgatctagtgttgcatctatctatatgtttatttg

SEQ ID NO: 257211 - DNA, 344 bp, Gossypium hirsutum
tccacttgtccgcttcttcttcggtgggatgcctccggcgacgacccaatttcgaagtttcaattttgggcctggaatgggagctagaatgggggatcaaggctccactggattcaacatccgaatgttgattcagttgttgccggttcttttaatcctcttgtttagctttttaccatcatctgagcctgttttttcactgtccaggtcgtatccttatgagtacaagttcacaacaaagaatggtgtgaactattatgtgaggtccacaaaatttgagcaggattatccgactaatagtgtcgagcgtgtaaggatcgaggagcgtgttgagagagattatt

SEQ ID NO: 257212 - DNA, 271 bp, Gossypium hirsutum
aaacggcatattatcgcaattggaactaccaccttggcacattcctggcatggtccctcctagcgtaccaactctttgattgaaacctacatcataaacaaacacttgtaagttcaaccgaacttattgaatattacccagattaccttggcgtatttattgttgaatttcttaactttaagattcttaattacttttcagtcttcggtagattcttttctaatatcgacgcatacatataagccaattttcaatttttttaactatggct

SEQ ID NO: 257213 - DNA, 249 bp, Gossypium hirsutum
gcctggtacttttgttaacattatatcctttgatgacctgagtgggggactggtgtagatcgatctctaagggcacattgtggcaacctatgtcaccgaaaatgtgagcagctgacgcttctttgggtatcaggaagaaccttctgatgtttctgctgattgagccaagacggaattaatgcttagttcatttaggtattatgaaccacttggtcatcgtcatcttgttttaaaccaattgacaaaaac

SEQ ID NO: 257214 - DNA, 376 bp, Gossypium hirsutum
cccacgtgtccgtccacgcgtccgcggacctaaatttaatgatccggttcaagtatcttgtggagctgcacatactgttcttgttgcacatgatggatacaagctatggtcctggggcaggggaaggagtggagttcttggaaatggtaaaactgttgactgtttcagcccaacaatcgtgctgtggccaccactgaatgaggatttcaagcaagaagagctgaatcaggatgataaaattgtagatcaaaagggttctgatggagtctcggagatggagaagaagttatctttggccatggaagagatgaagctcctccaatcaaaactttccaccatggaacgctatgcaagcatacttcatggttcaatcttt

SEQ ID NO: 257215 - DNA, 402 bp, Gossypium hirsutum
tctcacttttccggttggacttgggtgggattgccaacccaatgtttagaggaaagggaccagaaatggttaaagacaattattcccctgcatttcctttgaaacatcagcagaaagatatgaggttggctcttgcccttggggatcaaaatgcagtatcaatgccagtagctgctgcagctaatgaggctttcaagaaggccagaagcatgggattgggagaccttgacttttcagctgtttacgagaccgtgaagcttcttaaacattcatcttgataccatatactacctttcatattgttaggctgatgaagccatattcagtgttggtttgaacctgaatttttatatatccattttgtagttcctactattttgaaagttgatactattatgtttt

SEQ ID NO: 257216 - DNA, 119 bp, Gossypium hirsutum
ggactgtaattgtcggggctagatactccattgagcacattaaagcaaagagggcagcagttctatttggccaaatttccaagtggagtgccattgttgttaagagttccatgctgtta

SEQ ID NO: 257217 - DNA, 126 bp, Gossypium hirsutum
ttaaaatcttattgcttgcggaaagaacaaagatacgaagtagattgagcttcagagtgatgcgcttagagaagctatttcaaccattgtagctcagtcacaggagaaacagcgcaaatttactga

SEQ ID NO: 257218 - DNA, 237 bp, Gossypium hirsutum
tttagtatcgcgagcggcgccctttttttttttttttttaaactacatcgggagagcttttgacaagcaacccatagtgtgaaacccctgaaaccatcacccctatggctgagttccttgaatctgaattcaaatcacatggatcaggcatcgaagtccggtaacaattgcgcagcaaacctttttcggctctgaacatcgatgttctgaatctcatatgcagctgaagagtggggt

SEQ ID NO: 257219 - DNA, 326 bp, Gossypium hirsutum
acgtttttctctctaggattttgattacatcttcggggaactgagcttctttcttttaattagattttcaatcctttcctttcctacaaaacgttaacaacaaacaggtttttctttgggcggtttcatgctaatttgattggcttttcttttgttcttttttacacattcaatggcacccagcagcagaagaggcaaaacatcaagaaacgcatgcaagcccagacgaagtaaatacaggaagaagctcgtaaagccgagcatcaatattcaaacgtccacatcagcaacgttggacgattcggcttccaagattgatgatggat

SEQ ID NO: 257220 - DNA, 245 bp, Gossypium hirsutum
cccctcttccgagaggaacgggagaaaagggcttggggcatattctgagaaagtttccaaaggctatgcgaaacgtaaggataggcctcaaaatctcagtttcttggatcatattaggatcttcatttcgtctccttctgattaaatcaataaacataaacagttggagaaaaattttgaatgttgtaatgcttgtaaaatttttctcgagatttcaatgagaaacgagattgaattttctcaat

SEQ ID NO: 257221 - DNA, 158 bp, Gossypium hirsutum
tcttcatccaatcactaggcacaatatcccatcacataatatgggtaaacactcataatcttatggcatgtttattatatccaattattctaattaactttaaatttagagattaatgttattaactactatattaagtaaacttaccttttgactaa

SEQ ID NO: 257222 - DNA, 375 bp, Gossypium hirsutum
cccactcttccgatggattcgccgatatatctcgtgcaggcagtacaggcgatggaatgcggcacggtgcttcggttgtcccgtgagaaggggcggcggagaccggcaactcatccttggctttaccaataccacttcaattatgtttcatgcatgttgtgtaaaaatgtaatctttttccatgtttactgtattttcttattttacacaactgatccaggaataagggtgttaactgaaaagagtttggcttggaattttattacaatgatccttcatttgtggttctttgttattatgaggtgttatttcatcaattatgtaagatatttttgtaattttaataaatttaaagcaaatatataatttgattaa

SEQ ID NO: 257223 - DNA, 238 bp, Gossypium hirsutum
gcatatctagcctgtgactggctaaaattgcatttcacaagcaactaaatatccaaaaatctaataattcaattacactagaattgcaaaaaataacaaaaattcttaacaaaattgaaacaaaatgcgaaataagttcaaccccttacaaaatgcaactcagttctggacaaaactgcagtcaacagcaattaaaagggtttatgaaggtctcaaagtaaaaatttagttacatttt

SEQ ID NO: 257224 - DNA, 500 bp, Gossypium hirsutum
gccttttgatacttctgcacactgataccctgcaggctgctctgctgcttgaactgtaatgtgacaataacagtttcagcaagagtctattttacaaaaacaacaatcatccttggaatggtgcaatgagactacctagcagtaagcatcaattttcaggtagttgacactgcccttcatttacttctaatttcagttatcataggcaattaaatgaaagtgggatcttttacatttatgtaaagcgtccatcctattcttggatttgcaatggccaataagccaaacggttttaagtagttggcacttagaacaactcatgcaacatccatgtttaagatgatagagctgtaaggtatttggcattcatatatgtttaaagtcttgcaatagggtattgtaccattggattttagatgaaagtgacgtttttgtatgatgttagtgtgaacaagtaatgtagtagagcacatgtgtgatttttctttctatactatatg

SEQ ID NO: 257225 - DNA, 412 bp, Gossypium hirsutum
aatgttttcctgttaacacaaaggttaattaccgagatggtgttattgcttcctcaaagactctaaagagaggatgctactctcaggttgaagctcatgctgctgctggacagaagcttagagcagtggagagaaatgaaagattgtatcgactggttgctgcaaatccatcggttcttgaacaggtagatgccgttgctttaccaagagatatgttgggtgaaaaatacgtacattcttctcttaatgacaaaactggcttgtctgaagtgcatggagactggagaaaaccaaatggcgctgttggatgttattttgcagaaaccaatgatgctgatagtgttacgtgctctgttggtagttgtagcgtaagtagtaacaatttctgtaggttgcctcattgcgttcccac

SEQ ID NO: 257226 - DNA, 136 bp, Gossypium hirsutum
  unsure (1)..(136): unsure at all n locations
aactactantctctggtttatttcttcaggcttgtttggtgatgtttccaagttgtttttgccattgccgctcatctaggctttgtaagatatacatatttggattaaaaaaaattagggcctgttagtttcccac

SEQ ID NO: 257227 - DNA, 475 bp, Gossypium hirsutum
ccgttctatcagccatgcaattgtaaaacttgggaggaaagaccttgatcctcaaggggaagggtcatcatctgcggatattaatgaagaaatggaagaagaggtggaggaaggcaaagtcgaggaaagtgaagatgatggaagaggaggtggggatgatgagatcgacggacatgatcaagagaaaacagaaggggaagaaagcgaggaagttgaggatttcattgatgaagaagataaagataaggaaaaccaacttgaagatttgagtttattggaagatcaatccatgagaagttgatgagcagcacacgattgaagaagatgatgagcaaagaggtgttattgagaaacttggtggcttaccatcttagctctctcactaacaccaagtgagaaactaggtgttagtaagaattgggcctttagattccttataggaactgtacaaagtgttttagcattaacccatcac

SEQ ID NO: 257228 - DNA, 325 bp, Gossypium hirsutum
cccacttgttcgaacggggttgccgggcaaaacttcaacagattgtatttaatgaagtccttgcacgataattgacgacgaatttttaattcatgggtagctgtaatattcctttttatcaatgaacaagataattacttttggtttttcattaaatcactttttttgttgtcactattgtttttggggtcatttgtttagcttttacctactaatgtaggtgttcatggtcaggcttgttttgtctgtggcccaaaaatttttgttagcgaatttaatattatcgctcgtaatggttacatttcggcctataatattacatttt

SEQ ID NO: 257229 - DNA, 223 bp, Gossypium hirsutum
gaaaccttacggctctatcctcctttaaatcgcgtgatgagagatttaggaagagatgtccagttaggaaaacttgtcctgcctactcatttagaggtcgacatgcgattcatagctcgtcagcacagatcctgacttatggggagatgatggtaaccatggccaaccattgaagacagctgcttacggacactttggaagggacgacccagacttcacctgg

SEQ ID NO: 257230 - DNA, 253 bp, Gossypium hirsutum
aatctccctttggttcctctcctagatcttgaatttgttgttattttttcctactgctacttgaagtttttgaccttctgtcctccaattattggtgcgtgatggaatattttcttggtttacctgcattgctgctagacctagaccttacaattttcatattcgtttgtgtttgtatatttttttagttataaccggttttttagggtcaaaaaaaaaaaaataaaataacctaataaaatataaatacctt

SEQ ID NO: 257231 - DNA, 441 bp, Gossypium hirsutum
caattttcgccccaactctgatggctgcggagtgagcaaaaatatggccctcaggtacttggccagcctagaggtacggaggtggccgtacggaggcatgcgtggcgtgcgaaggcatcacgcgcgtgaggagtggctcgaaggggagcctatgcgtggcaacggcggctgaagggttccagaaaccctaatgatttctggaatactttttcaaaataggctaattgggctgaatcgggttttgggttaggtgttgggccactgtaactgggccaatcagatttagtgttcggtcatgggcatttgggctagttgggtttgggtagtggatttgggctaattaggtttgggtagtgatttttgggccattaggcctgctgtaaaaaaatggactgtattattattttttggactttaatttttaatttttaattttgggtt

SEQ ID NO: 257232 - DNA, 384 bp, Gossypium hirsutum
cagggaccttaaacgggaaccttccatatgcttttcctgaatgtcaacattcttctgcgcaatatccctaaacttccaccttggtttcctttctacatgcatccaaggcccataattcttgcccttctcttccggtctatccacgaccatactgtgatttttcggtagcaattcaggcggtgctggtttctttttcgcgttcagttcagaatttctaaaggtacaactctccttcacatggccataccttccatagtggaagcaaaccatcagtaataattcgtattccactctttgtgttttgccattgattaagatttgggacaccaatggcctctctaaattaacataaacaaccatctaggcaaaacgacctattgcctt

SEQ ID NO: 257233 - DNA, 134 bp, Gossypium hirsutum
atcaaagatagcctctcctcctcatcggtgtgcttcttcttgttgggttatcaacagagatgtgcaaacagcggtagtagcaatttttgttttgatgcatgagaggtaaattgaattggtggattaatcatgat

SEQ ID NO: 257234 - DNA, 213 bp, Gossypium hirsutum
ccccgtcgccgcgggctattgaataattttagataaagaaacatatccatttatatcaacacaaatgtttgtaaaattactttaaactttctatgcacgtaattcatcaaagaaatttgatttgcaatttgtttttttttaattaaattttaatgaatcaccttcatttatggtttactttaattaagtttaggactttttccttgtataaat

SEQ ID NO: 257235 - DNA, 121 bp, Gossypium hirsutum
  unsure (1)..(121): unsure at all n locations
gaaacatanctctcgatggctttagaaaaaattctgtgcatgttatcttttcaaccagttgggaagaaggacatgcctgacctgtgacgaaggtagatatcaattttttgctaggtttggg

SEQ ID NO: 257236 - DNA, 443 bp, Gossypium hirsutum
ggagaagtgttatgaatgctgtgagttgataatggaatgggcaacaagagtagaaggcaaccaatcaaacaagcgcaggtttagttccatcccagggagcccaaatggggtaatggatgtctcgtttagttccgatagctcaaacgattcctgggctgtggcatcattcgcatcagtgtcttcatcacctgagcctatgtccaagaagaccagaactcaacaagaccagcttctggaaaggctatcccaccatgctccttcagattttctcaccattcctcactgaattccctcttttcaatttcagactacaaaaataattagtccttgtaataatattgctgttctttttccatgatgcaaagttaaattgcttaccatctctgcatcttgaatcgattggtgaggaaatctagaatcagagatggtttgcattttatccg

SEQ ID NO: 257237 - DNA, 428 bp, Gossypium hirsutum
ccaaaaaccattaaaccatcatatgtttcctctttcttttcccaacccgagatgcatccaacagtcaagcttcaatctggttctcttccctttcgcgatccaaccttcgatgcgtcgggctcaagcagtcctccaataagtgacatcaggttagctcggggttggaaatcgtcggaggcagcatcacactatcaagccaacaccttgagagtataaacaaatatggtagaattatcaagtgagtgattatcagaagctcgatttggttggaagctcatcgaagatctatcacactatccaaaaatcttttcagtagtttttgagtattttggccaaggattataatggcatgtataataggggttgcacgggtgagaacgtagactgggacagaccgtatgtccctagttcgaaggttacactagagt

SEQ ID NO: 257238 - DNA, 433 bp, Gossypium hirsutum
taattttttcattgagaaaggtcgacctgtcttgcaggggcttcacgctattgatttcttagcaaaagaggtgcttggttgggctcaagcaatgcctaaatttgcagctgaacttgtgaagtttgtgcaaactttccttgaacgaacctttgaaagatgtcgaacttcatacatggaggcagttcttgagaagcagagttatatggtcgttggaaggcatgatattgataaattgatgcgacgtgatccagctagtgcatgcttaccgaatgcacttggtcagccaaatatgggaaatattgtttctgatatggaaagtatggagattgaatcagaactaaatgaactcctcttaaatttgcgtcctattaggcaggataatctaatccgtgatgaccataaacttgttttgctggcatccctcagtgattca

SEQ ID NO: 257239 - DNA, 443 bp, Gossypium hirsutum
  unsure (1)..(443): unsure at all n locations
atttatttgaagtaattataatttgatttaattgtgggtgattttaaaacgagattggtgttccaatggatcaactatgaattcttaggattgtccgatttagaaaaacaattattaaaattttcataacanataaaaaatatcaaatttttattgattcatttgattctttctaatttagatcaactgattaaattatcttctcaaacttatatatcaatctattcccagtccacttttgcttaaaattcatttttctactactttaccaaacattaaaacttggtttaattttctcactaaattgttaatttatataaaaataattaccaaaattcagcaattaaaatatatatttatatataaaacaaattcataaaaatctaagtaaaaataattaacaaaaatttagtaattaaattcaaatactaactaacaactat

SEQ ID NO: 257240 - DNA, 392 bp, Gossypium hirsutum
  unsure (1)..(392): unsure at all n locations
ctgcatacaaaattgtgtttgtatagccagagaaccgcaaatgatccccagtgccctagatgcaatcaagctgttgaggatgtgaatcatgccttacgcttttgtgaaagacatgtgggtaactttgcaatatgtcaacccgataagcaacaaccaaatgggtttccatgagtggctttcatggatgtttgaaaactactctgtctaaatgaacagaaattgcaattacattgtgggctatctggtatgcccagaacaagttagtgcatgaggatacaaagcagggggtgggngagtnaggtagtcttcatccgtggctattgcgcagagctcgctattttggctactagtgctcttcgatcgattccatccactattgttcactggtccct

SEQ ID NO: 257241 - DNA, 432 bp, Gossypium hirsutum
ggaagtgtttgatacaatcgtgatcgatctggaccctatgaccgtcgtggaactggaggtcctcgttctggttaagatgactgcttgtgctgatgaacttaactgagtcggccaacgatttgcctgtagggaaaagacatggatgaaagcttaagtgagtcaatgaaagcaaggaaaaagtacagagatgtggcagatgctgctcaagaggctttcgtatcagcagcttatgcagcagcagcagcacgagcagctgtggagctctcaagaattgaaccccaagactttgattctccaaataatgccatggcccgaagcgaagacctggagctgaacgaaatagaagagactagacaaagtttatgcagagaaaggacagtttctagatcaagttcagattcggatgcagacctttcaggtgaggaaagtgat

SEQ ID NO: 257242 - DNA, 438 bp, Gossypium hirsutum
ccgacattgttactgatgagatcgagtgccagcacttgcttcgtctcgaagatgggtccgtggtcacgagagggaggacccagtggaggccaaagaatgccaaaatttctgggaatgtggggcaaaatccagctgatactgcctagaaatccaagtgttcttccgagttatatatgtttctatattttttcatgtatgtatttatcaatgtagtatatatgtatgtagcttcactgtatctctcttattttattctttctttatctctctcaaccttttattcattgaatcaagaaaactgtccaaggaaattaggagcagaccatgccagagaagcatatgtagttattctttattgttttattatgtagttatcatgtgatgtgcattttaattttttttattagattgccattttttttaaagttaataacagaa

SEQ ID NO: 257243 - DNA, 359 bp, Gossypium hirsutum
gtcatattgagaatccagatcctgagttgattccggtggcgcgatccatccagcaaacggttacaattaaagggaatataaagaatccagatcctaagtttatcactatagaatgatgatcagggatgagaccctaaaatctaatcgaagtagctgttaggaatagataggaagtttttcagcttttaatttaagaacatcagaaatcaacctctgctacatgaaaattgaattaaatatgaaatgaaaatcgattgcagagattttagataaacatctaatctaatctaatctaatgattgtagcttaagacttggattgaatattccaggtttcaattaataaataatcccagcact

SEQ ID NO: 257244 - DNA, 218 bp, Gossypium hirsutum
gatttattgtggaggttttcatttcttgtgtactttttgtgtagaggcgataacaatttttgatatagtaattagtttttagttctaaacttcaattttgtattctaatacatgatttaggtttagggtttaggaatactagaaaattttaaagtgtgctggattggattgttgttaaattttaattttttttattgaaaactagtgatttttattag

SEQ ID NO: 257245 - DNA, 265 bp, Gossypium hirsutum
agaattcgtcaagatttaaaattataaaagagtgacttatataagaaagattccaatgaaggaaagaattaagatcattctaccaccaatttgacattagaaataaaccttcttattcaaaaaacatgttgccctgtaaaaccaaataataggagaaagaatatttcagaatattataaaaagctcaagcatagaaaatatagaaaaaaaaaaaaaaaaaaaaataaaaaaaaaaaaaaaaaaaaaaaaagaaaaaaaataaaaa

SEQ ID NO: 257246 - DNA, 362 bp, Gossypium hirsutum
aacatttctcttacaacagccccatcaatcccaactgaaccaaggaatgaagcagctgctgctaccccacctccatccccacctaaaccctctcctgagaagccttctccatttaaaagctctgcctttgggcagtcatccaagttagctgccttggaggcttctggatctagcaactatgttctagtaccttctcccgttgttggtatattccaaagaggtagaacaatcaagggaaaaaggcaacctcctatctgtaaggagggtgatttgatcaaagaaggacaagtgataggattcttgaatcaatttggttttgaactacctgttaagtctgatatagctggaacagtcttaaagat

SEQ ID NO: 257247 - DNA, 483 bp, Gossypium hirsutum
cccacgctttcggaaaacataggataacatgtatgcataaaagacgacaatggatgaatgaagataatatatcttacttaatcaactaacaaaacaattaaatatgattaatctaaaaatatgacctaattttcaagcatgtacggagaataattaatacaacaatacaaaacaatgaataaataatatgcaacgacaatgtatggcaccatacaaatcaatcaacaaaacatgtataaaacaaaatggaatttagaagtcaatgtggtataagacattttccaaaataatgatgaattaatgaacgcataatatatataagttgacaaatttacataaaaactggggatatagaattattgaaatagatattatagaataaaagtttgaatcaaattatatgcaaaatattttaaacacaagttcattcaaaaattgacaatgtacatgatagcttaaataatatataagatatgaaagaat

SEQ ID NO: 257248 - DNA, 333 bp, Gossypium hirsutum
  unsure (1)..(333): unsure at all n locations
gatgatgatatggaggtggatgggtgcctgttgttgctgttaanattggacttaggtttattcttaaatacctcggagttctatggttatttgcccagttacccgcgcttttgaaagaaatcctgggatcgatcttgaaggacaatgagggtgcacttttgaacttggaccaagaacagcctgccttgcgtttctttgtgggaggctatgtgtttgccgtaagtgtccacagagttcaacttcttcttcaggttcttagtgtgaagcgcttccatcatcagcagcagcaacaacagcaacaaaacaatgctaattctcaagaggaattaactc

SEQ ID NO: 257249 - DNA, 422 bp, Gossypium hirsutum
ccttcaatttctaggaaacaagacaggatctcatcaaagtgcctcgaataagcacgcaagttcttcggtactgacgaggatcttcttctgatatccgttgatgagagccgtaaacagaactatcccataatatgatttttgatacgagtagcacctgatattcttcattgagctgctctcatcattttctgcactgcacatatttttcaagttcgtgtatagtaagctttcggaacgagtattttatgtcaatgaagaatgattcagttttaatccacaaatcaggtacatttgtaaaataagttggttcattttgtatatgagctgtatattataatgtatttgttgtatatttctttgtccatgttggcaacttgtttgtaaactcaaatctatataataaatttcttcctttttaaaaa

SEQ ID NO: 257250 - DNA, 435 bp, Gossypium hirsutum
cacagaaaacagcttggtcaacggaaaatgacttacaggtcaatggaaaataagcatttttccttataaaatgacttacccttttcaaaagcgtcagtcattttccggtaaagaactctcaatagataattttattttttatataaaaattaacttaaatcaagtttaatattattatattgataataaattttatttttatttttaaaaatatttaaaattattaaaatattaatataaaatattatattttttaatattattaaacatacgtatttaattatttatatttagtcatataataaattattaatataattaacataatttggtggttttaataaattatttaatatttaaattttattttaatagtaaaatttaaaaaatattattcacatattattgaaaatatcaatattaatatttaatact

SEQ ID NO: 257251 - DNA, 421 bp, Gossypium hirsutum
cccacgttttcgcccacgcgtccggcgaagcggccaagtaataagatgaaagggacattggggaagcactttcaagttcagttccaccaccaccaatcatcttccgccacctcatcctccatcttcacccggaaccttctagatttcggatctcaggatgacccttccacttccgttcccgacctcgacgccgccgatgacaaagatttcattctcagtcaagacttcttctgcactcctgattatatcacccctgataatcagaacctcatgaacggctttgattgcaacaaggaaaatattccttgccctaagtcgccggagaagccgaatactctcaaaagcaagagacctcgacaagatggtatcctggtaaatcccctcagccctacattatctggctctcaacagatagtggaac

SEQ ID NO: 257252 - DNA, 282 bp, Gossypium hirsutum
  unsure (1)..(282): unsure at all n locations
attattctgatttgtggatggatataatgtaagctggtctgcagcgcatcaaaatgactgaacctactttgtcgccatagttgcatttgcttcaaaggattaggttctgtaagtttgtgctttgattgcatttagatcaatgtttacaataagaggggtnaaaaaaaaaaaaaaaaaaaaaaaaaaaaaaaaaaaaaaaaaaaaaaaaaaaaaaaaaaaaaaagaaaaagaaaaaaaaaaaaaaaaaagaaaaaaaaaacaaaaaatggggggggccgtttt

SEQ ID NO: 257253 - DNA, 178 bp, Gossypium hirsutum
gcgctttatatctaggattagaggaccatcgggctatgggggacgatcatcttattatgggcattctcggtctcgttcaccatcccctatgcgttctcctcaccatccttcgagttctagaggccgctaccgctcaaggtcatactcacctgctccaagacgacgaggaaactattct

SEQ ID NO: 257254 - DNA, 286 bp, Gossypium hirsutum
gctattttttatcttcaatttccttagaccataaacaggcgtttggaataataacattggtcttctttttgtattatgatgcaagttaaattgcttaccatctctgcattttcctattccaattgagtctcatcttcagattctgatgcttaaaaccatctgcttagtctgaatggttttgaaatttgcaagcagagatggtttgcattttatccggaagaaatttcttttgttttttttcttttagaaaaaaaaaatgaacatagcaatgcagagtccttagcat

SEQ ID NO: 257255 - DNA, 118 bp, Gossypium hirsutum
  unsure (1)..(118): unsure at all n locations
cttcttatacccagaaatgaaggcttctcagngctttggagtgtctctataacttcttatgggtgcttaacacatgcccttggctgatttcagcaaatccccatctcaataattttct

SEQ ID NO: 257256 - DNA, 375 bp, Gossypium hirsutum
  unsure (1)..(375): unsure at all n locations
gctgtccctanccgttatcagatagcaggaaactttggtggagtatctgatgtgactgtgcgctgtcggatatgacaaagcaggtttgccgattggccttcaatttatggggaaaccttggtcggagcctacattaatgcatgtagcatatgcaatgcaggccttgtgcatctcggagtatagaaagccgaaggttttctatgatctacttcataagaactgagcagcgcagggtgggaacctccaggaaccgtgggaaggtaacctgacatcggaactatttggtagtttcttctcaatgatgaaatgaccggcaactgacttcccctggtatatgttagcaataaacgaagtattgctgaattatgtggatta

SEQ ID NO: 257257 - DNA, 119 bp, Gossypium hirsutum
gaattaaaacatgggcagaagctgtatggagtagccgtcttatagacactcactgatgtattggacatctcagagccttcaagtaaggtgccagttatagatgcacgaatcagccgagt

SEQ ID NO: 257258 - DNA, 137 bp, Gossypium hirsutum
cttttatttgcctctttggatgagatcaagtcatcgttgttaacttattaagcgatttgttctaataaagagagagtacaagtgatgcccgtaatagccagtgatcgtgaatcactaattgttcttggacttggagg

SEQ ID NO: 257259 - DNA, 211 bp, Gossypium hirsutum
  unsure (1)..(211): unsure at all n locations
cccacgctgccgcccacgcgtccgcccacgcgtccnggggctaattgatcgaaggtttgctcagaatccacagatagtggagaccttaagagaaaacaatctgaaatggattctgaaccacataaatcacgaaaaagagatcatggagaccaatcgtcaccaagcactagtaaagcctccaagaagcactcaaagcgtgagaagctggatt

SEQ ID NO: 257260 - DNA, 165 bp, Gossypium hirsutum
ccctgcttccgcccacgcgtccggggaatatgaagggaaattgttatggaacttgttctgattaccctgacgatcctcttacatacttcaagtctgccttaaaactcaggcttggcataaaaacaattgtgagatttggacgtcagacaagttggacggtgaagc

SEQ ID NO: 257261 - DNA, 104 bp, Gossypium hirsutum
gattacttcaactatatgatgtggaactgttgtagtgagagcactataacagtgtattagcatgaacagataaaggggaactctcttggcagtgtctaacacca

SEQ ID NO: 257262 - DNA, 302 bp, Gossypium hirsutum
gcgtgggccgccctttttttttttttttttttgtggggtttttttataattttttgtggtttttccccctttttttttcaccaaaatcgagttgctggagggatggcaaataaaaaggaaaagggggggggagaggaagggaaggattcccgggaaagacccaaaccagtgtaagacaaagtccccccaattgaaccccaatgcggggaattaaagagagaaacctcattccttgttcagcaaaccgccaaaacccaaatcaaactggggcttatgttccccatattgaaagcaagggaaac

SEQ ID NO: 257263 - DNA, 451 bp, Gossypium hirsutum
tctattgcctccgagccatagaagttacggtgaaaggagtggtttggagacagatgggagacaattttcagatttttataggaactcaagtgaggagctttttataaagtcgttgatggagagtccaatggggatgccagttccaaatatggagatgttggggtttaagaatctctcccagaattttcgtgctgatagtgaggagcttttcagaagctggctcaccaatggagagaaccagggtcacaattcttctaatatagcacatcgtactcggcaagcgtcgcgaagattatcaacagagatggccagtttgtcgagtcaacagcctaccactttgcttcaaaagaaaaagagcagtgatgtattacatctgcaaaacaattccgttgggggagaaacatcaggggatttgaatcaaaattcagccagaactgctggtgacagggga

SEQ ID NO: 257264 - DNA, 332 bp, Gossypium hirsutum
atgaattgtagttcactgaagctgaaagcaacatgaaggaggcggtttagagtatcaacaataccaggatgctactgctgaagacgaagagtatgaagaatacgaggagtacgaggaagaagcttaaagcttgttccttgttcttttctttttatttataatggtaggatatatttggttggttttgttatgcttttgtgcatgtgaagcctgttggtgcaatgtcggcattgccgggtgcttcgatgaggatcactttagtgttaattttctgttgttctaccagactacttgtatcgctgcattgttttttatgaataatcttagcagcc

SEQ ID NO: 257265 - DNA, 294 bp, Gossypium hirsutum
ccctgcgtccgtttttttattaggatgtcttatattggtgattaatgcagtgacttaggttatttttccggaagaacctaccttgcaggccctaaatattgacaataaccgaatttaagggcttcatgataaaccttacaaagttaaatcagagccctttcgagttggaaaaaaaaaaaaaaaaaacaaaaaaaaaataaaagaaaaaaaaagggtaaaaaaaaaaaaaaaaaaaaaaaaaaaaaaaaaaaaaaaaaaaaaaaggggggggccgttttaggggacccaagttta

SEQ ID NO: 257266 - DNA, 417 bp, Gossypium hirsutum
gcggccaatttttctatgtgtaggaaatgtgggaagccatttggggtcaaaggggattggagaacccgcgagaagaactgtggcaagctatggtattgcacttgtggctctgattttaaacacaaaagatccttgaaagatcacattaggtccttcggcaacggccattctcctcatccttctcttgaaggatttgaagaccttgacaaggattgcattactggctccgaagatgaactcactcactagcatgttcaattcccaactaccctttcttcaacctttaaaccttatataatttccggtctgttgaatcactggtagagtatcaaaggacttgcatttaagtcttcaattaacaccaacaccagatcactagttaaacctaaagccgatgtcaaccgaagacttaaacac

SEQ ID NO: 257267 - DNA, 345 bp, Gossypium hirsutum
gaggaatgcacttaaaagagctccccttttaatccccatttttagtcactgctatattccatgtaacccgtctttagccggtaacccgattttcttcatcgacgaaacccggattttctgttgcggatttgatatatccagctttttcgacagggaatcctttttccggacctccgaatccgacccggaatcgttgaagaaacagagatcggttagcgaaaaattagccgggtcgtccaccgacgtatccaggcgtagtatggatgccggtttccttaccggcactcgaacccctagatgggtagagttctggagcgacgcggcggttgatcggcgccggagaaa

SEQ ID NO: 257268 - DNA, 310 bp, Gossypium hirsutum
cgtttctcataatcaaagctttacaggtgtctatgtcaggcgccttaagtaaggccacaatgtgagaaacgaagagaaggtgatgcatgcggtgttggctgggtgcttgagtttgagtctgcttcttccttcttctatgtttcttcttttcggctatattgattaaaattttgttttaagctttgcttgtttgagttcttttcgctatcaaggcctatcaaagccaacaaagaagaaaaaaactgaggaaagtggtcttttttagatctgggtttctcaactttaagggaagagtgatgatgagattaaa

SEQ ID NO: 257269 - DNA, 111 bp, Gossypium hirsutum
gcgctcttacttacgctcggtcacctcgaagaaagatggggttccattcatacaattcccaggagtgcgttggatgacaacaagaccggaacccatttactacagtggcct

SEQ ID NO: 257270 - DNA, 216 bp, Gossypium hirsutum
attgaaacccctcctatggtgattgttggggttgctttctcctacacagagccaaccaccgaatgccactcctccttcttcttctagcccatcgattactcccgcaaatgctttttctccagcttccactccttcaagctctccgccttcattgactccaactagttcgcctccttcaatgactccgaccggggctccacctgtttcggctgatat

SEQ ID NO: 257271 - DNA, 288 bp, Gossypium hirsutum
ccctctcgtccgcccacgcgtccgcccacgcgtccggtcaaccataagtaagttgctgcgtgagcagtgatacattatcagaggcaaagaagaaaggtcaaaaatgggtcttcttacaaatagagttgagaggaatgagatcaaaccaggagatcatatttacacttacagagctgttttcgcttactctcatcatgatccgacattccctcaatcaacttgtccaactttccctgattgcggcttccggcagccaaacagtggggtagtactttcatgcctggattg

SEQ ID NO: 257272 - DNA, 143 bp, Gossypium hirsutum
cggtcgcgtgggaaaaattttgaaagaagggtttggtttatatctttatattctgttttaaagtcttgcgtttttcattggtattggcttgcgatatgtatttgtgaaaggtaataaggaactcaatggtcttttactatctt

SEQ ID NO: 257273 - DNA, 172 bp, Gossypium hirsutum
cttattctttctttttctgtaagaatattttagggttccctcaaccctttgagcaccggccccccctttgcgccaaggctctgattgcgacggagatggccacgactcggcgggttcggcgtatggtccgtttttgcaggtgttcataaagagtacggcgcgcgtggagagg

SEQ ID NO: 257274 - DNA, 396 bp, Gossypium hirsutum
gtccgagagaaataagagaaagctaagatctttgataactatagtgaatcggttttctcaccggagataatcgccggagcttctttccggtgaattatggtatattgtgccgcctgactgacgagtgtcatgcaaccagactggtttctttaataattagtggtttatttaaattattatcagcaagacgagctaattttacagagatggatagaaccagagaagcgaggagagtcagtatggcgaccgccgccgcgaccaatggcctttcacggcggcgacataggactagctctctcagagactctccagaggaagacggaccggtggagacgcatgaaacggcgcgtttaagggatcgaaagaaggatgggataggcagcgatgtgaagaaga

SEQ ID NO: 257275 - DNA, 300 bp, Gossypium hirsutum
gaaggattatggctacactgtgtgcgttacactggaccggaatgggtttacgaatgcccatatcctgactgggcatcactcacttaatttcactcttctttatatatttccgagaaaatgcggtgccgtgccaaccattcttggaattttctgaaagacaattcattttgaaaatttgttgtagtaattgaagatgattcagtttctaactgcgaatgtacaacctatttgttatcattcaaatgctgatatgtatttcataaaattacatgccgagttgaagcttctttcacttatatc

SEQ ID NO: 257276 - DNA, 296 bp, Gossypium hirsutum
tattcttacaaaacaataatctgactgggcgaataccggatagtcttgtaggaaaacctggactggacttgaggacttctggaaatcagtttttatccccgtcaccttcttaagtagattgtacatgcgttcagaggtaacatcacacgattgcaatgatcaaaatactcgatttcactgaattctgtatcaaaaaggcatcatcttggtctgaaattttggcggaagctccaccattgctgtctgtttgattgcaaagttgtctcctattctgcatgttggagcatcctcagttt

SEQ ID NO: 257277 - DNA, 228 bp, Gossypium hirsutum
aataataaaagctcaagttcaagttatcagggagaaagcagaccggccttttcgttgccttgattgtcagtatagaagagaacttgttagggtatatttggcaaatgtagagcaaatttgtcgtcgttttttggatgatagacgaagcaatctagggaagttcatagaagacaaagctaagtggtcaagtttttggactttctggtcggggattgaccaaaattccag

SEQ ID NO: 257278 - DNA, 179 bp, Gossypium hirsutum
cccactcgttcgtgacgttctgagcttaacatgttctcatgagattttcgccgctgctggtagtaccataggttgtagacacagttttgtaagttagagggacataaccaaagatggactttgttttatcgtttaaaaagtcttttagggtgattctaatcaaacagttataaatcctt

SEQ ID NO: 257279 - DNA, 217 bp, Gossypium hirsutum
cccactcgtttgatttgaggtttaattgaagttgggcagagggcagagcaagcaacctccgacaccgatcgagggtgagaacgagaggtaagaagatgggatggggaagcaaagcgggggattgggcgttcaaagggctcacagctggtctggggttggccaccatttacctaactgccactttctctgttaatgtttaccgaggcctcgcctggca

SEQ ID NO: 257280 - DNA, 471 bp, Gossypium hirsutum
gctttggaactctaccagcgaaactgtaaccctgagtggcaagaaagtttggcaaggctctcatgacgcggatttcccggaaaccattgaagatggagatgtgggtgagtttacgcatgatgcagtgactgagcagaatgatgttccaggttccatggttggtcttgtgtacaagctacatgatggaactaggtggattgttgcttggagcaaccctcaaggtgaagacagcaaggtctatactaatatccacaaagaacctattcgttgggagcaaatcaaaaccgatcttgacacaagaggaagctcaaaatctaaagttagaaagtttgggtacgttgcatcaatggaaattgatcccaagaaacgttcgccgacactgaaggcatcatttgagtcagaggcataactgtgttttgcatgctgatcaaattggtgtggtaatgaaggctatctaaaataaataataat

SEQ ID NO: 257281 - DNA, 472 bp, Gossypium hirsutum
cttgagtattgctttcttctccaattctcaacctcgaacttatctacgacttcaaagctttggtctctctatatataaacattcactttcttccacgatcaaaatatcagtcacaccaaaccaaagagggggatcgaaatggggtggaaaggaattctgggttttgattatggaatagttttagcacctatgggccatgatattgctggacctgagctcgtagctgctgttgcaaacgctggtggccttgcccttcttcatgctcctgattgggattcaccagagcagctaaaggagctgataaggaagacacgagagctaactgataaaccctttggggttggtgttcttttgccattccctcacaaggagaacataaaggctatattggaagaaaaggtggctgctctgcaagtagcgtggggtgaatgctcaaaggaccttgctttagaagctcataatgcaggggtca

SEQ ID NO: 257282 - DNA, 365 bp, Gossypium hirsutum
ccctcgcgttcgcccacgcgtccgactttggggagtctttgtggtcccaggtattgcaagttcaagaaaatctgggttttaacactctttatgatggttctgatagtctgaatatgcattggtctgaaataaggcgttgcattcctggttctattggttctgatttttctgcaataggaaatattggtagaggctcactggtgagtcctgatatttcccgtaataatgtaggctttggggaatctttccgattccgtaaggtcttgcaaggtcaagaaatttttgtgtcccctccatatagaaacggttcaactgcagatgaaaatgaagaaaatgacgcttttggtctccctgatgttggtcag

SEQ ID NO: 257283 - DNA, 425 bp, Gossypium hirsutum
ggcactttcctcatttggctgatctggttactagaattaattacaacaatttctacatgtctgatggtggaaatttgatgactgcccctagctctgaaactgccgctgcaagacctgggaaggcctttgcaagttgaacaaaatacagttgattctgttacttacggtggtgcctgatctccaaaccaggtacgatcaaggcaatttgaatgataagtctctaaagctgctcatacatatgatctttgagtttgttatatacaaggtgagtttaaagaaatcaattagttcggcggtgggggctaaagtctttgcatctaaatttggagttgatcaaccgtctgcctttgcagtctgattgttcagtttgtaattgaaatcctggtataaaaagtaccatgtttccgttatatttcaggttgatg

SEQ ID NO: 257284 - DNA, 413 bp, Gossypium hirsutum
cgcagtaacccattggcctggtgttggatatatctgaaaagcatttgacaactttaagaaattagatgcagaaaaagagcatgtgttcaatggaagagccaaaaaacaggacatgcgttcttcatcagctgacctgtccatgattttggctctctttttcggcagagcacagcatatattacaagaagcagaggccatactttcaactacgattttttcatctgccaaaaatattccaactcaagaaaaatggtaatatatggttcccatgccattgacagattttcttggagtcgtgttggagagagcttactgctgcataaaacctgaaacatacatgaaatgtcagatatccaagtgatttaaacatgattcagtcatattcacttgtaaaatactaggattcggtcata

SEQ ID NO: 257285 - DNA, 181 bp, Gossypium hirsutum
tgttggtctgctgcccttgtggcttaatctgctcgtccagcctccccgtgccgtcctaccatgcccgtctctgacaagaagcgtgagtacgccttgaagctgcgcgccctgctgcaggagaaccgcagcgtgatgatcgtggagtgcgacaacgtgggctccaagcagatgcagagcatcc

SEQ ID NO: 257286 - DNA, 122 bp, Gossypium hirsutum
gaagattgttcaatggaattcatttgattggttggatatgattgtgagtgtaaatagtgacttataatgttgctttttggatgataattagcttagttaaaataaagttggctgtgaatgat

SEQ ID NO: 257287 - DNA, 255 bp, Gossypium hirsutum
gaaattcggtgagttaacaatggaaaccaattgtctttcgaagctaaatcggaaacctctgcttcaacatcaatcccacatgcagtagctgaaacagcttcctcttctactgttccactgtgagattcttttggcttatgaaacagggagaagggaaaaggggttttgattatttaagttactgaattagtttagctagcctctgatatagctatgatcaaaggccaaaactttggctactgtatcatttaaaca

SEQ ID NO: 257288 - DNA, 459 bp, Gossypium hirsutum
ccctaaccctttcattaccactgccgaactctcccgccttatgcaatggaagctcactcgcggcaaatggaggcctcgtttgttagacttcgtttcctctttggacgactcttccgtccaatccgtttctcaaaaggctttcctctcccttcccgacatctccaaagccatctccgagcttacggttttgaaaggagtcggcgccgctactgcctccgctgttctcgccgcctacgctcctgaaacggcgccgtttatgtccgacgaggctatgttggctgcgcttggaagctccaaagattattcgttaaaacaatacttgttatttgtggaaaaactaaaaagcaaatctaaggaactaagttcaatgggtgactccttcagaccttcagatgtagaaagggctttgtggagttcagctgtaggcgtaaagttgcagtcttcacagacagctccgga

SEQ ID NO: 257289 - DNA, 344 bp, Gossypium hirsutum
ttccactcgtccgcccacgcgtccgcccacgcgtgcgaatgccgcaagagatgtggcagcaccatccattgaagaccctgggcacttcccaactcttgggggcaagtgaagaagtgagattccattagaaccccacatatgatatccatgggttttattggaattttaggtaccttttaatttcgggctgggaataagataaaataatctggtttcctgtcgccaaagtatctctgaattttatgttgtaaaatgtatgtttcagggtttttctttctctttttgtttttttggggttattgcccccactattgttatgctgtgatcttactgttattgctcac

SEQ ID NO: 257290 - DNA, 431 bp, Gossypium hirsutum
gaaaaagatggaagagatcaggtatggggccattgagaggttagcaacccagaattcattaggagatctatttatgagtgtcgtgaggaggagtgccgaagctgcagagccactgcatttacttccttcagcatatttgacagtgaatcttactccatccgaagatttcaagcaagcccatgggatacaacaatggtggagacctgatctgcacttgaagtgcaatctttacaagtataaatagtttgtccctgtctagcttttgcttgtatatgtaattatgtaccactagtcaatccttgtagtggctcatgttgctgtgggttagggaaaacagagatatatgtattgttttccatgtgagactctcaaactgatagattccagtccattttcttgtcaataagtatagaatatggttcctttttgga

SEQ ID NO: 257291 - DNA, 269 bp, Gossypium hirsutum
aggtcctactctccaaggaagaaattgataagatggctcaagatcgccaaaaagctaaaagattaatgttattcttgcagtactcttcagaacttccaataagtgtaataaaatctgctctggactctatgctacacagagctacaaccatgattatctttttgaaaatttatctcaacttcatttctcaaattgagctgcgaatttacaccctgttctaggattaacgtgcgtttatgttgtttccggatttgagcattcacccaatg

SEQ ID NO: 257292 - DNA, 433 bp, Gossypium hirsutum
ttgtttccctttagaactagcaatattagagatgaaatgatacataatattcatacacagataaataacttaaacatgacaagaagatgtgttattcaaaatctgtaaattatgaattattatacgatgatgacatgactattagcagaacatggcatagatacacaaattactaggtaacattttttcttttctaggaaattgactcattatttgcatgatttggccatttgaacgagatgaaatatttgttctagtgttgcccatttcatatgttttgccaagatcaattgcttgacatagaatagttaagaaagcgataagatatatgctttaaggatcttttagtcttgtgtttctatgttatatttgctacattaattgcttgtgtgatgctttctccatttttgcacgagctggtggaaattgttat

SEQ ID NO: 257293 - DNA, 360 bp, Gossypium hirsutum
aaaatagatagagagagaaagagagagacaaggaagctttactgtgtttggacaactgtgtcaactcggacgattccttgcctccttttacactccccccccactccctgattcgttctctttattgaactcgtccacttgagattttatttctgtctttttttcttcgaaattaaagttcaatcggcatttctttgttacttttccttcagatctcggattttggttttctgggcttcctttctgtttatgggtgctaaagatggctcatttaatgcagtgtagggatagatcttcattttcttctgcgatctgttgtctgggattttttttctttgctcttttctcttttctctttag

SEQ ID NO: 257294 - DNA, 142 bp, Gossypium hirsutum
ccctcgcgtccgaagaattgctacttatgaaagagatggaaagctaaagagtctgctaaagaaaacatatttgagacgttgggttggtgcactagatactggaggaaatgaagctgaagctttgccaaatagcatggatttc

SEQ ID NO: 257295 - DNA, 182 bp, Gossypium hirsutum
ttcctcgcgtccgggccaatcaaggccttattcaaccataggtctgcgagtttcgctcaccaaccttaaaatcgtcacctagcttcgattgcaacgaatcaagtgaggattcgaaagagccaactctctgttatttgtgtgctggcaatctgttttgcaagtatgcacggcatagagaaacc

SEQ ID NO: 257296 - DNA, 215 bp, Gossypium hirsutum
tattagttacgtcgggaattatttttggacccattatttcttcacggttttaggagcttcttataccttcccatcttggaaaatgaacgatgtaccacacacgactttccttctcactcatgttgtcttcctgttttaccatgttacatcaaacatgacacttcgcagattaaggcactctattgctagcttgcccgagaatattcagttggcta

SEQ ID NO: 257297 - DNA, 151 bp, Gossypium hirsutum
cttgggtatccattttggcttcttgcagagcctccattgacgagcagctaaatcaacaatgggtcactctaacggatggaactctcacccgaaaacctacggccctggatctcgctcctgccgtgtgtgcggcaacccccatgccattatt

SEQ ID NO: 257298 - DNA, 107 bp, Gossypium hirsutum
tgctcctgctcacaaagtgatttttcagattgaagccatggctgaagatgtgcaacctttgttatctgaacttcgtgatagtggtctgctttaggaggttgagaatt

SEQ ID NO: 257299 - DNA, 106 bp, Gossypium hirsutum
cctcgtgtccgccggaatccctctattcctctcttcgaaggttgccattttgtagcattgagcaaaatgaatctcaacaacctcaaagttcctaagatgcctggag

SEQ ID NO: 257300 - DNA, 134 bp, Gossypium hirsutum
atgctcaatgtccctcatgctcttagttgttctgtcctttattttgcacccggcatggatcttttaaacctagaggcatgacccaatgacggggaagaggcgtttttgttagaagtcagagcctttcttttagc

SEQ ID NO: 257301 - DNA, 293 bp, Gossypium hirsutum
tcattattcaatcagatcacgacaatgggtattcacttgaacacaatcccgcaatccacaatcacaaaatcccattaccacacccacaaaatcttcctcttttgcaattatatcctcctttccgccgcttccagctgcatcttcctaaccctcgccctccgcctctgtccttccctctccggcttcttcttaatcctcctccacatcataaccatcgccggagcaatctcgggttgcgcagctgcttcttcgggtacaaacggatggtacgccacacacatggtggcaacggt

SEQ ID NO: 257302 - DNA, 286 bp, Gossypium hirsutum
gtgtaacgtcatgaagaggagcggcggaggaactgtaaggatgacagttaccttgtccctttaagttcatggaatagggaattttctgaagctcgtgagaatgttgtagaaggcagtgttagcgacagcggtttggcagccaccgggaagagaaataataatatccaagctcggaacagaagtgctagatagtatgtgcaagtagctgttcattgcaattggagttaacaaaaaagtatttgaacatggtaattttagtggacaatatcaaagatgctttggaaat

SEQ ID NO: 257303 - DNA, 175 bp, Gossypium hirsutum
ccctcgctttcgcccacgcgtccgcccacgcgtacgaccgcgcttccgggatttccgcatgatgtttcggcgaatatggggtccacgtcgctgattcatcatcatctaacactggttaaaatggacaaaccatcggcacttgtgcctatcaatgccaaatcttaggcagatcttg

SEQ ID NO: 257304 - DNA, 233 bp, Gossypium hirsutum
tttgtttctcccgacaatgtgttagtagctgaattaaaagccaaaccattattgattcaccaaattcgtgaagctcagaaagtcgatgatgaattggttgcaaaacgggctgagtgtgttccgaacaaggaatcagagtttcaaattgatgatgatgattgtttgaggactcgtgagcatgcgaaagctcataggttagctagatacgctaagtttgatgattgggatcattg

SEQ ID NO: 257305 - DNA, 281 bp, Gossypium hirsutum
ctttatttcccagctatataacacttggttttttgtccctacttggatcacacaaataatcttctcccaactctctaaacgaaacccttcccttgagtttttttttttccattctcaatattaaacatgttggttaactcttcttcatgctgccgaaaacgtcagtccaagctaagacataacgttcgtgttccaaggctcaacaggttgagaagattaaggacaaagaagatgggggccgtcgggattaaaacagatatggaaataaaaaacttgaaact

SEQ ID NO: 257306 - DNA, 303 bp, Gossypium hirsutum
tcggttctcaagaatggaggatcagagaaaaatgtaacggcatttgggcttttaatgtaaaatttgtatgattttgtgaacaaactcgaaaaaaaaaaaccagtgttgtacaacatgtgtttcattgtttgacaaagttgaaactcaaacatttgttttgctttatatatttgttttctatagtttaaaaaaaaaaaaaaaaaaaaaaaaaaaaaaaaaaaataaaaaaaaaaaaaaaaaaaaaaaataaaaaaaaaaaaaaattaaaataaatagggggggccgttttagaggacccaagtt

SEQ ID NO: 257307 - DNA, 212 bp, Gossypium hirsutum
aatatacttaaaatagatagcaatataaagtatcaaatatggggggaaagtgaagatgtagccatttgtaattgtaattgtaatgcaatataatgcattgaaagaataatagggtcttagattagaatatcatagggtaggaaagctttgtgacttgtgattttgagtgcaagagatatgctattgctaaagccctttttgtttgtatgtat

SEQ ID NO: 257308 - DNA, 117 bp, Gossypium hirsutum
ttctacgccaggggttactcggggtattggttcgaatgatggtgctggtcttggggcatctttattccctggacttaatccacttggtggtggtggcggcagcggtggttttggttt

SEQ ID NO: 257309 - DNA, 266 bp, Gossypium hirsutum
ggataacgaaggagacagtatgcttgttggggatgtcccatggcacatgtttgtgtcgactgtgaagaggctgcgtgcgttgaagagctccgagttatctgcccttagccttggaagcaataagcaaggaaagctacaggcttgaagctctctaaagatcctgatcacatttcaaagaaagagactttgaattatgtttcgcgttttcacaattttctcccctattttggaatgcaacttattgcactcaacagtataaatatata

SEQ ID NO: 257310 - DNA, 257 bp, Gossypium hirsutum
ccctcgcgtccgcccacgcgtccgcccacgcgtccggcctcgaatgaaggatcaaaagccgaaaagaatgaatggaaattactcagaagaaactccaatccctctcaggcagaggttttcaaagccttcgtcactcccaaacaacaagagaacactttcggtgaggagtggtcaatccagtccaattgcaaagaagaaacttgcttcagggataatccatggcgttatgcaagccatgccacagataaccattcctc

SEQ ID NO: 257311 - DNA, 239 bp, Gossypium hirsutum
tgtacccaaccctacatgagaagatgatgagggaggcgaaagtgctagggcgtttgcaagggtccatgtggctggaacaacagcaattggtgagctagcactttagagccatcgacttctaactgtattgtccttgaagtgggaacaacataaaagcaggatgaggtgtctatgtatgggactaatggaaatgtttgcgtactgtttgtttttctctgttaaaaccctgcatcaatgtg

SEQ ID NO: 257312 - DNA, 281 bp, Gossypium hirsutum
ccctcgctgtttgctcctaaaccttaacatcttcattccccttgctcttcaagctttaataacttgtgggaaaaaccctccacctggtttcatttgtcctcctctttaagcgccacattcattacttattaggctatccgtcacactttctctcccgacgcacaagtaaaaagacagtcagatagtcagttcagcttttaggcagggttgccaacttggtcacctattcttaactgttccattaactaccaaaaaacccgttgaaattgtgaaaagaaaat

SEQ ID NO: 257313 - DNA, 252 bp, Gossypium hirsutum
gttgactttatttttcatcattttttcgtacaaagaaacaattagtctttggttcgcaatggccaactccattttgataacagattatcaaagaaaagcttttaatgtagtggggttggggctttctctcatgctgctaatgatctcagaagggttatgccagagatttcttagtgaactggggccctcacaatggcaccaatgctgaaaattacaaccaatgggcagaaaaaaaacagatttcagattggg

SEQ ID NO: 257314 - DNA, 216 bp, Gossypium hirsutum
tggtaaggttttcaaactacaaaagttgttcccttaataggtaaaaatttatatctgacattcattgtgatgctttagtctgaaaatagctgtgctacaccattctttacagtttcaaacttactatcaatgacataatacatcttaacatctttggaatctggtcactgtttctgtttgagtcctcacatttttgcgggatcctatcactgtata

SEQ ID NO: 257315 - DNA, 334 bp, Gossypium hirsutum
agcttcttggcctgtgcagggtctaatacggcgttggaggccttagctcgagaggaggattagggagcgtgcagaaagggagttgctagaggcttctgcgtaatttctgctcaggttgcttctggcatctttttgactttcagtttgttagtgcatctttttcttccaaaatatgaagtactctcaacgtgcttgatttggcattttagttatcaatttccatttccttatgtgaaaatgctcgtttctatggatgcatgctttcacaacaaactgtaccctggtatactcatgaataatttcatgagaagaaaaaataaggtgctggcttgta

SEQ ID NO: 257316 - DNA, 125 bp, Gossypium hirsutum
ttgtctgtggatacctaggcacccagagactaggggggctttataaagaaaagtgtgattcttgatcggaagggataacaaagacatgcctaatcctataagtttagattcaaaaaacagaacag

SEQ ID NO: 257317 - DNA, 467 bp, Gossypium hirsutum
atatgcactctaaacaacccatcttttctttcccaagtttatgccctttctgggattgataaaatctaccaagcttatcatttttggaaatggggagctttgattcttgccctactggcctccttatctaccataatcaatagactcaagattctggttatcagattccgacgaaaccattctttaccatctcgacctcttcttatgacacagattttgatactgactcggagacttcatcatgttcatcatcggacaacgaagtagaatatgaggagccctcggcttctcaaaactggcgacaagttgatgaggattttcgagtgagaggatcgggtcattttattgacgatcaatggcggaacagtggctccaccctgcgaaagaggagaagcagcatcggcgatctgttttcgtgggctgaagagctaaccagcggaaaaagcgtggtgaagctgtgggacaac

SEQ ID NO: 257318 - DNA, 106 bp, Gossypium hirsutum
gtgttactcgccattttgtaaactatgatgggtggctaaagataaattcattaaatccatcctcaaattgcaataattttagattgttgctcctttatgctgtctt

SEQ ID NO: 257319 - DNA, 271 bp, Gossypium hirsutum
gattttcttaatcatggcttatcatcgtttcccttggtttgtgttaccctatttattaatcactttgtcatcgatgagtagcaacatagtcttggttggtgctcggcatcttttggagacatctgtgccggagattcctaaacccgagttgcctgagatgtcgaccttcccaaaggctgaacttacaaagcctgaattgccggaaatcccgaaacctgaaatacctaaaatgcctgagttgccaaaacctgaattgcctaaagttccggag

SEQ ID NO: 257320 - DNA, 391 bp, Gossypium hirsutum
ttaacatatggcaagctcaaagatggtggtctgagggcttgtcaggatcaaggggcgtgtacaatgttcagaggttaaaccgcaatgcatttgcactacccacaccacctatatccgaagatgagagctcaaaaatagaatcagcagaagcaagccctgtaacaccgccattgactagagaacgattacctcgtaacttatatcgtccaacagggatgagtgtgggctactcatcctcagattcacttgatcaacatccaatgcaggctcggaattattgtgattcccggtgttacctcaactccaaaactttccagtattagtggtgccaagacagagatatcatcaatggatgcctctatgaggagtagttcatcaagagaggctgatc

SEQ ID NO: 257321 - DNA, 316 bp, Gossypium hirsutum
tcccacccagttacagctttctttcctctttagagcctcctttgctcgaacatgagcataagtattctcttttttaggtataaaatgaaaccatatctcttgaaatctgtcttttgtgctttgaatgtctttaataattgctccaatggccgattagtcaatctcgaaactttggcatttctttataacagtttttgagtcgttcattactttcattttgtttaatcccatgaagattcctaattttattgcttgtaaccctgcatgagcctctgccatgaacggagtagctatattggaatgagtgaccactatt

SEQ ID NO: 257322 - DNA, 315 bp, Gossypium hirsutum
gccaaatccaagaaggccacggtcaccaccatgatggtggtgtgttttttattgatgacttcccttttaatcttggaacagcccaataaagttgttgaatccaagacatagtctttctatgaataagacatagttttagtacatgtagccaaatctgtctagagaactcgcattcaataagatttcaacttctttctttcttatgcgcttttagattgtagatggttgaacaactgtgaccgatcttgatgtacttttattattttcaataaaagatctcgtttgatgactattgccaggaatcatctggcgacc

SEQ ID NO: 257323 - DNA, 432 bp, Gossypium hirsutum
aaataactcaaccatgaaaagcctctctgtttcaggtgggtttttgcttactttggggcttacttctggaaattgggttattacaaatgctgcacctattcgtgaaaaaccagatatgtgtgagaaagcatttcctgattgctgctgcctaaaagataattgcgatattcgttgtgtggatatatatggaaaaagtgcttttggatattgctccactttaaaagaagaagatgatgtttgtgtctgtcgctaccattgttagttttgtttattctttttaaaggctactaccttattccacctttagtaaattgatttctacataagggatcaattgaaaccctaaatcaaaaaatgaataaaagctaaacatcctctctcctctctcgttttcatatcatatcatatatatatataattaatataaattat

SEQ ID NO: 257324 - DNA, 534 bp, Gossypium hirsutum
  unsure (1)..(534): unsure at all n locations
aaaaattctaaaaaaaaatttaacaagaagagattgtattcaaaaagaaaaaaaggagaggaaattggatgcaccaaaaacgattcagcatgaaatggaagcaatacgctgaagatctgtttgtgagaatcggaagaggaccagttcacttttacgaaatctgcttgatgttattgaggaagtacagatagcacggttagaaattaggggtctgattcttactagcttccgttctccatctgatcacccgtcaagagggacaaccagaggaaatgtctttaatcataaatttactgccagagagagtagaaaatttaaaggtgcctagccaagagatgttctgaagggaagactaatgttatgaaaaagattaagtttccacagatggagtagaaatctgctagtaaaactgttcaacgacaagcaaagaggcagcactaccttgtcctctaagagaaattttggaaaaggagaagaagagctattttaaatatattatcgttggagaatgtgaagattntgacatttttcaat

SEQ ID NO: 257325 - DNA, 478 bp, Gossypium hirsutum
  unsure (1)..(478): unsure at all n locations
cccacgcgtccgcccacgcgtccgccttactcgccgtggcggaaaacgattcctgggagtttctattatcctctttctctcaaaaccctaaaccgtcgccaatcataataatcagattcttaaaatttgatgtgatgaagagggcaatgccatgggatgatcatgatgaggcaaatgattcatcatcttctgacgaatcttcatcttcaaatccggactctgaagctgaagatggacctcccaacaccaagcttaagaactcatcacaagcaaaatctaggaaacaaaaaagtgctgctttggattttgaagcattgaagcgacatggctataatgagnggttgtctgtcctaaatgtacctcctccaaaagagaagccagactggtcttggtcaactggcagagaaagcagtgaaatcagggagattaaagaatctttcgaggacagacagaaaactagagccgcaatattggatgc

SEQ ID NO: 257326 - DNA, 384 bp, Gossypium hirsutum
tattttctttctgatctttcattttcccgagaaaatatacttatgggttcaaaacaaagatgttggcatcgtcagaaaacctagcgaacatcgaaacgtcgacgtttcgttccctcttcgacgatccttggatctccgaatccttttctcgcgacacacaaactttgacgatagcgttacaaaagtcaatatccgattcctgcaccggctccatcgcttcgccggtgcctgaaccggcacccaaacagtaccgaaccgccggtccaccgcctaccgggaaagtttccaaacgtaagcctcgcgcctcgaagaagtctcgaactacctttatagcggcagatccagccaatttcaggcagatggtacaacaggtaaccggaattg

SEQ ID NO: 257327 - DNA, 374 bp, Gossypium hirsutum
ttttcgcgtccgctctaaggaggacgaaatgaaggcagaaatatgaacagattgggctgcccttgaaggagtatctcgtgtcaatacccttttgaatctcccaaggttcgatcctggaaagtaatgttctgatgtaggaggttcaaagccaggcttcgacatgagaaaggttcggttactactactattactttgagatttgctgagataaattattgtaatatttatattcatttttctacagagtggaaaagaggggcattgatttggtttggtttggtttgatgttaaaaaatggagcaagcagacccggctgtattagtgtgtctgggaaattgtcctttctatctatagtctgttgggtagaattggaa

SEQ ID NO: 257328 - DNA, 541 bp, Gossypium hirsutum
  unsure (1)..(541): unsure at all n locations
ggtgaaggcaatcactacttacgctaccgggtaatggcctcgtgctacagaattcactttcctgagcacttgaagagccatcgctctcatgacatagtcctactttgtgttgactgtcatgaagtcgctcatgctgctgctgagaaatacaagaaacagattgctggagaatttggaattccactttatgtccgtaaggtggttgattcaactcaagcgcctattgtatctgggtcatctgagtcaactaactttgctgattcaggtgtctcaccactacaattgcgaacagctgccaaggctcttttgcgtcatggacctgaaatgcctcccagccgccgtgatgaactgacccagattgttatgagatattatggaggacgggaaatctccaacgaagatttagaaagagccttggtagtgggcatgagtcctcatgagagaagaagactcgagaagaagaaaggcttatctttaaaacagtctacaagaatccctcnctgtaaagaacaagaaagtaatgatgcaactaggatcttat

SEQ ID NO: 257329 - DNA, 343 bp, Gossypium hirsutum
cccacgcgtccggcaaaggcgagacccgattttgccgggtttcggaacacccaaatccccccgaatctctttcaagtcaaaccaccgtcatctccgccatggacttccaccgtaacccttccacaaactctgcctcttcttccacctcctccacttcctccgccgctgctcaccaccaacctcctccttcctccgccaccgacaacgatccgatgcattcatggtgggaatccgtctccaaacaacgttcccgcatcctttccctcgccgctctcctcccttccggtggagtcgccgtttcttccttggctgattctgaccgtcccgctgtctccctactctc

SEQ ID NO: 257330 - DNA, 307 bp, Gossypium hirsutum
atgtgaaactggtagctggggaagctagtcgaagttctgaaaaagagcgacgatcagatttttttttaaccaaccatgggttgaagatgctgttgtccgttatttgaatcgcaagccagctgccggaagtgatgcaccaggaagcatatgaatcataattttgaaacttaaattggtgcctggaacgttctttcattgatccattccatttaattgaaatagatgtgcactgttgttggatgactattgagagggatgtaggaaaggaagtagaatgtttagtcataattatcattaaacttcattt

SEQ ID NO: 257331 - DNA, 378 bp, Gossypium hirsutum
tacatgatttactttactggaaattgatcatgttagaattgtgttgcaccacaagcataatggtgatcgctcaattattgtgatcatgcttttatcattggatgcatactgtagctccttttaagagcaaaaagcaaatatcatatgtaacaaggcctagtaaatttttttagattgtagatgactgagaaagttctaattggatattacaatgtattgaaaatcagtaagaggaagagttcctggttaacattggtaagagccactcatgaaaagcatgcccatctatgtgtttacataacatatccatatatcattgacctctaaatgagtatcacagattcagagtagatgtgtctagtgcctcctttttttaat

SEQ ID NO: 257332 - DNA, 332 bp, Gossypium hirsutum
ttgatatagctatatcctctatgacaacaaaagctggtattaattctaacgtaaatgaagagaacaaggggaagaaagatggtgaggaggaaatgaatcaaagtactagttgtgaaactgatctcactgtacttttaaatgcatggtattctgccggcttctatacaggaaagtaccttgtggagcagagtattgctaagagaaggcagtgataagcaattcttattatgcaatgtggactgctacagggcgagatcccagatatcagtcgtcctgcacattgcatggaatccctacatttatttggtaggcaagaaaggaacgtgagaatg

SEQ ID NO: 257333 - DNA, 415 bp, Gossypium hirsutum
cttaatttccgggaaactttttcttttcccgttggtaaattctcttctcagggaactcttttttcccccgagaaaatcagtagttcagtacccttttttttgcttaaaaaagcactgaaaaatggatgattcaatcggcagtagtggtacaactttgcacataagaaaaacacccaaaaaatccaaatccaagaagaacaataagccaatcaaagtagtgtacatatcaaaccccatgaaagtagagatcagtgcttcaaacttcatggccttagtgcaaaaactcaccggccaagacgctgctgaacttcccgaagatcccaccctattcaccgacgctgatgaatccgtagtcgtttccgccgaagacggaggcgatcaaagggtacccgacgctgcaaaaaccacaaacact

SEQ ID NO: 257334 - DNA, 297 bp, Gossypium hirsutum
ccttcgcgtccggttttaatttaactacaaccgtgcctggtttgcctgacaatggggaatcgtagatcgagtttagaaggaaaaataccccacaaaaatgtcgatcaccacatcatcatcggcaggcttcaagctgatctgtctcctccactcggcgggcgccttatcaagcggctcgctcatgatgttcgacatgaagggaatctacaccttcacccacgggatcgagaccgccacgaaactcctgggctcctccccgcacgatcagctgttgatccggacatccgattctttctc

SEQ ID NO: 257335 - DNA, 338 bp, Gossypium hirsutum
ctttcttttgggttcaaatgcagtcctcttccggtgttgattttaattcgcaggtggaggaattgattcctgaacaacaggtttgtcttatttgtctcaatggggttccatttgtccttaagggatagctgcacatgtaattactattttagccagtgctgcttaattcataaccactttttatgtatgccactccactgataagttgttgaagaggcttattgttaacttttaatcctcacaagtttatccagctagtgtataatctatcacctgtgtgattctgccaatgatcatatgcaagatcatagcttggctcaaaattgccttcactaaat

SEQ ID NO: 257336 - DNA, 139 bp, Gossypium hirsutum
ggtttgtatagtgtacttaatatgtttaaattgggcatttttgaatatgagccagtgcgaaaatggcttattcattttggttaagcttggttttatctttttgatctatttggtatatatataagatgtttaagcttaa

SEQ ID NO: 257337 - DNA, 412 bp, Gossypium hirsutum
gttggttatgaagttaaaaattcggatgcaaaggctggtgacagtaatgatgttactttggacaaggccatcccagaatgcaattcaagtgactttgaagagggtgatcatgttacgagaacagatgttgaggacacaacttttgcagtgaaagaggatgtcctgaagaaacaatggagttgaggaacgacttctatgggcaagatgcagccattgcagaacgtaaagacctagcgaatcccgatgaatcaaacatctttacaaacacggagatgagtttgttttggcgggttgaagatgaagttaaaaattcagatgtgaaggctggtgagagtaacgatgttcctttggacaaagccatctcagaatgcaattcaagcgactataaagagggtaatcatgttgaggacgc

SEQ ID NO: 257338 - DNA, 126 bp, Gossypium hirsutum
atctatagtgtctcactctctccgtgcttcactcccgcttctcctttccctcttcaaagaaaatgcgtgagatccttcatattcaaggtggccaatgcggcaaccaaatcggagccaagttctggg

SEQ ID NO: 257339 - DNA, 111 bp, Gossypium hirsutum
cagatcgttcagaacatacgtagtgaaactggtgctcagattcgcattcttaaggacgatttaccttcttgtgccttgtccacagatgaacttgtacagatatctggggaa

SEQ ID NO: 257340 - DNA, 140 bp, Gossypium hirsutum
cccactcgtccgcccacgcgtccgcaatctttgccatctccaccgttcaccagaaatcatgacagaagaatactgcccccaccaccaggacggacaccaactagtgaagcgcatagcgatagccattgtcgggttattga

SEQ ID NO: 257341 - DNA, 268 bp, Gossypium hirsutum
gccaatgcttcttttaagctgtgcaccgcttcctgtttttcctaacttggtcaaattgaagatacactgttctaatgatctacgcccatactatgatcaatgggaaaagggacttgaaactttactctcaagtttgcctgaactagaaaaacttgagtttaatcaggaagctctcatctctctgcctgagaaagctccttcttgcttgttgtctaaactcaagtccataaaaatttcagactttacagattaaagagattgtattgtt

SEQ ID NO: 257342 - DNA, 241 bp, Gossypium hirsutum
gttgtgtactggatgcctctttcggagggttgccgggggtggttatgacaccacctcgttcgattgaacaccaccctggttgctgcagctgctgcttttttggtcgtaacaagaagcattcctcaatggcacacagccctgaggaaaatcgtgctctgagaatgggtgattctgatgacgaggagatgaacctgtccctgcttccaaagaggttagggaactcaacatttctcattgattc

SEQ ID NO: 257343 - DNA, 315 bp, Gossypium hirsutum
gatggttgttattaagcataaagcttattagaacactgatgataatacggtgaaaattaattttctgaagattcgacgttcgtaattattcctcttaacaatgtcgtgtctttgaggtttaaatttgagttctttttaagagtacaatgtatcttacaactgcaatccttattactgtataaatcatgtttatcaacttcttacttttaatcgctcgatgtgctttttaaaaaaaatacttttttgcctagattctttaacaccttttgtaatctaatcctctaatttgtaataatattttgatgttgaatgcgt

SEQ ID NO: 257344 - DNA, 462 bp, Gossypium hirsutum
gttgttaaatcaaagcgatcaatatggcgactgagggcgatcattgatttcttctgggcaatcatcaattttatcggagtgtttttttcgaccatgttctcgatggaaaagtcagatgcctatagaaaaagctctggttcaagcaagaaatgggatggtggtccaggaggaccaggaagtggaccgtatggtggtggtggcagcccacgtcgaccatcacgtggactagacaatgttcgaggaattgatcatagttcccttcctgcttgcggctcttgctgtggtggctagttcccaaacattgttgtgtctaattcatttttattttgtgcaagaaatttataagatgttagtgtcaatagactgcctgtgaaataaaaaaaaactttagaaactctttaaacccttttatttttctctctctcgaattttgacattttttattgtcataaattaaaaatt

SEQ ID NO: 257345 - DNA, 464 bp, Gossypium hirsutum
gtacataggtcatgtcccaacctgtgtcctcaggggtgtatctatttgagttgccctacacgcccgtgtgttacgccatgtgttaggctatgtaactcactaacttgcctacaaaataactctcaaatggcacatgatcgtgtcaacaggccgtgtgggagtcagcgcacgtgtttcatgctatgtgaacccaaaatttacctaaaatcaagccatttcacaagaaaattcacacttaacaaatctaaccattcgaacatacatctaagagactgaaacaacattcaccactacataagcatgccatttaaccctaaaatcaaccaaccaatgtgccattcaaagacaccacaattataccaaaacatcaactatcaaaacatatcaatattggttcaattcatggtaagtaatctagttcaaacatattccaaaacataccacaacactcattgattcattcc

SEQ ID NO: 257346 - DNA, 315 bp, Gossypium hirsutum
gttcattcggtgtgtctgtctctcgcaaccgagagggggcctttgttatacaccatggtctcccaagttcttcctcagccatttaacccagtgaagaatcgtgggttctctgcatttctgtctcgtggcccttctccattagctacttccaaggtttcggtttctgggtttcattcaaaattccctgttgggtcgagtttcagttgtttcgctcgaaggggtttcgttgtgagggcagaatctaaccctgaaggtgaaggtgaagctgaagctgaaagacatgaaaatggtgttgtagaacccaaaacgaaagct

SEQ ID NO: 257347 - DNA, 369 bp, Gossypium hirsutum
tctcacgcgtccgattctggtgtgtttgggtgggagagtccgcttatctgtcatagtccgagctttgttaatagggtaaataattgaaatgaaattttgaaaatgagattatttgttttagcactattgaaaagtacgagaaagaatgtatgaattaaattatgaattgagttagtatgagaaaaatgaattatgaatttaagatttatgaagtaaaataattatatataaaagtagtttaaataattacaaaatttatggttgatgtttgtaatttattaatgttaaatagtcttgatttatagtaataccactgagtatatccatactcagcgtacggttgcttccgtgcgcaggttagtagaagtc

SEQ ID NO: 257348 - DNA, 415 bp, Gossypium hirsutum
attatatcagcaaagaatctctgatcgctttaaggctaacttctaattaaagagctccttacccccttgaccgagtctcgtaactcgagttcactcaaactccaactactcatcttcagatttctgagtacgttagatttccaagacttctcgtttttttttctgagaatttcataaacaacaatgctgacgtgcatagctcggtccaagcaagctggtgatgactcactggctcaaccagaggaaatcgactcgtccaataatccgaacactaagcacaaccaagccatgaaatccctcacatctcagttgaaggacatggcactgaaagcgtcgggggcgtacaagcactgcaacccctgcacagcacagactcggttaaagaatcctggcggttccgacgccgactcggatc

SEQ ID NO: 257349 - DNA, 182 bp, Gossypium hirsutum
gctgttttcttctattttcagacaaattaagagacaagggacattatataaccagctgtcaggtttgaaattgacaactattttttttttttctgtaagaccaataatgcttctcctgtattatacacatttataactgtcttgggcatgtaaaaaaataccatatattttaaattttagcc

SEQ ID NO: 257350 - DNA, 363 bp, Gossypium hirsutum
atcgtatgattctcgcggtgttattcgccaactctgaaggcaacatcttagttgaacgctttaatggagttccagctgaggaacggctgcattggagatctttcctagttaaactgggagcagataatcttaaaggtgttaaaaatgaagagctgcttgttgcttctcacaagtctgtttacattgtttacacggtgcttggagatgtcagcgtctatgttgttggcaaagatgagtatgatgaacttgcattggcagaggtgatctttgttataacctcagctgtaaaggatgtatgtgggaagctaccaacagagcgcctttttctggataaatactgaaggatatgcttgactttggatg

SEQ ID NO: 257351 - DNA, 338 bp, Gossypium hirsutum
aaaaaacaaagtaaaaagaaaacctagagaaattatcgctgttcggccgactcaagaatctgcgcagtcccaccaccactgcgatcggtggagaacgacgcgcgcaacccttgtctagagccttggcttaacgattgccggtctcagctccagaaatcctatcccacgcttcgatttcgacaaagtgaatatggatttcgatagcccattcataaaggtgaactctccttttcattttattttcttatgctcaaggattcatgcaaaaactgggaaatggagaggaaaaaaaattgaaaaaggaaacaaatctgggtctcacctttcgattttttttt

SEQ ID NO: 257352 - DNA, 294 bp, Gossypium hirsutum
atcatagtgtcctgtacatactcaagaatgcatgttgagattgagtagcagctgactgttctttattttccaggagcatttgctaatagtgtgtgaacttctcaaggcaaacttatacgagtttcataaatttaatagggaatcaggtggagaagtctacttcacaatgccaagattgcagtcaattaccattcagtgtttggaggctcttcagtttttgcacagccttggcctagtacattgtgatctgaaaccggaaaatatcttagtgaaaagctatagtagatgtgaggt

SEQ ID NO: 257353 - DNA, 403 bp, Gossypium hirsutum
cttacttcaaaagccaacaaaaccagagaaacagggcgggaattatttaccagacccatggctgaaaccagacatcattaacaaacccaacaaaaacccattccccaaatctatatttcaacactacccatttcattatttttcgcaaaaaatatgaagaaaattggagggttcaagcttcgacgcaagctggtaacagttttcaaatggatattccgacccagaaaaagcaaccgcttcagtagtttcttaacacgtccgatccgaacccgtaacccattatccagactttgttctttccttcgacggggtagaatcaaggggatatcaaattcggatcctggatatatccaattgggtgagcaagaagtgaagcgggttgaggtacccaagggacatcttg

SEQ ID NO: 257354 - DNA, 483 bp, Gossypium hirsutum
caaataacccgcacgggcaacaccggggtggcttttgtactctgcgcgtgcgatatcattccgatctcttcctctcaggtcgccttctcccgccccaccgctcctgcttcggtccacccgattcctgcccgagttatcggttccgggcctgccttcaagatctcgacgggtcaaaccaaaacctataaacaaaactattgaatgaggaacaaaaggggcaagaccgagaagttggatgacctagaaggacctcaagggtcaacctctcagggtttgatggaagaaaagttaggtaaaggtccttaatttggttagctgcccctctagtttatttgaaacttgggtcccctcccactccctgaacttcagcgcaattaactatctggagatctgctcagaaatacctcaagttagtaatgactattagtagatacaggaagagaatgttctggttgggactagtctattcttaagttttaatct

SEQ ID NO: 257355 - DNA, 132 bp, Gossypium hirsutum
tgttattggtccataataaaccattactcaggttgaagaccgagaggcagcggcgtgagaagctgaaccagcggttctatgccttacgagctgtgagtgcccaacataatccaagatggacaaagcttgggg

SEQ ID NO: 257356 - DNA, 263 bp, Gossypium hirsutum
acccgccacttgtcctgtgagttctttgttataggaatacggactccactgagattccttttattcgccttattacatgtattattcattgcccctcccatatggggtgacgcctgtctatatttccactagttcaaaaataacttgcttgcctaattattgtagcctgcttccgatgtgctgccatgattctttgtactgacaattttacatgcatatttctatgtatgcccatcgtcataagatacaatcagtcccttgtc

SEQ ID NO: 257357 - DNA, 430 bp, Gossypium hirsutum
ataaccctaaatcccctttgaaaatgccgattctcctttccctggcagcagccaacagatttagactggagagaacaccttttctcctttcaatctcgtcttaacttcgattttaactaagcaagaggagatctacggcgtgctttcaaggtaaactcccgcttttcccttttttattcatgccttcgagtaaaaataaaaaataaacaaaagatcaagccgaaaaaaaagaacgcccccgagatttcagtcagaaaatcacctttaagaatcggttgttttctattgcttctgcttttttatgcgcatttctgtgtttatgtggcgttcgagtgtgtaatatgcatgtgtatatttcattcgtaaagaagaaccatttacaatcgaaaataaaaggctttatagccgaataacacaaaaaaaacaattt

SEQ ID NO: 257358 - DNA, 266 bp, Gossypium hirsutum
  unsure (1)..(266): unsure at all n locations
tttacttttgccatcacagggaatcgaacccaggtcttcccccaacacttacacgtcacccttatagctccctagtggcgtcacttagccactttaccagaggatctttttgtgttacattttacccacaaattttaataagaccacctatccaaagcccctaactgcttaagtccaaaattcaaaaattccaccgggttttggccagcacatgggccttccataagcttatttacctacccaaattatgaattccacaacccant

SEQ ID NO: 257359 - DNA, 387 bp, Gossypium hirsutum
cactactactgctgcttctgtttcaacatctatgggaaaatcaagtgctgctaagatgaaaactgtagtgtctgatattggaagaactggtcttggaaatgggttcgatcatgaccttcaatctagtccaatcctttgggcttcacctcagagttctcatcttctagccttattgagaactaccccaaaccctaacgctaacactttgtccactaataatcctgttagtattaaggaagaggtgagcttgcttggatcgcatgcaatgaacgagccagctgttgcaaatgctgcgttaaatgctcgaaccctaggtttggatccccttagccaggtcccttctctaggactttgcagccctttttggaaaaacaatcaacaccaagc

SEQ ID NO: 257360 - DNA, 380 bp, Gossypium hirsutum
ttcattcattctttgatgatagcatagttgattgggtctgtattctttatatctgtattagttcatttaatatatgtatataatctactcaatcattacatatttcccattttaagtgatttcttaatattaaaaaggcgatcttctattcttttcaaatgttggaaacaagaagtttaggtcccaccagaacatggacttgcaaatggccaattttctctaacaaactatacagcctttctaagatcctgaattattagtgcttgactggcatgggatggataacagatcttttttctgaattctaggcaaggcctttgctctcacaggctttggaacatgggaattttgatgcatttgtggattcaaggttacagaag

SEQ ID NO: 257361 - DNA, 391 bp, Gossypium hirsutum
gctagttctcttcatcgcttatatcccctcacacgtactcaagtctcaacaagtccttgatatctccaaaatgcgtttctccctcgttgttctctttgctgcatcccttgcctccgccgcttccgtgttcaaacgctggaacgacgattatggggttccttcctgcgcaaagccctgtatcgccaacgtagacccctggccttgcaagcacgacgacaaggcctgcctttgcgcaaactccgattatcatgcgctcctcggggaatgcattcagggcgcttgcagccctgaggacgctaaaaaagccgtagagtccgggaaaaagtattgcaaggcagctggtgttgatcatgagaaacccattccgaagtgcggggttcactgcttggag

SEQ ID NO: 257362 - DNA, 298 bp, Gossypium hirsutum
tgggtttatgcatagaaacaacaatagcattattgagcttatagattttgttgtcttttttctcttttcctgactaaataagaagaaaaatatcagtcatgtatttataaattattaaatttacaatgtgttgatcgtaatctgctagtaaatggtaaaatgcttctctattctgaattgtccagactcaggtttgattgttagatatggagtgtctgagatgggtacttcaggaaaattgaagaatcgaagtaatattaggtggccagcatggccttaatacgaacctgcagtgatg

SEQ ID NO: 257363 - DNA, 356 bp, Gossypium hirsutum
caaaatcctattctctcttgattttccctcaaccgatcctaacatccctctcttaagcaccgatttgcctctatcaatgttgacgaacagattcgggcttcgagagacgataatcttagccgtgaaattccttctcaactctaatttcaaccaaacagatgggatccccagtatttccgtaaggaggagccagctggaggtggtggcgcacatggggcgtacagaggggacgaagaaaaccgtgcgtaggagctgcggcgtggggaagcctagggttccagaagtttcaatttgtccgggccatttaggtcgctttaagattgggcctttttttaaaataagtttaaagtttgggc

SEQ ID NO: 257364 - DNA, 305 bp, Gossypium hirsutum
cccacgtgtctttaaaaatataatggttggttttttttcttcaattgtttacttagcattagttagttcacattagcagctacttaattgttattatttttcttacctaataaacaattttacagttaatatggaatagaactttaggaggtccattaaggttgtctctgctatcattggcttgccatgtttttattctatattattaatgaaaagcttgagttgaattcgctgctggatggctccaggtctatcaacgacttggagttcatttagaggaaaaaggagagagcttttataatcct

SEQ ID NO: 257365 - DNA, 322 bp, Gossypium hirsutum
cccactcgtcttcggacgcgtgggcaaaacccgagtttcttatttcttaacctgaaacccctcctctttcctcctactctgtttcctttttcttcttagactcgtgtcggatttttttctcgtgctctgcaggtgatattagcatgacttaaacaaaggtttagtgatgaattagcatcgtcttcttcctttttcatttattgaaatcaatccaagtccgtgaaccagtcattggattctccatagccaaaaaaactttgcattcaactcatccctcaagctattcgtggtcataaactaaagctcagaaacttcaattcaa

SEQ ID NO: 257366 - DNA, 366 bp, Gossypium hirsutum
cccacttgtcctcccacgcgtccgaaaaaacagcgtaggctacaatccaagttcaagattcgaagatgtcgggaagaggaaagggaggcatgggactgggcaagggagactctacgatttctattggcttttggcaattctatgttgtttaaatttggcaatttatctggtttttgctaaatggtatgtgtataaggataagaggcttgctgatgaagggattgaattggaagaatcggaacctaccttccactaaattaattaggtttcattaagattttgtgtttgtacctttgtataagtaccatgttaatttattgctgacagttaagctgtaaaaaaaaaaaaaaaaaaacaaaaaacaag

SEQ ID NO: 257367 - DNA, 464 bp, Gossypium hirsutum
cccacgtttcctcccacgcgtccgattatattctctctcattttgcaatggcctcccatggaaacataacagtaataagcacctcccccaaaggatcagaagcagaagtggcacccaattcaggcaaaggagggcaatgtttgtgctcaccaacaactcaccagggctcgtttcgatgcaggtttcatcgatctaagtcatcagcctggatgatgaaacggtccaaatctatgcctgccaataattctcccaccgcttctttttctcccaagtctgttgaatctacgtaatccctgaaaaatatcaccaaatcctcactctcccctctatatgtgaactatataatatgcacatagaggtatgctggggtctctgtatttgcttgggatgtgattatctaaatatctgcaactgctttaaatcagacaccttatcaccaagagctttccttcccttcatttttc

SEQ ID NO: 257368 - DNA, 321 bp, Gossypium hirsutum
cttcttcagaagtttatttaattaaacatttaagtttatacatcaagaaattcgtgcactaaattaaaaaaacttccccgacaaggattgaggttaggaagttagctttcttcacccagttttcaacctccttcaagttcaaaaaagtcctggaattcaaagcttttaccaatttcttcgccgtgaaaaccaccattaaaacgcaatcaatcacatttccctctcaaaacccccgtcaaaactcagctttcaaaagcctagggagagagctaaatcaaacgaaaacacactaaaatagaaaagagagagaaactgaagcag

SEQ ID NO: 257369 - DNA, 237 bp, Gossypium hirsutum
tcggtgcatgcactttgagattggtggagacaagaaggggaaaggaacatctctgttttaaacgtgttattcatggtatcttgttatgtttgctttactttatatggagtagtttgaacttacaagacttgaatggaattatgtcctgttagccaaggctcttaccaatatgttcggcgggaaaaccaccattacaacgcaatcaatcacatttccctctcaaaacccccgtcaaaa

SEQ ID NO: 257370 - DNA, 110 bp, Gossypium hirsutum
tcgcaatttcatgcttccaccacatgaaattcttgcaaggaggcttgcaaggaatcagatttcgtcattctcagtttttgaaggtgttggtagaaaactaaaagggaggg

SEQ ID NO: 257371 - DNA, 252 bp, Gossypium hirsutum
attgttagcgggttttcaggatttattcatgaacgtcctgctgtgcgtatacatgcatctcggcctgttaattccaattcactggccttctttgttacagttcttttgttattcatgattttaaactctcaccaaatgtctccaaattttctgctttggctagtagtaggcatctttttaatggctactagccttaggatgtatgcaacttgtcagcaacttcaagctcaggctcgagctcacgctgctgca

SEQ ID NO: 257372 - DNA, 273 bp, Gossypium hirsutum
gcaatttcctccggcaagtcgatctcgaaggagagacgataactggagaaagggaaggaaaggaaggagcagcggcagcattagtagtacgctacagtactatcacataaagcgtaacaaacaaatccccagcgtcaaaagaatcctcctctctcgctttcgctctccgttagatctttcctttcctctctttcgtctttcttttagttatagtttcagcttcttttatctgcctcgatccccagtgaataattataatttgaaagttgaaga

SEQ ID NO: 257373 - DNA, 100 bp, Gossypium hirsutum
tcgcggactcgtggggaatactttattaccgaagataatgtcgggatgctcaagttggcaaaagaggctaactctatcctgcttgattatcgtatccctg

SEQ ID NO: 257374 - DNA, 105 bp, Gossypium hirsutum
gtggttgtagactaaaacgtcgtcgcaccaggagcagtaagaacaaagaagagctagagaaccagagaatgactcatattgctgctgaacgcattcgtcggaagc

SEQ ID NO: 257375 - DNA, 166 bp, Gossypium hirsutum
tcgcccatgcgtccggcaaaacagaaaatcgaaccgactgaaagtgagactcagattcttcaagacttgcagaaatggaaaacagcggaaaacatgaagcagagagatatgccgtagtgaccggagcaaacaagggcatcgggtctgagatcgtatggcagctcgc

SEQ ID NO: 257376 - DNA, 251 bp, Gossypium hirsutum
attccttcccagaatcaaatctttctagagccacagtctatgacaaaatctcgagttcatcgggcaatcaaaatcactgagcccggactctacctcttcatctatcctccataaccatcgtttcgtctctcttgattcaccaggttttccactgcaggcggtaccttctctatccagtatcgagggtgctaaaatcggattccttcctttgccatctcatgagtagcgttgttggcttcccttagagttca

SEQ ID NO: 257377 - DNA, 116 bp, Gossypium hirsutum
tcgaaagactaaatggacattatggggttggagcatttgtcattggaaacacaatttcatccattccttacttatgttttatctctttaatcccgggagcactagcctattacctg

SEQ ID NO: 257378 - DNA, 218 bp, Gossypium hirsutum
ttcattcgtccgaaaaaaacctagaactaaaaaatttcctttgtttccccttgtttccagccgaaaggctaattccccaggcctttaattgccaccgagaccgactgcgacaatcgaagcagggccttccagtggtgcgtgcgcgatgtaactctggttgtggagttgtggagaacgaacagcgcatagcgcgggtgcgaacatggagcgaggcacat

SEQ ID NO: 257379 - DNA, 143 bp, Gossypium hirsutum
tcgctcacgcgtccggcagttcaagcacggtcgaggcggtgttggacgcaatttggagaaagctctcgtctcttttctgaaaggctctgcgcgtggctccacgcttgccatggccgatgcggggcttgtttactgggaaaggg

SEQ ID NO: 257380 - DNA, 171 bp, Gossypium hirsutum
tcgttgaaaggcccttaccaattttcaactcgaaaaccctaaaaactggtaactctcaaagactcaagctttaacttgcaaaatcaccaactttttttttttgaaatggagggatcggaaaatgacggaaatgttacgccgatcgcgaagtggaagaccgagttctcgagg

SEQ ID NO: 257381 - DNA, 139 bp, Gossypium hirsutum
tcgtcacaaaggaagtgcctcaacaccatgaagaccaagttcttgctttatcccgtctttgaatctcaaaattattaagaagatggaataaactacggttgtacatgtagaaacccttatttttttccgtacgatttgt

SEQ ID NO: 257382 - DNA, 176 bp, Gossypium hirsutum
tcgtattgatgaaaatcaggatgtacttatgaatggatggaagcatttatatatacgaaagttttacttaacaggtttatatgccctacggcatgatgaaatcattgattatggccacgccaaaaaatgaaagaaaagaaaaaaagggggacttgaggcaagtacacaatggtgga

SEQ ID NO: 257383 - DNA, 166 bp, Gossypium hirsutum
tttcactcgtccgcccacgcgtccgggcatgctcgatgtttgcacataccaacccattacatttagatgtgtttcagagtgtggcgcgatttgaggctgaagtggttgctatgacagcagatctacttggctgtaaagagaaggcttttggaggacaagtttgtgg

SEQ ID NO: 257384 - DNA, 224 bp, Gossypium hirsutum
tcgttgacgcgtgggtaggaatcggaggcattcgggtacccatatccgaagacatttttcaacttaccgaattagggtacggtggagtcgttatggataccggcacggcggtcacaaggttcccgaccatagcttataacactttccgtgacgcttttatagagcaaacggctaacctccctcgagtttccggagtatccatattcgatacgtgttacaactta

SEQ ID NO: 257385 - DNA, 185 bp, Gossypium hirsutum
ttcacgcgtccgggtggacttgctgacatcaaaattgacgagtatatgcgaagcttctctggagatgtcatctcaagagcctgtttcggaagtaattattgtaaaggagaagaaattttcttgaagctaagagctctacaggaggccatgtccaagaaaggtttatccactggcgtgcctggaat

SEQ ID NO: 257386 - DNA, 447 bp, Gossypium hirsutum
gaaaatgggaaacacatctgaattgtgctcacagctcggcgcagttctgggtatgcttggtgactgctgtcgagcaatgggagatgctgctgctgcaatcaattatttcgaggagagtgttgagttccttaccaaattgccagctgatgatcttgagatcacacatacactatctgtttcacttaacaaaattggagacctaaagtattatgatggagatcttcaagcgtcaaggtcttactacttccgatcactgggtgtccgccgtgatgttatcaaaaaccatcccggtgttgcttcacagattctggatgtagctgtttctcttgcaaaagttgcagatgtagacagaactcttggaaaagaggatgtggcggccgatggatttcaagaaggcataaaattgttagaatctttgacactgaaatccgaagaagccggtctcga

SEQ ID NO: 257387 - DNA, 272 bp, Gossypium hirsutum
tgtgaactcaactaatggcaacaatccgtctaatccacctgaaaagaaaattccgaacaaaaataaataaaaagtaaacattttattgcctctaaaaaaaaggagacattttatcattgccagctacgttcttagagctcagtgcaagaaagagaacaattgggatgaattttttatactactaataacaataaggaattaataaaaagaaaagtataaacttcagaatttcctttccaatcaattttccattattataccggtgaccaaac

SEQ ID NO: 257388 - DNA, 129 bp, Gossypium hirsutum
cccactcgtccgagatgaccaaatgggtttgaaataaaaatgttagggatgtgtggaagattatatagtatttgccattaatgcagtcttgttttgctgcattgcttttttttaaagcaattttatttt

SEQ ID NO: 257389 - DNA, 240 bp, Gossypium hirsutum
gtttgtcattatctgtcaagaggaaaactgacctggttcttattccaactccatatcatggatctaaaattgttcattagaaccacaaagatcatttggttggtttcctctcagtatcatattaatagtacttgttcctgtcatgtctttggtaaaacacaataagcttacgccgcctatttctttttgttaatgttaatgaaacatggaataaccggagttgaaccggtgcttggccct

SEQ ID NO: 257390 - DNA, 307 bp, Gossypium hirsutum
cccactcgtccggtttcacttggctagcagccgacatgcaaatagctccatcaaaggctgacgacatgcgatcaacggctaaatccttgcccacgcaagtcgcaaccatggagatccggatcatccgtacggaggagcggggagaggtatgcttgaaagaagccgtgcgaggaaaccgctcgtgagacccaaccccctggcactgttctggcatgttccagaagcttttggtgcttgactgttggaattctttttgaatttgggctatacgggctaggggtttatgaatctgggtatttgggctggt

SEQ ID NO: 257391 - DNA, 251 bp, Gossypium hirsutum
atatctcacatgagtaactgtacagtgggtgagaatttcattccatcaaggtttgcctagaggctagaaaaattcagtcttgaagggtcgttagggattgtgggacataggaatggagatttgcttattaaaaagaaaaagaaaaaaaaagaaagggtcctactgtgcgtgctctgagtctgatgtatagtgtagctgttgtacatattttttttctaaacgttaacctgccaaagaaatgttgctcaacc

SEQ ID NO: 257392 - DNA, 242 bp, Gossypium hirsutum
gaatgttattaactttcctttgattttgtataccaagataaagctaaggagatacatttttatcaaacaacacgaagtataaataaataaatatggccataaaaatattaaagttgtctcatgcatgcaaatatgcttccatgatttccattgataatttttcctgttttctctagatttagtgctcttgttttttgttttttttttacagtaatacgcaactagaaaggttttaatacagt

SEQ ID NO: 257393 - DNA, 315 bp, Gossypium hirsutum
aattcttcgtatctccaaccgccaacaaacaccatcttcaacagctcgaaattcaccacagccacccaaaccttcgagtaaacaaggatcggaagttcccatcaagttcgactataccaccgccccaccaaccgagaaaccaaaaccagttgtttcagctggtaatgctcatcaactgtgaggaagtaagctgaagcctagtgcagcaaagggtaatgggaaaagccaagtccaaaaccacgatgatatatttgctaaatctatccatgaaacaaggcggcagatcacgtcaccggagccggacaacggtgagat

SEQ ID NO: 257394 - DNA, 357 bp, Gossypium hirsutum
ttactattgtatatatcttcggtgagtgtgtttagtctctttttctctttgttcctgtttgatgggctgttgatgtctttggcggttggtgagaatccaagtcccaaaaccatggggtttgataaggaggggagtgctactgatagtgaagcttcagagacaaaaacaccatcaaagattcctccaaacgaagatgccgttgacggacatcatccccctggaatcaatagaaaagcaagcgagagttctctttgtccaactgaagacgaagacgatgatgatgaagaagagagggagattgagttaggcccgaagtgcacccttaaagaacaactcgaaaaagataaggatgatgag

SEQ ID NO: 257395 - DNA, 374 bp, Gossypium hirsutum
attgttgccttttgttagttttctttattatttttcccgatagcgaataagcggcggacctctaaatgaagggcaggttcatatagctgaccgtgaagacaataacacgtcgttcaggtataatctccgagttggtgagaggcatacatttgtgtttgatttttttgttccacggatttagtcacaggactggattctgtgaagtgctgtagcattgattggtttgaaaatgctatcctacactagtggcatggtcttatagatacttaataattttccttcttaatatgggtgcataacttttgcagcagtcaagagcatatatgctttggttacaattatacaactaaatgaaattgtaattagttgatgtt

SEQ ID NO: 257396 - DNA, 482 bp, Gossypium hirsutum
ttcactcgtccggcgagttggctgaaccaaaactcctaacagcaaacaatccgactttggaagaagatgttgaagtttctatccaaagtgaagatcgagttcaatgcattggacccacgcatagcttcatgcatggaattcttagcccagtgcaacgcccgcaaagctaaagagtccaaccccgcctgccaacttcaggtcaagcgccgaaccgacgatcacccgccccaaatcaccgttactttcgtcaacggagtggaagaagcttttgatgccacttccactcctgctcaaaccattaggaccatgatcctcgagaaaggtcagatgcttgagactgagcaaatgttccgtgaagcaggcgagaagtggcccgttattatacccgaggaggaacttcaccaatcctttcctggaaccaagccaaggaaagcagaagagaagaagcagtaacgccaatctgtctgaccattttactggat

SEQ ID NO: 257397 - DNA, 177 bp, Gossypium hirsutum
cccacgcgtccgtaaaattaagtgttaaagatgctgctgatcatgggattcatctgggtttggtttgaagtttgaagtttgaagaaggatgatgtacaaattttctggattttctccctggagggcttttccggttttatttttataaaaagtagccttttaatttctcaaattaaa

SEQ ID NO: 257398 - DNA, 220 bp, Gossypium hirsutum
atttcctcaaggaatgagggttgatgtataggcattttatattaatacaattttgatacgtatatttgtgccgtattgtgttttagttattttataatttctctccttgaattttgcatcggtttctattaaatgatagtggacaataattagtaaatatacatttttatacttgaatttcgcttcatggttcatgttagtacttaaggtttttttttgt

SEQ ID NO: 257399 - DNA, 442 bp, Gossypium hirsutum
cccacgcgtccgggttaccataatctcactggcttcccttggtggataactattgtaacttccaccatggctatgagatttgcattgtttcccgtagtagttattcatcttcaaaagctgaaaaagattggagagttagctcctaaatgtatgtttcttttatcattatttaaagtcataacatcgcttgcttggagtatgaattagtcaagaactcaagatagtagggttcggctttatgtatgccgatcttgcattgctcgagtaattaatctagccgaggtctggtttttttgtattggacctagtggcttgtgttgtgagttagatatggtttatacttttccttcaacatcttctaatattatacacatacttagtaaaatataaaaattgttttcataattatacactttatttgatttgagtttaaatttattat

SEQ ID NO: 257400 - DNA, 448 bp, Gossypium hirsutum
cccacgcgttcgcagggtttaaatccttttaatgctgatgatacccaagcatctgcagcaggaactggcattggttcctcaacccatagcacacctattcagctctcttcatctgcatcatctccatcctttggattgggtgggaatgcaaccttctcctctggcacttcaatttttgggtcatcagcatcagtggctaaaccttttagttcaggtgcaagttttggaacaagttcttcctcttcagaaactaactctctgagctctagcagtggcattgctgctggcgcatttggttccaattggcaagcccccaagacactcacatttgggttatcatcgggattttcctttggatcatcaacttctgttagtgctcctagcagcgcacctactatctttgggtcatccaccggtgcctcctcaagttccatattttcattcactt

SEQ ID NO: 257401 - DNA, 140 bp, Gossypium hirsutum
ttttcgttcttgtatttttgttgaaccattttcatctacttgataaatgttattgagtttttagggattgaaatgatttgaattgcaaagagattgtttcttgctatctttgtggaataattagcacacaatgttttagg

SEQ ID NO: 257402 - DNA, 330 bp, Gossypium hirsutum
cccacgcgtccgcttattttcccttttcctcttcaatttttctcaatggatgatcttcccccatctcttgtcgttgatatcctcagtcgtctcactgattctgccgacgttgctcggcgccgagtcgcctccaaaacactcaactctctcactcgcgaggtccgttcccttaacctcctctgcaccttgtctcgctacctcaaatcccgctcgccggagaccaaggaccacgttactcctttcaaggcaatctttaataaccttgtcggccaggctccctgtcttaactcaatctcaattggagtcgataaatcgctcaggaatatctcg

SEQ ID NO: 257403 - DNA, 434 bp, Gossypium hirsutum
gaaaaactaaaaatattgtcctttggctgggtcaggaatattattattttaaaatagaacaattaatttttgtaatggtttctgcatagctaagtcaagtgaagcactaaaaaaacaacaaaattttgttttaccctatcatttattattcattccaaggttctaaccattaattcctgctattggaaataccggcatattgaatctatgtatggattttgcttttctctggcctgtaaattaaaggactaaaaagtttatgaatggaagtgagaatcaatattatagatgttattgtccagccggcaatgccttgctgctgtttatatctaatattaaaggactagaaagtttacttggcactggtgaaggaactgcattggtcctctgatactgacctacgcatgaatatcctaatatattgctatttggac

SEQ ID NO: 257404 - DNA, 470 bp, Gossypium hirsutum
aaagaaaagatccacacacacccatcaaaggatcaaaagttgcagagataagagaaacaaatactggagcttttttcatcttttgtctctcatcaaaagaaaagaaaatccttcctttcttattttcttttgtcttccttaaagctcataaaccaagttgagctgcttctggtttggagaatggtgtaaagaacaagtcttgcatggcgaaccatagagttggagagacaggtttgacagactcgggaccttcttccaatcaccaccaccaccaccataatattccttatgctgttcttcatggaatgaatgtcccccaaagttttatgcatcaacaagggcctgcttttgattttggagagcttgaagaagcaattgtgctgcaaggagttaaaattagaaacgatgaagctaaaccacctttattcacagcaggcagaccagcagctaccctggagatgttcccttct

SEQ ID NO: 257405 - DNA, 384 bp, Gossypium hirsutum
cccacgcgtccgggggggtagcatgcatgcatgctccttaaccatgagcagtcaatcatgcttgttgatgagcctgttcggataattgattggctaaagagacttgctttgatatctacattgcgctctatgtctgttccgtgtttgaattgtgtaatactactggagttagaagcactgcggatcggactggaactgatttgttctgtagatgggtataaacatatttgctatagttttcatactctgtcagccatggtgcaagagattcttggaaaatattctacctggtgttgatgccattagttggtaaggaaaaattgacttgtcttttttcacttcaaatcactgttatgatcatttcttgttgtatttgttgttgac

SEQ ID NO: 257406 - DNA, 378 bp, Gossypium hirsutum
acatattccacctccagtcatgcctcctcctgcaatgcagtacaggccacctctgccaaacatgccaccacccccacccccacaatcagtatctggtctttcaaggcctccgccaccaatgggaatgggagcaccacatggttggccgcaacagcaaatgggtggaaggcctcctatgctccaaatgtcaatgccaccccctcccccaccaccttctgcaagttgaattatcccaactactgtttttcttcgttcagcaaatgtagtgcatttttatttctagcggtaatagaaatgataaatgtggatcgtactctattgatgtattaatatccgaaaattagactcctaaatttaatcgttcgttcaatgattggt

SEQ ID NO: 257407 - DNA, 467 bp, Gossypium hirsutum
agcatatcttgttcactttctctctagaaactatactttctttcccggatggatgtactaggcgttcaccaaatgaaaaacaagaagaagcagtttaagaggagagattgtaagaaagttattaaagtggtttatatttcaagtcccatgaaggtcaagacatgtgcctcacaattccgagctttagtgcaagaactcaccgggaaagactctaatgccgccgtccgcttcatggacaatgacgacaacgtttctgatcattctcctgcctattccgattcaacgggggttgaacgtgttcttgaattgcctttagcaaataccaatcaccaatctatgtttgaatcatacgatgaggggagtttctgggcgatgtttacatctaatttgtttcatgatccttctcagcttgacacttttagaagctttggatcaacttaaatttttttttaaatatctatatgtat

SEQ ID NO: 257408 - DNA, 135 bp, Gossypium hirsutum
  unsure (1)..(135): unsure at all n locations
tctgaattacgctcagagtcctgtttagcatgtcttgaaacaacttatgtgcttatttttctcgcaaacttaattttcaaggaaccattattgtagtcagtttggttcaataaaagtaaaaaacagagttcangc

SEQ ID NO: 257409 - DNA, 364 bp, Gossypium hirsutum
attgggttttatcggaccccgatttcaaccacaccgatgaaacgctttcgtttttcgtcgattatttcggtcgaagaaaagatttcaaagctgcccacgatctccttgtcaatcacaagtctgttgccgggcctaaaactcttaactcctccattgataggctggttcgtgctggcaggccaactcaagttctggggtttttcgagagaatggagaaggattatggtttcaaaagaagataaagaatcactgaagttggcagtggagaaattgtgtgaaaatggctacgcgagttatgctgagaaattggtgaaagactcagccaacgagatattcccggacgagatgatatgtgacttattga

SEQ ID NO: 257410 - DNA, 387 bp, Gossypium hirsutum
cgcagctcctctccctctatgccatttcagactcctttcactccgataacgacaaaacggagaggtctcccgacgaccctcacgatagtaagtcctcctttgcttatccttttcgttttgtttattattattttttaaaaggagaaagaaaagaagaagatagcaaaataataataaaaaaccagtaaaatcaaagaaaaatcgaaaaaaaaataaaatcaccttttgaaaaatattctttgtattctcaatattctctctgttttcgaatatattttacaccgaaaaaaatccctcccccccccttgttacagactttcatcagctttatatagccgattaaaactaaaaatctggaaaaaaaaatcaaaaaccccacttctttct

SEQ ID NO: 257411 - DNA, 401 bp, Gossypium hirsutum
gtgacagatcaaagggtatgaagaagtacactgctatagataaatggaacacgcagcttagatccctgtatcaagccgtcagcaacagggtttcctgagattgcaagtaaatggttatatgatatatctgatttcatcgttcattgaggccataataatatgcattctcaattctcatattaggtgatttagataagcaattcggaaaaagaaaatggtgtacctagaatcggatgttatatgtttggttagccaaagttgtagttttgttgaatgagccaaaagaagaaaacatatttgcctggttgcaagaattttgattgagtttgacagtcgtaatgtgaacaatagaatatggattctctgcattaagtgcatattaaatgtggaatgttgatggc

SEQ ID NO: 257412 - DNA, 393 bp, Gossypium hirsutum
gtgaagggcaagggtcttttgatttatcatgaattcgtaagacagagacctgtgtatactctcgacacaatctggtcaattttttcacctgcgattgtttgatgtttcaaagcggctcgttattttttgctcaagctatggctactcatcgctgctcttccatattttttcgcattggcaaggtgaaatggggactgcaacacaagcacatccgaggatttttgtgacgcgttgttgcatgcagttccaagagttttgtatataaatagaaattatatttgaatatatatattgcataaatggtggaaggaaaatgaataaatgaggaaattcgatacaattttgtttttgttccgttagaagaaaaaaaataaaagggtgtacattccattt

SEQ ID NO: 257413 - DNA, 362 bp, Gossypium hirsutum
ttcaaaagcaaaagctaaagcaagaagataataaagagaggaattcaaggttgaaggagggtttctctttttctatttctttttctttttaaaatctgtgtggagaaactggagttagggaagatgatgcagactgagcagcagcctcagcaccaaaatcagttaacggttcaaaactctgggagtctcagctttagcagtcatttgtctaaggaagatgaggagatctcaaattcggcgctttctactttcagagccaaagaagaggagattgccaggaagaagatggaggttagagaaaacgttcgcttgggctgggccattgggcacattacactctcgtatacactcacacattattg

SEQ ID NO: 257414 - DNA, 199 bp, Gossypium hirsutum
ctcttatatgggtagctactgcaggttccgagaacgggggtcaactgggtcatgagttcagaggacttgcccttcgccttgcaaatcatggcgaattgacacgggtgagtggtttagaaaataacttgatttccctcggattgggacgtgaagcggcattttcagctgctgatttaggagacaatgctcttatggagaa

SEQ ID NO: 257415 - DNA, 449 bp, Gossypium hirsutum
cccactcgttcgcccacgcgtccgatccatggcggctaaccgcttcaactcccatctgggtttagctctagcctatctaatcttcctcatttcaatccccaaatctctatcagtccttgagcctcagcctgctcctccctctgtctgggatatccttcctaaattcggtctccccagtgggcttctaccaagcactgtcaccgattacgtcctccacgatgatgggaggttcatcgtcacgctggacagcccttgctacattcaattcgagtacttggtctactacgaaacgaccatcactggatcactgggttatggctccattaccgattcggaaggcattcaggtgcagcggatcttcttgtggttcgatgtgaatgagatcaaggtcgatttgccaccctccgactccatatatttccaagttggattcatcaacaaaaagctag

SEQ ID NO: 257416 - DNA, 116 bp, Gossypium hirsutum
atgcttctgcgcggatgaaaacagcccggatgcgtgagactgcttcaagacaggaagtgcgtcttgctcagcagccagccaaatccactttgccttccccacctgcaggctcacct

SEQ ID NO: 257417 - DNA, 379 bp, Gossypium hirsutum
gtcgccgccgagcagagtctctaacccgttcatacaggatgctcgattcggggagcagaagattatgccatcggcgccaccttcatcgggcttgtactcatcttctccctcgtcgtcatcgaggaaaggaagctatgttagggcgaatcttggtagcaaaccagcggtgagagtggaggggtttgattgcctcgacagggatcgtcagaattgtagcatctctgcactggcgtagaccccattgcaatcctgaaaacagtaaatagataagcctaaaaaaggtgcttaaatatatatcacgtttaaaatagagtagcataaaatgacaggagccctttgtcattgtgtaaatatgttcggtagggttcctgatctctat

SEQ ID NO: 257418 - DNA, 493 bp, Gossypium hirsutum
cagccataaggtgcatcatcatcatcatcaacaaggtgtgcttttgaatgaaggaagtggttataacattagttgtggagtgattcaagatgtttggtgtggacctggaattgggttttcagctgatgctgttggctctgtggatcgtgttgctacaaggagaaatgtgcctgctagagggaagattgatgttgaaaagccttcgtatatagcaaggctgactgtaaattccgaaacactctcatttcttgattctgattcagccttcatctcatcgcgtcctgaacctgatttcttcggatctagatactatcgccatgctcgacatccttctacagaggggcttgctgagatagtgatgctgcagaacatctttctagtgggcggaagattagattcacgtgatcgatttagcgactggaggctagatattgatagcatgtcatatgagcaattactggagctcggtgagaaaatcggtcatgttaacact

SEQ ID NO: 257419 - DNA, 398 bp, Gossypium hirsutum
cccactcgtccgcccacgcgtccgcgtatacatggcttacatcatttggccttctacatagcggagtcatagtgtatgtgcacatgcgaaatcattaaaataacatcctgatgtatgagcatttaattgcttagtgttgctattggtgacatgctcatgcctctagttaactttttttagatgaagatgcttggtttcctttctatcttaattaatggaagcttgcttttaattttattttttgagtataatttcaattttcagacataattaaaagaaatgtatcaaagttatttactgtatgtaatgatgtttcaaagatgggaccatagcgacatatttgtgctttgtacatcaatggctattatttttgacttggctttattttgaattgcaca

SEQ ID NO: 257420 - DNA, 186 bp, Gossypium hirsutum
cccacgcgtccggaaacaatgaattacgcaccattgtgtaatgtgtgaacttaagcattgctaagaataaagagctaagaagaactttaaaagatcatagctatttaatttgagttccacaaaaggatttgataattttgcccttcaaaactaaaaaaaaaaaaaaagggggggccgtttgggggg

SEQ ID NO: 257421 - DNA, 330 bp, Gossypium hirsutum
ccctctcgtccgcttcatcaacatggtctaccttctggtaaatattggggtttgcaacaagtccaagttttggaagtttacgtcaggtagaaggtattgctgctctcacagctcgtcgaagtgggctgcatcctagtacctcgatatttggctaggggcatcaattcctgttttagcacatgtggtggcagccaatgcaaatcatgtcttaaccactaggggcattaagaagactactagtgtgctattgggtttaggttgaagacagtgaacttgctgatgctgctactgttagtgctgggaacaacaatgaaatatgaaatatgatag

SEQ ID NO: 257422 - DNA, 106 bp, Gossypium hirsutum
ggtctgatgaatatcccaattcctgtattatttgctgaattggtaactaagggcttgtaatgtttatattgctatctgtgaatcaaactttgaagatttcaacatc

SEQ ID NO: 257423 - DNA, 337 bp, Gossypium hirsutum
aaaccatgaaatatgattggtttggagaacccttctttccccttgttttagggtgggttgatttactaggatgtgactgttagtatgagattttctctatgtgcatgttcccaggaactcgagtatatgtctgccatagtgttcttattatatatacatagcttgtcatcaattattttatggcttgtgtgattgtagttattttttaattacttgccaattcttacagttgattctttttttaaaaaaaaaaaacaaaaataaaaaaaaaaaaaaaaaaaaaaaaaaaaaaaaaaaaaaaaaaaaaaaaaataaataaaaaaaaaaaacagaaaaa

SEQ ID NO: 257424 - DNA, 445 bp, Gossypium hirsutum
cttcttcctcttttcttcttccttcttcttcttcaaagtctagcctccaccaccgcttgcgccgccgctacctcctccgacgccggtactctttcttttcttctcctctttctcttttcttctcttttcttcttttttccttcatctcttcatcatcagtcacctctatccctaacaacaacaacaacactccttcaaacgacgtcgttaatctccctgtttaggtcatggatcgcgtattgtttctagggtttcgaattttttgtctttagttctttttagtactttgaattttgatgtaagcttttttctggttgtttgactcttttttttcttagtttggatgtctatgaaattctcaccgctaaataattttatcggaggaatgtgaatctccggtatgttgttcgctaagattggtaaatcttaactgaaattcattcga

SEQ ID NO: 257425 - DNA, 421 bp, Gossypium hirsutum
gcgccctaatcctccccctttattcgaatctcaaaaggccctagccgccattagaccaccccgaacggcgatcgacgaagggagattcgttcactcactaacccggcttgggtcctaagccctaaagacctccgatttcaggcttcaatccctgtctcaacttcgattaaagcgaaggagatgaattccggcggttcgtttgtataggtaaacccctttgcttcccttcaccctttttatgctcgaaataacagtatgtggcatcgaaaaataagaaaagaaaaggaaaacagacaggaaaggagagccaatgccgaataatcacctttctttgctttttctttgtattcaatatgtgaactcgatatctgtgttgtctattgcgcataaaaaattacaatgaataaagactctggcttta

SEQ ID NO: 257426 - DNA, 421 bp, Gossypium hirsutum
gcgccctctcgtgcgcccacgcgtgcgcccacgcgtgggcccacgcgtgcgcccacgcgtcctcggacgcgtgggtgacgagccaatgactccaggtcagtgcaacatgattgtggaaaggcttggtgattatctcatagaccagggtctttgatcactttggtgtaaccttaattgttgcaattcttcctggcttcttctatacaaaagtgcatctaccaccacctcttgtaatggttggctgcaattaaataatagtattactagtattaaagtcgtgtggaaccttttccagaaacaataggcttggtgtttgtaatagtgataatgcttgtgatccttttgctttgtttctgtgcttgcttgatggatggtattgtcaagattgtggagtgaggtactttgtctaaattttacaatg

SEQ ID NO: 257427 - DNA, 230 bp, Gossypium hirsutum
aataagggaggctttggggttgaaggtacatggtttatgcttacaagtgctaacagaaatgaattgttctgcattttaatgcttgcttatatttaaagcctattattgtactacgagtagtgtaataaaaggtcatctcaagaagctattcaaacgaaatatggtttatttgaagagaaggattcactgtgtttatcaagtttgataatcatagaactgacatttaaacc

SEQ ID NO: 257428 - DNA, 362 bp, Gossypium hirsutum
tgttattcggctttgctttttcctgatttatagactaccaagcttgcctatatagtgaagaagaggaatttcagcatgtagctggatcgataagtgttctggtctgcatttggtgaaaaagcttatggcaattagagccttttgactatatttggcagaccaataagtttaagaatacaaattccagcgtcttgccccaaaggagaagatgacgacaatatatggataatatttggtacatgatcaagggatcggtgcctgcttaatgttatatatgctaattttagaacatgaattagaaaggttccgtggtgttgtgaccctgtatgtctatacatatatgtgttagtatataaaagcat

SEQ ID NO: 257429 - DNA, 316 bp, Gossypium hirsutum
gcgcccacgcgtccgcagacgcgtgggacagtgcatgggggagtgggttcttaaacaggactacatccataccagaaagattcttcttacgaggcaatctatctacagtacgggctttaaggggggccaaaagcatcatggggatttaagacaagggcaacgagttcctatgaacctaaaagtcagattgatgatgagatcgctagggaaaatccggtggttaaagcggccaagataattaaagtctgatatatattttttttatgaaatcctattaaaatcatattattcggaaacatttttcgacccggaattc

SEQ ID NO: 257430 - DNA, 362 bp, Gossypium hirsutum
gtaaagccttagagggtttgcatggggtgcaagtgtttgctcattcacaatctgcattagaggagattaaccaacaaggggatttccaatccagtcatgataaatcattcattacagcaaatcaaccactattgatgcaggtatggcaacagagaccagcttgtttaaggcctgtaagatgttgtatgcaagaatcttgtggagacagttgccaatgtgttgacatcactcccctttattgctcttgggatccaggcccctaggagaaattttaatactaagctgtatgctaattcacttattggagttggagttgcctctactttgtatcattcttctagaggaaagctgaggaaatactt

SEQ ID NO: 257431 - DNA, 437 bp, Gossypium hirsutum
gagtctttttataagcaagtccttgactgcaagcgagggttctgcatcaactccggctgccagtactatgggagaattgtccaatgatcataaaaatgggaagagacgcaattcttttagttcaacaagacctgagaacattgatgaggagccaagggatagtaacagtagcaatcctctttcgcgtgtcatgcaagccacagaagctgcaagagctaaagttaatacaaataactcaccaggatcaagtgcagatgtgcaagatagagacatttatatcaagaagagacattccttaccaggtgcaaatgggaggcagggttctgcaagaatccatcgatccttatctcgagcccagcagggtgcaaaaagaaatggtaccaatcctactcaggagagaagatggcaaaggtgaaggcttatctggagtaccacgg

SEQ ID NO: 257432 - DNA, 296 bp, Gossypium hirsutum
tccatctgcgtacgtccacgcgtccgggtttatgtgtattttggtttgcgtgattaatttcaaaccccaaagctatgatctctttgtttccaattcaattttaccagattatctctgctagaaaaaaaaatcttaggacacccttttttctgggtttttttttcttatcaattctcatggaagccatgtatcttgcatttcatcatcatttcttgagttattcttgtcacctatatgcttgcaagcgaacgatgttcatcacttttcttattatcccccgatctttcaagaaaaac

SEQ ID NO: 257433 - DNA, 445 bp, Gossypium hirsutum
agaaatgtaaggaaatattagaaattaatttaagaaggcatacattgattgttttttataagtatgctattgattttatttttccttacaacatgttttttcattggtcaaatttcattaaaccttggtttgaaagttcaattaattttatgagtttatctagatttgtaaaggttaaaaatagtaattatgttgcattagataggtttattaaagcattttatatatttgctcttccaacaaaattttctatctttacctttaatggtgaattttaacataatcttaactttcttgatttttataattatgtgaaatttttgactcatcgttagaaattcttatggatgaccatatatattcaaagaaagttacaggttattttttacttgaatgctcatgtgcctaatatttctttgtttaatgttgatgaattgtttttgaa

SEQ ID NO: 257434 - DNA, 399 bp, Gossypium hirsutum
cccacgcgtccggaccctttttttttttcttaggggtatgctttaagcaatgcctctgaagcgtcaccatttccatcaactgctgtaaacaccctggcaggtctcaatgaaatcaaggctttttactgaaatgtttatagttgtttgcatgtgaatatcatcatcatcatcacaatggttttggtgaattgaaacatgggaaatgaaatggggaacaacaacacttctgggtttcaagaagaaaataacacagttgacgataaatctgtacaagaatttgatcatgcagatggtttgaaaggacaaaatcaagtagttcaagcaattctagatactgattctcaaacagcaaataaagaagaaggcgagaaaactcaggaagatgctgctcgaacagat

SEQ ID NO: 257435 - DNA, 370 bp, Gossypium hirsutum
ctgatatatatcccgagatcaagttcaaaagaatgttggtcttcatataacgatcaccgcggaagatgtatatggtggacacttgaatagatgccccgagtccaaattggatatgttggcccaaaaaggttgtgtaacagacgagccttatgaaaatgatattggatatcatgaggatttctctggcttggagaagcaacattgtttctttgggggatgttctgatggtttgaactcttcccaaacagaagaggatatagatatggagttacaaagaagatcgaaagaagcagaggatagagttttgcttctttccgaagctcttgggcaggaaacctttcttcgtgatgttgggtttaatgtttcgtct

SEQ ID NO: 257436 - DNA, 303 bp, Gossypium hirsutum
gtatattaggagtatattggcctggttcaagattggtgctttctcacacaagtcattggggacttgatgtggcaaatcgattgtaaacctctgaggaaactctatttcattgggattacagcggtcagacttctccctcatttatacgactatataagagctccagttcccaatccttactttgcagaggagtacgagtttgtaaatccgacattggacttcttctcaaattttggggatgttgccattcccatcacagcaggtttgcttgcagcagtcatctattgtcagcaaaggtggaac

SEQ ID NO: 257437 - DNA, 345 bp, Gossypium hirsutum
atcattttttccttcattctgaaattcgatgaagacgctgtcagtttcctgatgaaatccaagaatctgcaagtgtttgcggaggatgaagatttcctatctgctgcttttcctaatgaatagtgtttaaggtatgagctatagtatgaatcatagtatggtgttcagttgtgtgtattaaaacatagcttatgaaacatatgctggtgcgtgaactttaatattttgatgcatctgtaagaactggtttggatgaatgtctacatgcatgtatatgtatgaatggtttcttatgatctgtttttttaaaaaaaaaagaaaacaaaaaaaaaaaacaaccaatag

SEQ ID NO: 257438 - DNA, 442 bp, Gossypium hirsutum
ccttctcgtccgcccacgcgtccgcccacgcgtccgaaggagacatatctccttgtgtctagcttagatgtacatcccatttattgtcacggtataatatctctcactggttgtcttcagtgatcaggatacagtcttaacttttgggtgtctgtttattatccggaaaatgagaaatgaggttgtgtttcgagccggccaaccgtcatcaattaatttcattagagaggcacagaattactctgataccgtcagggaggccttggaagccatatcttacaatggtagatgatgaatattgaacaaaggatctatacccaattagttgacgagtaaaaattagttggtccacagcgtttcatctcttgcagcataaacttccctttgtagttttttttatttattttgtaaattttttggtattttaaatgtcccttttact

SEQ ID NO: 257439 - DNA, 440 bp, Gossypium hirsutum
gtgacttttattctttggattcctattcgtgctattgatgataagctagcaagggggtgatcttcaggggccccgcagaaacaaagtatcgtggatggaatgcggacagtagctttgaaacttgagtttggaatatcaaacaaccagatctatgaccaaacaatagctttgcatttcaccaaccctttccatgtgagcacacgtgttgcagatcaatgcaatgacggtactttgcttttgcaggtaacactgcactcccaggtgaaggccacattgactgtcaatgatgcttggcttgatcttcaagacggatttgttcacgctggacaagatgatggaagaccagtttccggctttttccctctcgtcatatctccaacttcaagagcaggactcctattccgtgtatgtttggggaatggaacagctctagatgaaaa

SEQ ID NO: 257440 - DNA, 469 bp, Gossypium hirsutum
attttatttgaccttgtggaacagtgttcattccagaagcaactaaagatgcatcgggggatgagtactagggatgagaaggtggtttctcgagcaattgaattgaatgagcaactccagaatgttcttatcagacatgatgctcttctctctgggaggacaactgtttctagtaggccggcatcaactcttaatcatttcaaccatgaagaagaggaagaggagcctgagcaactttttagaaggatacgaaaagggaaagcatgtgcaagaccggaagatgaagagtgctctatagaacagccacacttgggtttgtatggatcaaacattctgggagaaaaagaacggctaaaccgtccacttattcgaccattgccctcagaaccatcatatgaaaacaatgcacatccttcagctgttgcaattcctccccctcctgcataacacatcgagagagaaagatact

SEQ ID NO: 257441 - DNA, 521 bp, Gossypium hirsutum
tcttattcccacggttccactgttaatctttcttcactttcatacctttcacattatcccctccaaaacgctttttacaaaggaaaccccaaaaatatacctatcaccaaaaagtgaaatccaattctcctccaaagcaaagcaaaaacagggacttagtgagtgagtgatgggttcccagaactttcttcaagttgttgccaagaactttgatgttcttgctctgtatgtctctctttttaacaaagattctttcatttgtgctactttgtgtgttcttttttcttcttaactgagctttgctttttttgttctggttttacaggcctttagtcactcttgtttaccctctgtaagtagggttttttccccctttcttttgaaccaccttaaaaccattgattatggtttacatgttctaaacgcttccaaggtttgtcgtgtttttttcgtttttggcagatacgcttcaatcaaggctatagaaacgaggtctaacaacgatgatcaacaatggctga

SEQ ID NO: 257442 - DNA, 532 bp, Gossypium hirsutum
ctacatttggaatttattccctcaatgatttaagcttagacaatattactcaatagaactgtgtcttaatttttataaattacaggaatgaaatttatagttaaatgtgtaataattacataatcaaaatgcttgaactatattaatattattctattaatattttttttggtgaagatattttattttaatgattggattatgatatttgtatatattggttgaatattgaaggttgtcatctttccggtatggtttggtaatttatttggaaagctttatacactaccttttcaatggccctcatttagcctcagacactcaaaacacacctccatgtatgtgttttttttttaaattttttaattaattaaaatttagggtttaaggtttatgttacatttttatgtacaaataattttttttatgacagcatcatacactacctcattgatggtaacaggtacattttggtttctaattgaattttaaatattaaaatgttaagtatcatttaaaaataatatatata

SEQ ID NO: 257443 - DNA, 229 bp, Gossypium hirsutum
cctattcgtccgcccacgcgtccgcccacgcgtgcgcggacgcgtgggtctagtatgttgcatagctatcagcaggttatgcttatgattgatgatattcacgatttacatccctgttttttagatgaggtcaataaaaagatgcacttggaccgtcatgccttgataatggtatagtccaaatctgtcaattatacagttacgatgatccattggggcatctctgcat

SEQ ID NO: 257444 - DNA, 434 bp, Gossypium hirsutum
acgagttctggacgtgtgtgtttagttcagtctgggggttgggtgtttgagaaaaatccgggaggaatttaggaggcggatctctcttctgcaattgggagctcttcgttgcgaatttgatggataccaataactggatgtctactcctcccagtggagagcccaccatggacacaggtgattggagaacccagttgctgccagtttcacgacagagaatcgtcaataaggtaatggatacactgaagaggcaccttccattttctggtcaagagggtttaaatgaactcaggaaaatagctgtaaggtttgaggaaaagatttttactgcagcaaccagccagtctgactacctaaagagaatatctttgaagatgcttacaatggagaacaggtctcagagtactgtacccaagacaaggaataaaagcata

SEQ ID NO: 257445 - DNA, 482 bp, Gossypium hirsutum
aaacgtctttctctgtggccattgccatatgtatgggggtcgctatcaaatatttattggtagttgcattatttattctcattcctcattctggccaatttcagcgctggtcagatttcggcttgtgtgccgagtgctgatttctccctgctgatttattaattggttgtcggacacgccaccaattgcatacctctaaccgtaccttaccggtatcgctcgaatttgattatcttccgagtggcccaacactggactctcactgtctcactccttgcagctaccattaccatcgccattagcaccattagagcacattaccggccattagagatgtaacctgcatgtaagcaagtcatgtatacatagccatacttcacatttcactccatgctcattgtctcatctgtgctatacaccttatacacaaattattcttattctatattcgcattgaatacatccatgtcacaatcaatata

SEQ ID NO: 257446 - DNA, 117 bp, Gossypium hirsutum
aaaacatacacaaaatggatagccgattcaacttaaaagctaccttgtaaaactagatggaggtctacacaatgtcaatatcattgtcctcatcatcctcacaagccacaacaacat

SEQ ID NO: 257447 - DNA, 310 bp, Gossypium hirsutum
agtcttgaaggtaaaaagcgggtcttcttaaactctctctgggggtgaatccaatcaaatcgaagatgttgagagtggcaacgaggcggctcacttcttattcgtctgcgtggaggtcgcaccaggccacctccgctatcgcctctcgtcctttcatcgacggcgccgattcttctgattgtctcagatccaattcctcctcctcctcctcttccttttccttctctttcgcttctcaattccttcttcccaccagaggttttgcttctgagtcactcaccccaaaaagtgaccacagtgtgattcctga

SEQ ID NO: 257448 - DNA, 481 bp, Gossypium hirsutum
ttcacataatgctctccattttagagtagtctttcttatacaagacatctggggggattcaacttcaacacaacaaagagaggaaagccatggcctcttcacatggtgtgtatggcgcggtgctgctgacatggcgaggccgctcgtgaggtgtgacgcgaaggcttccagaagtttcactgtttggggctgctgtggtgcttgcggcgcatggagactgcagaaacccttagggtttctgaaagaatttagacattgggcctttttaggttaattttgtttgggccaaaggtttatttttgggcttttattgggtgttgggttttgtactaggctattataatttggggttaatgagtttttgaaatttgggctgtaaatggactgctaaagtttggactttttatttttattttaatttattattgggttattctctgttaacgggcccgggcgaaatgggcctattacaatattttta

SEQ ID NO: 257449 - DNA, 474 bp, Gossypium hirsutum
gagttttgctggtttaattactgcaatgtgcacatttagaaggaccggtgatgcaatagagttagtgaagcaaatggtgcaaaaagctagattgacaccaaggcagggaacagtgaaaaaagttgtggcaactttgcgggcaaatagagagatatggaaagctgttgagttgattgaattcttggagaggaaaggtatccctgttggctttgagagctatgagctagttgttgaaggatgcttggaatgttgtgaatatgttttggctggaaaggtagttgtagcaatgactgagaggggctttataccatatattagggtccggcaaaaggttgttgagggcttagttagagtcaatgagttgaaacttgcctatttagtaagggaaagattttcagaattggggtcttaggctcttcgctgcttttagctcggcatgagtcacctaagtgaagaaaatcagtcattgtcgtg

SEQ ID NO: 257450 - DNA, 428 bp, Gossypium hirsutum
aaaaatttgtagatttagcaatgagatgtgttgaagaagcaagaactgataggcctacaatgggtgaagtagtgaaagagattgaaaacattatgcaggtagccggtttgaatccgtatgcggaatcagcttcgagttcggctacttatgaagatgcaaataagggaactcctcaacatccgtacggtaataaaatttaaaggtattcattaaatgaaccggatttgatttgggttgaaccgattgagtgaggacttaaaagcctacaagatagaggcctttggaatttggatgtcatttctattactagtttgatttgctttctaggagcaatgaactttgtaacaatgagaggtgcttgagttgattgtgggatcttctatttttattttgttgcatattatatgataaaattgtaatataaaatt

SEQ ID NO: 257451 - DNA, 292 bp, Gossypium hirsutum
ccacgcgtccgcccacgcgtccgcccacgcgtccggtccagtagctaatgatctttcagctgctaaagatcctatggtgataattagtattattttgtattttgtatttgggctatgactatttgaccaaaactgtcatggcctccatgttgttgctgaatttcaattttagttattttggttgggatttatcagtaataaattatgtgaatagatattgtggaattcaaaaaaaaaaaaaaaaaaaaaaaaaaaaaaaaaaaaaaaaaaaaaaaaaaaaaaaaaagggcgg

SEQ ID NO: 257452 - DNA, 260 bp, Gossypium hirsutum
gtgaggcaccttctccttctccggacgccggtgccggtttctccgtgggcgtttccaccgctgctgttgggttttctttggttgtgtctcttcttgctttgttgaaagcttaaatttatgggatttttttttgggggggttttttgtaccattgatttattattgggttttgtttttaatttcattctttgttacttcgtgggattgattgtaatgaagttgattcattgaatattataattatatttttttatggtgtt

SEQ ID NO: 257453 - DNA, 401 bp, Gossypium hirsutum
ttcttttgcttgcgcggctgggcttagtttaagcggagagggtgtgcaggattaaagggtcaccattgtttccaacatgatgcttaataacaagtttttgttcttatcagctttgttttgcattgctgtagctggcgctttaggccaagctcctcctactcctagtaatcctccgacatccacgccggtgccgccgaccccacccgcttccacacctccgcctactacccaaccacctccaacacccaccaccagcttctcctccaccggctactcctcccccagctaccccacctcccgcaactcccccaccggcttctccaccgcaggctaccccaccacctgcttctccccctcctgctactcctcctccagctaccccaccaccagctcctttggct

SEQ ID NO: 257454 - DNA, 368 bp, Gossypium hirsutum
ttttcgaggagcatagtaggagtgaaggatgttagggaccctaacactactaccgtgaagaagattaatggagaatatgaccacaagagtcaagcaaatgtttatgacgataatcatgataatgatgatggttctgttaagggaactgaattaccaactgattaatggcttttaagtttgtagttaagatgatgtgatcatggatagctttcattatataaaaaaattatgaaagaatgatgattagatttcgtagtataaataagcttagtttcctttcattttgcttgtaaaaaatattaatctctaggcatgtagttcgatgtataccatacttaatttagttgatgaaatctttataaataatt

SEQ ID NO: 257455 - DNA, 471 bp, Gossypium hirsutum
caatcttgaagtagcccatcatcatatcatacggtggaaaacaaaagtaaggcatccagttactgcagctttggtcatctaccggttagtctaataatacactactctaagatacgatacatatgcctttggttctgctgtaatggatctcttgtagtactgcaacaagttgtttcaagagtgcaaatgtagacacccgaggttgggtttgtactcaccctcagggaggctacatgattgatacaaataggataggggagccctgaaagttagaactgggatttgatgcgagtttcaacaggttttaatcttatataaatcttttgcaaaaaaatcgtttctcatcatttttaacaggcttcaacttgagcaatcaggaatttgctagtttaaacgcaatcatgatggcagtactacaagtgaatgcatctctgttctgtttctgaatatatgtatgtaaagcttatggta

SEQ ID NO: 257456 - DNA, 443 bp, Gossypium hirsutum
ctctgtttcatctgcgtaaattgttccaaaaggggtcaacaaaaatgggttatttgaattgcattgctttagcattcttgatggctttgtcgtttccaagcattaaggttggccaagctactcgtcaccttcagcagctgcctccaatgccaactttgcctacagcaacactcccaccatttccatctatccctaatatcccacagccaaccataccaacaatgccaaggcctggggcgcttccaccacttcctaccatgcctgctttgccctcattgccaagtgtaccaagggccacactgccacctctgccgagcatgccctcaatcccaactgctattccctctattcctttcctctctccaccaccttgtgcttctccttctactccttgaatacccctttgttttttatctgctgcataatggatttggtttaatatg

SEQ ID NO: 257457 - DNA, 252 bp, Gossypium hirsutum
ttcatgcgtgcggtagacacagttgttgatgtgggtgatgaagatgctgatgcaggtgctgtggcaacagctgctggaggcggtgaaggaaccgctgtcaagggctcctttaatgctgcggatctgagatcacacttgatgtcacagtacatgtcagcccaaatgtcaccgattcagcccttgcgtatgctagatcccacaagttatccaaatcgatcccacgtgctattagacaaggtcccagttgaagtc

SEQ ID NO: 257458 - DNA, 442 bp, Gossypium hirsutum
ctttctcgtacgaaactctactgtatgactatggatggattttcatcataataacaaagatgtatgaagaaaaataaactagtttgttgttaccttttggtagcttaatttttccattttgaaagtccgattgtcacagcaggtaatttaatggaattaatacaggttggaatggttggtgcgaaaatgctgcaattgctgctgcacctgaggtgctatcttattacattttccatgtcagctacacaaagttcccgatgcagatactgtacaaactaacaaccttcggtcaactcttgtttcttgtctttattttctgcctttcctgtagctgctagtactgctgacccattccgttgatagaattttcacaactgcataagacaaaaaaagaaaaaaaaacatttgtgacatgattcttcaaacatgtcattacttttga

SEQ ID NO: 257459 - DNA, 358 bp, Gossypium hirsutum
cattatggtggtgccactggaaacaatgagaatgatgcttccggacatcctgtgggacaaaatgcatatgaagatagttatggtattcaccagagacatggtgctctaccacctgctgctactggtgcaaatgcaggtgccgcttctgtttacggtggaactcagtctgggtctggacctgcatctatgaggtccacctacgagatgtctagagggcctgcctatgatttgtcaagagtgagtggttatgaatcacaaagggtgcctgcttacaatgcacagaaaggacccagttatgacggtcaaagaacccatgtctatgatgcacaaagaggagctggctatgacactcaaagag

SEQ ID NO: 257460 - DNA, 129 bp, Gossypium hirsutum
ttctcgggcggccgttcgccccacgcgtccggtcatgtactaattttaggttttggactgcaatgatttggtttgtaaaaggatactaaaatgggctgtttgtgttttaaactttttgtttattgattt

SEQ ID NO: 257461 - DNA, 343 bp, Gossypium hirsutum
agtttctatactcatcattattaaatctttgtgcttaccaaaagttttttcacctataaaataggttgatgttgtggaacacttccacgcatatgtaataatagtgccagaaagatgttgtggtaattccctaaaattccatcaaactcattttccgaatctcgtgagattttgaagtaaagggggattcagttacgtccatcatgagatattacctcctttctttcaagtcttttttttaaatacagtgtaccactattgatgagctgaatgctggaaaaatatgtgttaaatgtagttcaaaaaaaaaaaaaaaaaataaaataaacaaaaatttaacacc

SEQ ID NO: 257462 - DNA, 417 bp, Gossypium hirsutum
tcttcacgcgtccgcccacgcgtccgcctcgtatgaaatttcaaattccctctcacgctcaccattttgttctctcaaaatttgaaaccctgtttctaaaattccaatcattcctttcgaaatatattattttccttcatggaatatgagatgaacagtgcggcagtggcgtcgacggtgtatgtgagcatctcttctccaatggcaccatttccaccctttccatattgtgcacatcttttcgtacttgtctagggatctgaacttcgttgagcaacaagtagcattggttggaaagagggttataacaactttctatgagagaattgaaggacttgaatcatttgaaagaaatcaagtattttgtttttttggctcaggtggtagatgacaattcaagggacgtgttttaatgat

SEQ ID NO: 257463 - DNA, 178 bp, Gossypium hirsutum
tttacgcgtccgcccacgcgtccgaagttgttgtggcagccatggcagatgtgaccttaaatcactccctagcttgtatatagcatatatgtatcctgaggttgggaaaactcatttaaaaatgtaaattaaatatggattttcgtctcttttcactctctcaagaagtgaagggatg

SEQ ID NO: 257464 - DNA, 328 bp, Gossypium hirsutum
tgtagtcaaacaactaagaaataaaagtgttgcacttgtgaaagtgttgtggctaaagcatggggtagaagagactacatgggaacctgaagaaactatgagaaaccaatacccacacctgtttaccgttttggacaagccagctcaggagtcgggatacgtcgaaggctcagtcacactatccggaagacttttggtaaatggcttgtaaatttaagtatggcatgtatagcaatatacctattttgtgtaaatgatcttatggtatggttgtggaatggttgaggaaatgcttgataatgataaattatgaaaatggttagtgtcc

SEQ ID NO: 257465 - DNA, 199 bp, Gossypium hirsutum
cctattcgtgcgtcttgtacagtttcctgtacagtaagctgtttcttttcaattcccttagttatatactttcttttttacctttggtttgagtactcgattatttgagtttctattaaggggtcccttcccctctcttgccttgttgactgatttttttttctaatgcattaagtgtgtgaccaaagtcgttccaggt

SEQ ID NO: 257466 - DNA, 355 bp, Gossypium hirsutum
aaataaccggaagctgggagttaacttcaaaatttgaagggagaaaaatggctatgtacatccgtgtgaagcgtagcaagacaacatactttatccagtgtgatccaactgaaactaccctagacattaagcaaaagttgcataccctcattgatcaacctgttaatgatcagcgtttgatccttatgagtaatggggatatattagaggattcaaaaactttggcagaccagaaggttgaaaatgatgctgttgtggcactgaccttgagaaaagatgacaacgagttcgaggatgtcaacatagtaaaaccaaacgatttctaccaatctcgtgacacagatagtggaaattg

SEQ ID NO: 257467 - DNA, 365 bp, Gossypium hirsutum
tgctaattctcagactcactgagtcaatctcttctttctcctgttgtttcaaggttagagattccctcttcttcttccttttgtttatttcatctgattataaatcttactttaatttgttgaacacactattttgattcgtaaatatattgtgattcttctttctttcttttttttttcaagtaaatgacggatcgatgatgaaaaacgtgagcaaattgctgtttcatttaccttttttttggagtttttttttcagtgatgctaataaatttaagctaatccgtcatgatcttagattagaattagttctatgttcttctttgagtctgttatattttatttatcctttcatgcatttcttc

SEQ ID NO: 257468 - DNA, 261 bp, Gossypium hirsutum
ttcacgcgtccgcccacgcgtccgggcgatcgtggctgcggcgcaaagaaggcttctagtgcttagggtttgctgaaaaatgttttaggtttggggtattttggggctgtttgggttaattgtttttgtaattttggattttcttatgtggaattatttgggtcttatttattgggctggaattaagtagcccgagctaaaattgggtattacaaatataatggtgcataaatttacacaccaatgtttttagttttcttt

SEQ ID NO: 257469 - DNA, 200 bp, Gossypium hirsutum
ccttcgtttccgaggaggccatgtgaagaaccactcgtgggagccctagctctctggcctattctggcacgttccagaagcttccagtgctgctgagaattttttgggtgtttgggcctttgggttagggatcttgctttgggcttttatttttgtaaaaaacttggactttttaattaattgattttgcttttgttttt

SEQ ID NO: 257470 - DNA, 353 bp, Gossypium hirsutum
tcctcacgcgtccggattgacagttcaattatgaaacgggttaatgacatattacagcgggctaagttacctactgctcctcctgaaaccatgactgtggaaatgttcaaatctgtcatggcggttgataagaaggtggctgatgggctactaaggcttatccttctgaaaggtcctctgggaaattgtgttttcactggcgagtatgatagaaaggccctggatgatacactttctgcattttgcaagtcttaaatccagattttatttgttgatctgttttaagctttacttgcacaattgttcttccatatccttggatggtttatctcaatggtcatgctaatactttt

SEQ ID NO: 257471 - DNA, 301 bp, Gossypium hirsutum
ccttttcgtccgatcaacaatggctcaactcaaaatcatcaacaatttccaaaattcatacatgggcatgatagtatatagagcaacgatcacaaaaacgtagaaattatcaaaaatcaagtcaaaaccataccttaattaagcttggaagtagccgaatatcaaaacacaagaaccctagcctttctttctttaattttggcaaaatgagatgaaaataatatgaactgatggcttttgttttattaatataaccttataatcaatttccaattttaaccatgctaaaccatttaaaaat

SEQ ID NO: 257472 - DNA, 302 bp, Gossypium hirsutum
tgttataatccagcggtggcgaaggcttcgatgatggcggtgacggtcccggccttgactgcattgatggcctcgattcggggaactagacagacactccccaaagcttccagaatcctttacggcgcgaggaaaaaaaagagaattaggaagaaaccctaaggtttgatgtgtgtttggggctcattgggcctgttaagaatttgggccatgactgtattggtgtattgggtcactgtaacgtgctatggggttattgggtttgatttaggctaacgggatgttgggttattttttttggg

SEQ ID NO: 257473 - DNA, 382 bp, Gossypium hirsutum
ccttcgcttccgatcccggaactttgtggtcacgggaagggccaacacaagtggcgaggggtgcgcaaaagtatttcattcggttgaactccatgaacaaagataggaggcgatctagcatccacgatatcaccagcgttggcaatgcagatatttcagcacctcaagggccaatcactggtcaaacaaatggtgctgctgctggaggttcatccggaaaatcagccaaacagccccctcaacatcctgctgcactggctggtgtaggtgtgtatggtgctccaactatggggcagccgataggaggcggccccctcgtctcagcagttggcacaccagttaatcttcctgcccaggcacatatggcttatggagtgagagc

SEQ ID NO: 257474 - DNA, 327 bp, Gossypium hirsutum
tttatttacataccttgtagaccggaccaaagccacgatgaccgaggcgattaagttgggagaaataattagtagcaatctggagagcacggagttcgaagaaaaggccctgagtgtcggatccggcgtcggaatcgtcttctccggcggatccacctcgagcggctttgaagcgtttggcgatgcaagcagaaagtttagccaagaatcccatgaagaaatgggtgggcccaatggaatagccaaggtcgtagtccaggtagaggtgtacggcagagaaaagtgagcatgaagaagaagaagaagaagacagacgaaaagggaagt

SEQ ID NO: 257475 - DNA, 426 bp, Gossypium hirsutum
tatgtaatcctacattctaatccttcatccagacgcaatccttttgttttttttttgagttagaaaaagcaaaaacggaatgaccttttctgtcttgttttggagctttaatatgtgataggatttaatatttgattatttcaaaaggtaaaaatattttttatataaaatttcatagttacattattaattgatatatatatataatcgattttgatatacgagactcaagaaattgtattgtatttcatttaattcctttttacgtgttatgatgattttaattaattacacaaagatggggtttaacggggatgatgaattcagggtctagatccaaagacaacagccagtttatttgctaaagcccaatgcttaggcgagaaacgaataggcgacgaggattgcttcgtcctaaaagtatgc

SEQ ID NO: 257476 - DNA, 443 bp, Gossypium hirsutum
ttgcttttccctattgctttggatctttgctcgggtacccttaattatgtgctgctgcatcataacatgtgttctttatttcttggacacaacaactagtttcacacgccaacttcatcgccgctcattcaaagaggaaacgctgaaaactggttatctggaataattggtcaattatcgcaagtgattttgaagcttttaatattttttctagaaacttttttgtgtgcatgtgattatgaccttggtgacttatcctagagaattcctatattaagatcaatttccttgttaatctagaatttcgcttggtgggttcttattcttaccaccatttgtacttacagttgttagtttatggatatgggagcttcatgttgttttgaagagaacaagtttaatgtgtattcacatgtttataaataattaccaggcattgcatt

SEQ ID NO: 257477 - DNA, 325 bp, Gossypium hirsutum
tgtgctatgtctcgtcctcatgtttattgtccatcgagacgcatgtggcgggccaccaccaccaggcggaggctggtgtagctgccgatgcgcctcagttgaatctacaacaccttcccaaacgggaactacttgagattgatcactggcattgtagttgcttcagaaagcgatccatttaggagcgctgtataataaatgaaaaggatagcctctttttcctttcattttgagagtgtttgcttggttttttctgttcttttcgggtttatcaaatctggaataatttcattcaatccatgatgtttgattcgattttcaaaaa

SEQ ID NO: 257478 - DNA, 394 bp, Gossypium hirsutum
ccctctcgtccgcccacgcgtccggttctgaaggggggccctgttgtaatcatgtgggtctgaaaatattccaactcgaattaaccagtgcttagaagaaggtgctcaaatgttcatgctgaagcccttgaaacagtcggatgttaagcaattgaaacgccatttgatgaaatacagaagctgaaatttacccttttttgaggacaaactttagccattaccaaaaaatgtatgagaaacatttattctaataaaaaatattttttcagatgcaatttcttgttctgtttttaatccagagttcagctatcttcggaaagagaatattcattgtaccgagtaaagacttcgtttgtactaagttttatttaaatgtttatatatgatatagttt

SEQ ID NO: 257479 - DNA, 488 bp, Gossypium hirsutum
  unsure (1)..(488): unsure at all n locations
ctgtatttgcggcaaccacaggaggcagcaggggggtgggattttcagccatctgaggggtattagtagtgtcgtcctcgtgctcttcgtctatataccgtaaacttcgccttatttctctacgatttctatgagctatactttcaatttcactgtcaaatagtagaggtcttgacggatttcttctagtcataaactataaaaaacctatcaaaagcaaataaaagaaatattagtaattaaaaaaattgcaataaaaataaaaatggctaaagtaataaaaattaagcgttcctaatatcttagtctccggaaacggcgcaaaaacttgattgtcactaaactaactaaaaaaaactagactaaggcaagcgcacctatcgaacagtagtatagttatggtgagaccgaanatatcgtatctacaaggactaaaagtactagtaattactatctttntattatctagcctaagaattaaagggatg

SEQ ID NO: 257480 - DNA, 149 bp, Gossypium hirsutum
tttcacaatgattgtcgcatgcattttgccatttttgtatttgctgcttttgtgtgtaatgacctacttgcttttatgttcgagtgaaaaaataaattaactcattgtactcttaaataaaattggttattaagttatcaatgagtttt

SEQ ID NO: 257481 - DNA, 493 bp, Gossypium hirsutum
ttcctcgcgtccgcccacgcgtccgatcgtgaccagcctgttgaaggtcacatgcagccaaacatgaagagttcccgtttcgaagaaatgagcgaggctatcaagttcttagtgagccaaaagcttattaataggaaccaacttactgaaggtggggaactccaagcctcaaaagaagctatgcatgcacttcaaattttgagtttaaatgaggaactgtttttgaaacttctacgagatccaaactcatcattggtcaaaaattctaagaactcgccaaatgctcgagatgaggagtctaagcccttttccagatccaacttttcagagcaagagcctgttggtttaagacaactgaatgagactgttaatagaaaacagcgtaatttctttagaagaaagtccaagtctctggaaagagacttatcagatgaacagaaggtttccgaagcttcaactaaaattgtagttttgaagcctggaccgacatgct

SEQ ID NO: 257482 - DNA, 486 bp, Gossypium hirsutum
ttattttaggctgtgttttaagattacccccaaaaatgtgtggaggtgcatttgggtccgatttcgtcgccgcgaaacatgacccgaaattgaccggcgatgacctttggtctgaaattgacatattctccgacctcctaggattcgacaacaatggctaaagctttgtcaatcatcatgtttcatagcaacaacaggatgctgatcaatccaaaagacaatcatcttaacaaagagagaatcgagacgattcataagacatgccgtgtcactaaaaatgttgaaaagactcagcgaactcggaaaaacttttaccgaggaatctagacaacaagggccgggaccagcaaggataaagaataaaggtgtacgaagcatcgacatgtttacagtttcgcacatcacacttagggtaagcaaactgatcatagacaagacctcatccaaatatacaattggcttttgagacagttcaaactcatttac

SEQ ID NO: 257483 - DNA, 485 bp, Gossypium hirsutum
gtcttcttcaagatctcggaacaggtcccatgcgcaggagaagaagagcacagggggggatcaagggatgtggactatgggaagaagagacgcctaccatcagagtgacaaactatgctgtgcatgcttctttacactttcttatgagacctttaattaagttttcactctcagtatctcttcccttggttgttatatcatttcagcattctctgtgatgattgttggtccaggtgccaaacgtcgcttcttaaagggagaagtaagtgctacttgcgtgggtggtggggaagaatagacttccctttttgtttcttactgcactctaaagagccactattagatgaaaaacttggtattcctatgttggaacttggaaaaacatagtattttattcaatgtggatattctttgtggggttggaatcctaacatcctacatctgaatatcaacattgggtttataattatctgcaaaacactata

SEQ ID NO: 257484 - DNA, 178 bp, Gossypium hirsutum
tccttcgcgtccgattatgtttagtgttccaggagggtttatataaataaccttggtggaaggactgattggttcagttggtgaaagacgctatcttgtgaatggcatgaattgattgagactcacttatttctcatcaaatgaatcaaagatttgtatatgcaaaaaaaataactac

SEQ ID NO: 257485 - DNA, 481 bp, Gossypium hirsutum
ctttgatggtcagaaaatggggcctttctgtttggtccggtgtgccgatcgtacggggaggttgattatagatgatgcattaagaacaacgaaacccgttattgccaaggtccgggaatttgtacaagagttaaatgcatccttagatatctcagaggatttcattcaattagcaacagcttataaagaaggtagttggcaatttccgcttgatgcttcagcacggtggagtggcagttaccaaatgcttgatattgttcagaaggccgggaagtcgatggatgccgttgtaaggaagaacgaagagatgttgggtaatcggatgttgctgaatactgcagagaagaatgttgtcaatattgttcacaattacttggagcctttctacaaagtcattagtgagatatgtgtaaacaccccacctacgatcgggatggttattgtctacatggatcacatttcggatacaatcacaacacga

SEQ ID NO: 257486 - DNA, 416 bp, Gossypium hirsutum
cccacgcgtccgcccacgcgtccgcccaggcgtccggcagcaacaacctccagtagcacagatgtatcctcaagttcatgtgccccattatgctaaccttatgccatatcgtcagtttgtctccccgatttatctgccacaaatggctatgccaggttattccagtaaccctgcttttccacatccatcaaatggtagcagctacttgctcatgccaggaggtagcactcatcttggtgcaaatggtgttaagtatgggattcagcagttcaaaccagtccctgcaggcaatcctactgggtttggcaattttaccagtccgtctgggtatgcaatcaatgctcctggtgtagatgggagtgcaacaggtcttgaagattcatctcggaccaaatataaagatggcaacatatatg

SEQ ID NO: 257487 - DNA, 436 bp, Gossypium hirsutum
gacaaatctaacagatgtagaaactgctgaacccctatccaaactttgtcttgaatttccagacctttacattggctgtttccgcagatctagacaaggacctctcgtaattagctttgagggcaaggatccatctagagttcaggcaggtgttgaagcattgtgcaagaagttcaatgcaggggcattctctgaagtcaactagacaaatacctgctgttctttcttttgcttgataagcttcgaaagctgataagcttctttgactgctgcgactgtcacaccgagtttcagagtataagtggtagattagcgccttcggatagctgagaagggagaaggaaaggtgaagatgacataaggatttattatgtattggggtatatgatcatatgaacattaatactaccagctgtcacaatgaaagtgaacttac

SEQ ID NO: 257488 - DNA, 330 bp, Gossypium hirsutum
cccacgcgtccgccgacattaaatttatttaacaagttgaaatttggtgccccacttgtatgaaaggacacggtttgttctgctgcactgttagacatagacattccaagaagctgagccttgttttcatttcctaacgggggtaacaagtttgtttagttaaaatgattaaaacgatagtatctcgggtgaacatgctattcttttgtgttcattacttggcccttgtagttaaaggtagatagataatgattatgtaaagaagctgttgttctcagttgttgatggataaaggaattggaagaacttgactgccttgtggttttgaac

SEQ ID NO: 257489 - DNA, 271 bp, Gossypium hirsutum
cccacgcgtccgggaactttgaaaaaagtgtggagccttttaaattacatggttgatcattaatttccataactttacctcttgttattgaatcaaactgtactttataatgattatggcaaaatcactttactttgaatttgttagggaatgtattgggtaacaaaatcccaaaatagttactatttaggatcaaaacataaaccccccactgtttaagtggtcaattgattatggtgtacaagaatataacatttccacttttttcttt

SEQ ID NO: 257490 - DNA, 411 bp, Gossypium hirsutum
cccacgcgtacgcccacgcgtccgcccacgcgtccgcaaaaccctaattttaactccgcctcagatatccccgtctccacaggcatggctaccaagcagccaaatactggcctctttgtaggactgaacaagggccatgttgtaacaaagaaggagttggtggcatctgatgcggcgctaaaggccctagctgttagggttttgcttaggtgatttgggccattgggtttagtgggttttgggccatattaggccattttaatggactatttgatttattttgattttgggtgttttgctggtatgggcccgggcaaaaatgggctcttacaacttaaatgttaagttatcttggtataacttttttctacatgctttaatatactatgataatggtgtacgtattttttt

SEQ ID NO: 257491 - DNA, 320 bp, Gossypium hirsutum
ctcaagctccggttgaaatcagggtcaacggtttcgatttcctctcaacaaaaacgaagcttcaaatccagatttctcagttttctcgagaaaatccgtcttcgccgtgagaggaaagggctaacgatccaacactcagatgttaaatcagtactgaatcgagtgaagcagttcgctgacagggtatttgaagtttttgctttgtcttatttttggtcaaactgtggttttaatcccattagtatactcaattttaagatttagtccctataatttgacataatttggctctactgattttcttttttatttggaaaaat

SEQ ID NO: 257492 - DNA, 430 bp, Gossypium hirsutum
cccacgcgtccgataaatcaaagatttggaagctcaccgaaatcagtgaatcttctcagtgtcgatccttgaggcttcctgaaaacttaagggtgaccaagatatcaagattaatcttcacaaattccggtaatgctatcctggcgttagcatcaaatgctattcacttgctttggaaatggcagcgaagtgatcgtaattcaaatggcaaggcgactgccagtgtatcacctcagttgtggcaaccatcaagtggcattcttatgacaaacgatgttgctgatacaaatccagaagaggctgttccttgttttgctttatctaagaatgattcttatgtaatgtcagcatctggaggaaagatttccttgtttaatatgatgacatttaagacaatggcaactttcatgccaccgccacctgccgcgac

SEQ ID NO: 257493 - DNA, 459 bp, Gossypium hirsutum
tcattccgagttgagtcccggatttttaccatgcaggatgttttggatctgttttctttttcaggtctgaaaatgcgttaatcgaaccatcaatggtgatttctggggatggtagtagtaggtccaaatcgactatgtgggggtggttgttggtgggaattggatcacttgtattgctcggatttctcttcaccgctttcatctcccatcttcttccgccctcaaattatactctgattgctgccatccaaaatgacaggtattactgcttcttggtacccttaacacttcctgtacttgtggttgctgtatatttccattggcttagcatgaaattattcaggcatgcatgacttctgtagcatcaaccaatgtattcaataaacaaagaaatgatatttggaaatgagaggaaaactgaattagctgctttgtagtggctattttgaacatatgatt

SEQ ID NO: 257494 - DNA, 458 bp, Gossypium hirsutum
tgtttccctgaaattttagaatggttccaagtgtgggaaaagcattatttttgtttttaacatgattgaagttaagaatcagagtacacctgttactctagagttatataatggaagtacaatttgcttatgatacagagtataaacatctatggacaaggttaaatcatgaattgatataatttcaattgatttttttccttctgtatgttcaagtttatgcaattaccgcttgtcaaatggtatcagttcccattcttttcaagcaatatgagtaattttaaggtttgatagtaataaattctgaggtatcagacttttttgtttgtggttaaagtggactgccaagttgttgatgccattcttctgttatactttgttgactcggtcaccatgttatataacattgttgcagctctgcagagacattatgcagtattgcaggctctagctttagc

SEQ ID NO: 257495 - DNA, 456 bp, Gossypium hirsutum
taattgagaaggctatggaagatcgattaatggggggctttattataacccttttggttttagcattaactgtggtcgttggctttctctttttccctcttggttttcagaaaacgcagacaccaaaaatagatagtaaaaaaaagtactttgcactttgaatttgataattgagagtcgtgaattctcctttttttacttgggttctttcactatcaaatcaaatcttaccctaaatgaggctaacacctgacacttaaaattacaaaactgtgttttttcttttcaaaagaaaaaacaatccaaattcaatgcatttgtacataaatgaaaactgagagacaagtggatgaataaacatcgttcaactttactctctttttaattcatgtttcccgcataaaatgacaaaaaagttaccgcttgaaatatgggcattatattgttgcaaatact

SEQ ID NO: 257496 - DNA, 297 bp, Gossypium hirsutum
ttctctttctggctagggcttcatatacccagggtcgacttcgatcgactgttgctttaccaccgcattcagtggccggcgatgcgccaaaatgggcctttagcctcgtcttgaaacaccctagagaaaccagccctcaaaacccgaaaaaaaagagttgaatagagatggttctcaaccccttcggggttcgattttgacaacggaggtggaccctccggcgttgcaaccgtggggaaccggtgagtctcttcttctccctttttgtttatgtttctatttaaaatcgtttttgat

SEQ ID NO: 257497 - DNA, 456 bp, Gossypium hirsutum
ttggtaatggacgggccgaatcggaaccacgggtgcgattaggtcttggaggagctgcaatcagatgcgaaggaaatggcagagaagattctagaatatagagctactattccagatcagcttaagacgactctcgattcaattctttccgctcaaagacccgatttgcccggcattgatgatgggtcggatcctggaccttcagcacaaaataatgcagattcaaaagagatgaaatcagatgacgaacaaagggcggaagagaagatacgatcacttaaaggcaaaatttcgagtaacatttcagcaatgccggttgttttgaaacggatgaaagtttgcatttccaggattgagaagctagagtcttgcaatggcattatacaccctgctttgaaaaagagaaaattagttgatccaatgaagctttattttcataattgacgaaatctagat

SEQ ID NO: 257498 - DNA, 99 bp, Gossypium hirsutum
ttggttgagcttagcttagcatctcacttcaggtctgctgttatactgggttttctttataaatagatgaaatgaacagcgtagttgtaatggtttatt

SEQ ID NO: 257499 - DNA, 465 bp, Gossypium hirsutum
ttcctcgcgtccggaagaagacaaggaatttgtcaagatctgcatgagttccataaagaaaggagacaaagggatggatctgctccaagaaatcctgcaacatctccgagatctgagagccgtcgaactccgaacaaggaccttgtgtggtgatgtgcaagggtgatcttaggcttgccatgcataaaaggaatcacctggacctagtaatttcatatatattcaagcgtctatagggaatatctccagattgatggggagattccttatcttccttccttttgggcttacaagaatgatgcaagttcccaaaataggaaggatctcctatttatctgccttatttacaaccaaaaaagaaagagtggaaaatgaaggaaaacataccatttacctgggttgttcatgtaaggtaagtacctagtaacatgtttttcttatttggttagatttcatttactcttt

SEQ ID NO: 257500 - DNA, 448 bp, Gossypium hirsutum
cccacgcttccggccttcatgataattcaagattacgtgggttccctacgattactctagacctcaccggctcaccgtcctcctcctcgtcgttgaattatttcaacaggttccctaccaactgcccggcaacacccagatttccttcgacaaatctcaacttttcttcaccactagtatccaatgaatcattcacccaagaaaactacttttaccaacaatcattgacagacacgttaaccaaggcaatcacatcagaccctagtttcagatcattgatatctgctgccatttcatcattggttggccatagcagtgcaaagcatggagatggaaccgatcaaaaaggtgatagttttagtcagaatttgatgcaggcggccattaattctcaaagtttaaatgattcatcattacgtgggtcaagctacttcaaaggatttgaatc

SEQ ID NO: 257501 - DNA, 241 bp, Gossypium hirsutum
gcttagttccttcatgtcaaggactacaaatattaagaaattttgcttgtggtctaatatgtgatgtctagcagagtaaattccggtattgatattagggttctagtgtttttttcttcttcttttgagtttctgccgttgctcatcgactttagtctgtggaatcagacaaattacaaataaggtttgggagcctttgtgctcgttgagtaaaaaaaaaaaaataaaaaaacaaaacaag

SEQ ID NO: 257502 - DNA, 453 bp, Gossypium hirsutum
tcggtgatgcaagttcgtccacagcagcgggatcaggtcatgtttaaatcgctcttggttcacaagaccattcttcaaaggctaacatcagggaggagcataaaaaggaatctaaaatggatcaagcccaatcaccaagttctgactcaggaattgatgctggtctcaaccgtggtataaccgcggaggaaatttcttcagaatctagttatcaagatgtgccttatagagaaggttcttcaccagaatcagataaacagctgttgtggtatgatacagatatggatgaacatgataagatcaagatgcttttcttggactcgtaagatcaagttctccctgcctttttctttcttctttgcgagctcagagtttggtaggagcaaaatgataatctatccttcccctcccccttatttttctgtttctttctttatctacaaaagaagtgat

SEQ ID NO: 257503 - DNA, 385 bp, Gossypium hirsutum
ccctctcttccgcccacgcgtccgggttgtttggaggtgtagtaaattaattcctttttcttcttggcttttctttgttgtttctggttgagttttagctttttctttttattggtattctttatggtcacagggctttggtgtgaggtttgcatttttgcattttttaaatttattttttatttatttttaatttggttttccaaaatgattaaaaaattagaacaaatattgggagcttgaaaatgccagacaattttaggtgtattttgtatttaacttttgaggatgaaaagtttgtacagctgagtgtaagaactaagaactagttcattttgccttttgttttggataataaaagtgtgatcttctatttttcttcttc

SEQ ID NO: 257504 - DNA, 374 bp, Gossypium hirsutum
gcatatgttctctcgccgtctttgttcagaacaactgctaccaaatccttggttctcagaactttcaacttccaaatgatatttgaaaatcaagggtttaaccaaatcgattcatacagtcggtggtgtccgatagatttaggactcgaatcctggtatttacacccctttctcttgtgcctagattaaagcatcttttgtataaaaaagatcttgaattattgtgatatgagtacaaatttttaggcaattttcatatataggatgtgttctggtttgggattgaattgttttcttatttcctgcttttatggtttaggatatggagattggagagagacatttgcattctaaataaattaaatttcaaaaag

SEQ ID NO: 257505 - DNA, 386 bp, Gossypium hirsutum
cccacgcgttcggtgagtgtatgtgtgtgtgaaagcttagtgaggtgaaagccgagctgtcattttgcatgttgtgagaaaaagggtatggcctgaagagctggagtgatccaacaaagattcctctgccagatgcataacattagtttattcagacaattagaactaggaagcccttttttttttgtcataatcaatggaaagaaagggtaaataaccctattttccttctggtcttttgcatcatattatcacctggtttgggtctactttttatttaggagggcaaagttgagttacatgtatactacatgcatccatctgtaagtatataaagtgattgttttgtattgctgtttatactgttttaagagctgtgctttact

SEQ ID NO: 257506 - DNA, 303 bp, Gossypium hirsutum
  unsure (1)..(303): unsure at all n locations
aaatggggttttagaagggcacatagcgaattggaaagggaaacatgggaatactttcgtacacgaagaacagcaatgaaagaagaaggcactcaaataatcagtgtcattagcagccaattggatgctttaacgggctcatctttgggaaaacgtgtttttaagcttccaaaacctctgcattacaattctcaaaccccaacactttgacgttagatctggcgtcttttttttttttcttctgcttacagtttctggaaattttcaattaaacaacatggacgattggagactttcgggntt

SEQ ID NO: 257507 - DNA, 447 bp, Gossypium hirsutum
tttggaaattaatttgcttatcacttagacttcagtcttcatacaccagcttttctggaatattgtctcgggttgtaaagccttctgaataactcagggactagagcacttattaacaaactctggacttggaagcttgttaatctcatcttaagcttggttgcactatacgagtatgattgcaatttttggttttattggtaataagtttgtacatcctactatagtgaatataactttatggatgacggttttgggaagatcaaggtgattccagatcattttcaagtctcaactcctcccagtgaggattctcttcaaaacagaagttcacctgattcacaaccaagtactggaaattcttcgaggtcccgtagcagtttatggtctcggcgaaaattgagaagggctgcattcatgttgaatctgttcagtttacgtgggttg

SEQ ID NO: 257508 - DNA, 450 bp, Gossypium hirsutum
atcctgagtttcatgggaaaaaatagatgttagttttcagagcagtagacagagatttgctgctcatagtgttatacaggttctctctctttctggagttgataaaagtttatacgatcatatatgcagtcggaagttcttactaagcgaagttttgcaggttaaagatgaagttatgcatatagaaggtgcagatgtcatccaacatatgattgaccattttcttacgtgaaaccttatggtgtttgagatacacatcatacgagcaaagaagattaattcgctacctcaccgtatttgtcgactgctaagttattgctcgaattcccattggttaaagttgaatgatggatcagtactcacattggttggtaaagatggctatgacaagggcaattaagtcagcagttcattcattaattatctctagtttgcttcctaagaaggatg

SEQ ID NO: 257509 - DNA, 261 bp, Gossypium hirsutum
tcctcgcgtccggtaatccacgagaatctcggtcgatcactgatgtctgcgcgctgatggagccaacgccggattctggcgtgtcttgcgcgtcgatggtggcgtgatatatgatggcagagtcgagaaatcacggcatacttggtggtgacgattgagatgaaaggccacgtcgtttgaagtgcccgaagcttctagaaattccttgcagcacgaggagagggctagggtttctaaccctagccgaatgcttctaaattt

SEQ ID NO: 257510 - DNA, 415 bp, Gossypium hirsutum
cttttgtctgctctactgcaacttcagggagataaggcttgggttgataacttcgatctgtcccactacaacttcaggtggatatgatttatagccttaatctgttctactgcaacttcagagagattaggtttgttttgatctgctctactgcaacttcagagggataagatctgtttgtccacagcttcagtctgttccactgcaacttcagggagacaagattcgctgtattcgatctgttccactgcaattttagagatacaagatctgtaattttcagcctattaccctactgcttagggggttaaggcttggtggcttgaatctgcttcactgcaacttcaggaaggcaagatctgtaatttccagcctattaccctactgcttaggggtttaggcttggtggcttaaa

SEQ ID NO: 257511 - DNA, 351 bp, Gossypium hirsutum
gcattcctcttgatctttcttcttccatggggaatccagtaaatttggaggactctagaggaaacatctcccaagtcagtctaaataataatgtcattcagaatattgattacacaacaaagcaacaatggggagatagcagacatgattacaacggcaatatgaataattcattcagccgaggagactccctggtccctgcaagtggacctatgatggaccaaagcaatctcatcagtgataaaatgaatgatgtttctttgttcagccaatttagtggtgacagtacttatgttgttccacaccttgatggtgagaaatcagctttcgacacaaaaccaagatccaatg

SEQ ID NO: 257512 - DNA, 399 bp, Gossypium hirsutum
tggtgagatagtctatgcaatgtgatatgagggaagagagcttctctgcaatggtgcagttgttccaggcaatcaaaagtgtgaagacatatagctgcaaagaatttatggtagagttgcgcaatactggtctgaaattgtcatggtccattgagtccattatgttcatagcatgaagcttttatacaaatctgtggaagaaattgatatttaatactactttacaagggatgatccacagggataaaaggttcaatgtcggatgatcatctcccaaacttccacatcccggtaaccatcgttgaacccggttcatttgtattttggcattgctcgtgtactttttgcttggttctgttttatgcagttgaatatatataatatatggctacttaatat

SEQ ID NO: 257513 - DNA, 364 bp, Gossypium hirsutum
  unsure (1)..(364): unsure at all n locations
gaaatcaaatcccttctccctttttctcaaagggngggtcattgagatctttggccctcggcgtacaaccgtcatggcaggtggccggagtcgcgaaacgggcttttcagccctcgcttcacggtgtccctgaaggcttggccttctcgaccgtgggaatgagagaaaaaaggagaaagagacctctacctatccaactccggtgacggcgaagacaagttccgacaccgactcccgaagcaagcaggtgattgacatgcgccggtgatgggtcagtggcggtgatagacgcgcagcggcccggagaccaagggtctgaagcgagtggcggcagaagaccatcggtctggagctagtgcggcgc

SEQ ID NO: 257514 - DNA, 246 bp, Gossypium hirsutum
tttaagatgtctcgagaccttagtgctcttcaagaggaggactattaattgatgatcgttgttcagattgaaagatccagaattgagaaagtgcaaaaagaggctgaagtcgtaagaaacgacttaagagatcttcatctggaaaataagaagttaagaggcacaataaaaaatagtgggctgggaaagtcgtcgacagactggaaagaagaaattagcaacattcaaggcgggatggaattttgg

SEQ ID NO: 257515 - DNA, 167 bp, Gossypium hirsutum
atttctgccaaaataatcccatggaacatcatcaacagcaaggtacatatagtggagatgaagacccaaataattctcaatgatgtggctagtaggcaaaaactgtaattcccatagttgagatgcttttgaatttttttttcccttcaagaaaatacatttagttt

SEQ ID NO: 257516 - DNA, 361 bp, Gossypium hirsutum
tccattcgtccgcccacgcgtccgttcaacgggaaggtttttttcaagtagattcatcccccaaaaacggattcagaaaattcatgcacggctagcatcctgacatacacctcgtaacagaaaatacagtcgatgtaataatactcgggaagaacgcggttcatatttgttcaagatgtgcaataaaatagtggttagaaaaatgttatcatgtagttaggacaagttgaagatttaaactagttagatccctctcttttctactggcaaaaagttcaattgtaaacccaaaaaacataaattttgtttcatctctttaatggcagcttttttttaataggctttgatgccatgttgccat

SEQ ID NO: 257517 - DNA, 412 bp, Gossypium hirsutum
ttctttcgtccgttccacttgctttcccgctccgagtgccacatttgaatttagggtttaggtttttatccagcgctttccaaatacagccactccaattgaatttagggtttaggatctctggggttttcacaatgatgtacggtgatccgcaacagcagcagaaccagccgcacccgcaagctggggagtttcagagaggtcctccgcctccgcaaatgatgcggcagccatctgcttcttccactactcttaactcagagtaccaccaccctggtgctcctcctcctcagatgccgtcttatgacgctcatggtgacaattttgctgcgaaaagaatgagaaagctgacccaaaggagagctgttgattatactagtactgttgtgcgatatatgcagattcaaatgtc

SEQ ID NO: 257518 - DNA, 438 bp, Gossypium hirsutum
ctagttactacagcagaaggtgataactctcctgatgctgtaaatgatgagaagaatgaggaaggttatataggtgaagagactgttgccgaaggatctgaaaagtcgaatgatggtaatgagcagagtgtagtggagacggatccaatgcctgaagccgctgccgctgccgctgccgctgccgctggcactaatgagagtggcacaacaagtggtacacctgagggtgaggtctcaaaaaaacgtaggtagttcaagcggtgcagcagcagcagaagcagaggatgtgaagcagatgtctcccataagtgggactgggagcgggagtggaggtagtgcaacctcaacgttggtaaatcttcaagagagagccagggaaagagcaatgttaagacaggcaggagtactgggttctactacttcaggtagaggtcgtgg

SEQ ID NO: 257519 - DNA, 463 bp, Gossypium hirsutum
  unsure (1)..(463): unsure at all n locations
aaacttaacccgtagacaacattcttgttacattgggactttttttcctgccaattcttacttgatctcaaagtttaggtactctcattagcaggaattggtctttagctgtaaaggtgatggtgttaatttccattttccatcatcattaattcactttgtaaagaaagaatttagacttaaaatgaaaaaaaaaattgtagactaatggtctgtgacataacagaggtaatgagttactcaaaaattacaaatcaagtactttgtctaacagatcatctgggaagaagggaagggaatgaaggcttagatttagagaatttaggaagtgtaggttcggtcaattgggtcagatgatgtggcatagaatgtctctttctttttttcttttgtactgtatttaccttgatgtgccatactntgagtgatggaactatgaaaagctttttggattaaacatgat

SEQ ID NO: 257520 - DNA, 443 bp, Gossypium hirsutum
cccatgcgttcgcaaacctgctaccaaatcaagttccgaggtcccatttccgagtgagcactgagcatgaagcattcataagtcatcaaattttggccaccgcacaagcatgaagcaggagagaggcatggagtttccaaaggtatacagtaatagcagagctgtagaatcatcagaaaaaggagaggcgtttggggtaatactgagcaggagccgttcggtttcgaatgcgtcgaccgtagccctcagaactgagaaacagagctcggcacttgagacggcggtgagaagggcattctccatgaggagatccagatccacctcctcctcttcttgtgtttccaagggcaggagaggatattacaaaatattccattatttcgatgatcctcacccttttgctctcactgaatttcataatgttgcaatccaacccagaaaaa

SEQ ID NO: 257521 - DNA, 337 bp, Gossypium hirsutum
cccattcgttcgggcggagaaacgcgccgttaacggcggagaatgctatgagagtgagggaagcgatgcgtggggttgcgttcgctggattgactcctgattgggccaatcaaattcccgaggaccggtggatcgatcagcttcggcggttgaggcaaccgcaacgcccttccagtacggtttaaaaccatctttcctagattttgggtcaatttcaatgcttttttttcctttttgaattttggacaaatctctggcaaattatagatctttatctgtccttttggcaaaacatcagcattaaagaacaattgctcagttggatcaattctgttcc

SEQ ID NO: 257522 - DNA, 485 bp, Gossypium hirsutum
gtttgtctttgctggcctttccaaatcagcggacacccttttcaggtacatcactgctgaacaagtaccggtcaaatatggaggactgagcaaagacagtgaattcgccaccaccgaaactgttaccgagataactgttaaatcagcggcaaaacacacagtagagtttccagttactgaggcatgccttgtcagatgggaggtaagagttattggatggggtgtgagctatggtgcagaattcgtacctagtggtgaaaacagctatgcagttataatccaaaaggctaggaaggttgccgcctctaccgaggaaccggtggtgtgcgacaatttcaaggttggcgaggctggcaaagttgttctcactatccacaatccctcttccaaaaagaagaagctcctctatcgcttcaagtcccaccctactacatctcactagttttattcaaggaaattaatatcacacaaggcattcacataca

SEQ ID NO: 257523 - DNA, 281 bp, Gossypium hirsutum
cccactcgtccgaggggagggtatgagcaaacaatctcttagtcagtagttatgtgttttgtatatggttgattatatcaagtgtggatagtgaggttttgaacactaagttctgtccatggatgctttgcctagcaacctaagtgatgtctattgatttagaacatcaaaaacaagttcatgcttttaaagaactgtctatgttatgtttcttattgtgactgcttttaagtgatttctggttaaatggtgaacttttaaatctttgtttatatattttt

SEQ ID NO: 257524 - DNA, 250 bp, Gossypium hirsutum
gttcatgctgtgattcttcttccacttcttttccaggcatggtgtttggggtttgttttgaagtcgcagccagagacgactctacccgtaccgtgctgtgctgtgctggtgactgtgtcaatggttaaacaatgaataatattatttgcaatgactgcgaaaaaaaaaaaaaaaaaaaaaaaaaaaaaaaaaaaaaaaaaaaaaaaaaaaaaaaaaaaaaaaaaaaaaaaaaaaaagggggggccgtttt

SEQ ID NO: 257525 - DNA, 413 bp, Gossypium hirsutum
tctaatttgaatccccatactgaagaagaagaagaagaaagaacaccaaaaagaaaaaaaaaacttcagtaaatcgtaaaaacagatactttagagaagagggagaggcaaagaggtgcatcaaaatggggaattcatttgggtgctcagcttcaggggagagattagtgtcggcggcgagagatggggatttagaagaagctaagatgcttttgaattgcaatccatgtctcgctaaatattccactttcggtggccttaattctcctcttcatttcgctgctgctaaaggccacaatgagattgttgctttattgctcgagaatggagctgatgttaactccaggaattactgtggacagacggcattgatgcaagcatgtagatacgggcgctgggaagttgtacaaacc

SEQ ID NO: 257526 - DNA, 450 bp, Gossypium hirsutum
catttcttaattatggcttaccagttccagtgtgaaaatactagtggctcagtagaggcatcagagagaaatgttgcccacattggggctgataaactttgttaagcttggataggttggcaagttatctcgagatctgaaagcatcaaattgtcatggcttgctcacgactgcatgcttgattggcatgcacagttcaaattgactgtaaagaacgaggggttttctgttggtggtctgcaattgaatttgttcacaccaagtggctattgttctatggttgcaataagatcttttttggaatgagtgactaaggttggtttatctgaatatccaagatgattttatgtttggttgatttgttactcgaaatatttgtctgcctgccccgaaaaggattacacaagtcgagttaagagagacatttgagatcttatcatctataatgga

SEQ ID NO: 257527 - DNA, 155 bp, Gossypium hirsutum
accagccctacaagcgaggggccggatcgcgtggggggggactgagagatggagatggcttaaaagaagcatggttcccagctgatattatggattgaaaatatggccaagcttatgtgtgttacaacgagcttacatcagaggatggtgataag

SEQ ID NO: 257528 - DNA, 290 bp, Gossypium hirsutum
ggtattcctttcattaggaattctgttgcatcagagccgacagtctctcatatgcaagctgcatcccgccaagttcttgaatttgagtctgctcaaaattctgaaaagatgaaggccttgcaattggcagaggcggaggacctgtctaattataacgagcaggagatacagcctcatacacgagagattcaaagcaaaccttcaagtgcctcaactaggagttgtaccaaggttcacaagcaggggattgctcttggtaggtcggaggaccttactaagttcaatgacta

SEQ ID NO: 257529 - DNA, 167 bp, Gossypium hirsutum
cgtccggtcaatggacaattaaaaaacaaatatggtagacgcatttattcgcgggaataacgtactttatataagcacatcaaagaggacattagctgatggtgcataatgtgttgagagttttaacttaaatttcaagaccaatgtgcccttttcctattctaagt

SEQ ID NO: 257530 - DNA, 252 bp, Gossypium hirsutum
ccgctttttctttctcaataatatcacactaccatttcattaaaggttcttttttttcccttgaagtttttatttttttttgctaaattgaaaccgatttttatggcactgactcgatcgaaacaattggtcctactcaagtcaccctaaaccaacaaccccattatatggggccaactccctagtctagctcctcctcacaagctcacccagtgcaccccactcttaattttttccttgtagaaataggaa

SEQ ID NO: 257531 - DNA, 158 bp, Gossypium hirsutum
tcgggtgtcgctataggtgatgggctaacggatccggtcacccaggtgacaactcatgcagacaatgcttactattgtggtttagtcaacgagaggcaaaagggtgaacttgaggaagcacaaagggaggctgttgagttggttaagatggggaactg

SEQ ID NO: 257532 - DNA, 319 bp, Gossypium hirsutum
gattaacctgtctctctttctttcacactcctatggtgtaaaactctctctctctctctcacacacagtagcccacacgacgtcgtcctcacctttcctttcttccttctttccttcgaaacttcccaaacccaaatagcttctccattccttccctctgccattaattgaataaactccaaactatataacttttaaaaaaaaaaaaagagattaaataaatcaaagaggaagaggaatctctatggttataatttataaattagtcgtctgagtcaactcaccccgagttatgggctgctgcgaatccacctttctg

SEQ ID NO: 257533 - DNA, 103 bp, Gossypium hirsutum
gtccgcaatcatagttcgggttgtaggatcataaggagaagacatttaaatccctgaactgcctctagatatgaagaacctgggactattagatgtttttatg

SEQ ID NO: 257534 - DNA, 418 bp, Gossypium hirsutum
ctcattcactcatcataagggtgcttgttgaccgaggggaagttaaattcaagtcactgttgcactccgttgattctgtgctcacagaaggatatgctttgaaggtcgcgatggataaaatcaaaaaagatttgaaagatgttacggacaccatcccggatgtgcttcgacgggcggatgaccttgaccgtgaaacaatgatggattggcaagagattttgaagcggatgatggacacgctgtagcacatctgtggaattattttaaatattatttgacataaaaaatttagcggatttttttcaaccttagaaaaataacccataattcatttatgtattattttttacaagctttcagaaaatttggtggttatgtcttgagggattttatttcgggtttcagggtttagtttttt

SEQ ID NO: 257535 - DNA, 444 bp, Gossypium hirsutum
gttattgtaaaatcttgaaaccgtagcggcaacagcactagcccagagatgtttggtggtattcaaagcacttgatcctttcttccctctgtcctcttccaccatttccaccgtttccaaattgttatccccgttttgcccccaatctgctcctgattccccaacatacccttcctccctcgacaaactcaccaataaaacccaaccccctttgccaccacctttcctcgacttcacaggacacagagtttgaccacccgaaaatcaagaaatcgaacacacattttcattttcatcaacaaaacatttctgggtctttactgaaatgaggacggaactgttttgttgctaagaaacaggccaccatgtcatgaggccctgatcaaccatttttgagcttccaaatgaagatatggaacttgagcttaaattcgagctttccaa

SEQ ID NO: 257536 - DNA, 300 bp, Gossypium hirsutum
  unsure (1)..(300): unsure at all n locations
agcctggtggctgaaaactcaggaagaggttggaagctattagcattaatactttctgcagacaggcggcccaaagactcccaatgaacgcctgtcacaatgattgtcgcatgcaatttgccttttttgtatttgctgcttttgtgtgtaatgagctacttgctcttattttcgagtgaaaaaataaattaactcattgtacccttaaataaaattgattattaagttntcaaaaaaaaaaaaaaaaaaacaaaaaaaaaaaaaaaaaacaaaaagaaaaaaataaaaaaaggggcggcc

SEQ ID NO: 257537 - DNA, 205 bp, Gossypium hirsutum
gttgttttgaaatcgagcttgttttgttactctgtgacctcatcatatgagtgctttttatctttattctttgtgttttttccaccccttcactatcctttttttgttttcttagaaactaaactttctgcaggttaagttagtatcagcagtcatatataattacaattaaagttaatactatctttagattgatttcttattt

SEQ ID NO: 257538 - DNA, 243 bp, Gossypium hirsutum
tcttttttgcgtccgcccacgcgtccgctcattgggggctgttaattaacatttggctgtgtttttcgtcatcctttctcttttttcaaattcaagtgtgttgcaagtttcaaattgtttatgtttgaatttctggcagaattttataaatggtaactctacctgccaaatgttattatatcttcaagtgtttattaataacactatgttcttgcataataaaataataaaaaaaaaaaatat

SEQ ID NO: 257539 - DNA, 356 bp, Gossypium hirsutum
catgagaaacaaacaaagccttagggtgggcttgaaccctctgattgttgatttttctccaattaaacggtggttttgataactgtgtactcgtttttccggttgcctcgttttagcaaaaataaattctaggtattggttccaattttcactccccccccggctcggattatagggataggacaattttcatctaggaatttttttgagaagaaaaagatgatgagaagacaacaacgaaatcagtgccaacaatcaaggtttttctacgagctgttggcgctggtcctaaatcttctacgattgcctacgatgccgcttcccttctctgaccaaccagccgccccggagaggat

SEQ ID NO: 257540 - DNA, 105 bp, Gossypium hirsutum
gtaatgaaggattttagatatccaaatgggactgtgtactggttttggggtcaaatctaaaattttgtttggtcgatcattatatatgttggcttatgaacccat

SEQ ID NO: 257541 - DNA, 411 bp, Gossypium hirsutum
ctttcctatttttcattttctgccctcaacttcatcttctcctacatttctttcttttccaaattgcagagattgaatgcaaaggaaccgatgggagaagaaaacaagaagattatgaaagaagaggtaattgcaaagctcaaggacgatggtgacttcgacaagctccgtctcaaaatcgtccgcaagcttaaggacaacgaacaaagtgatgggcaagatttcagatagtctctgggaaataataagattggaaggtagcacgagaattgaaattatagaaacagttgtttcccacagaaataataattagagtaaacttgcaagttgtttcccatagccattgtgatggtaatgctgcactataaatggattagtcgtgacccactgggacggtatacctctttctct

SEQ ID NO: 257542 - DNA, 484 bp, Gossypium hirsutum
tttttactcgaataccaaaaaggaaaggtttgctttagtttctttgatcaatgagcttaccagggttcttcagtatctgtatgctccaatccatagtcgctattacttgtggagctttaatgatgttttacactaaggaagtcacagttttgggtcacggtcatgaaatagcaagcaaactgcaaggttcaacgcctcatgatcaactcttgatccaaacctcagaatccttttctgggttgcttttgttcactattggttttgtgttgttcatggtggcattcgttaaagatggagagttccaaagcttctttgctaaagggtgtgtgtcggttcatgtttctatggctatttggagagtttgttttgaaggaaaacttctgggttttggtcatgaatggcttagacaagctcttggggatattgctttggcactttcttgggttttccttctggtgtgttcatggagggaaaaatatgatta

SEQ ID NO: 257543 - DNA, 456 bp, Gossypium hirsutum
gtggtttgagattacatattcacgtctttattcagagagaatgcttacaacttagaagttcccttttagattccaacacttctgatgctgtacaacagacatgtggtgggacttttatttttgttggtgacatgatatcgatggtgcattcagttcagttgactgaatatcaacctcggtggggggtttttctcagcaaatatcttccaaataaactggaaaagagcttaatatgcacattccacatttctttagcattagctcttctcaatagtttgcccgtatatttcctagatggggaatcgattttggaggtggcgttgtcccacttcacatcattgagctcaagaaaaacaagaaaaatccatcaagtatgtgttgtgggagggagtttggtttcagttctggccttcttgaggatgacgtttatcaatttcttctagtatggatgtcttt

SEQ ID NO: 257544 - DNA, 436 bp, Gossypium hirsutum
tgctaatcattttttttcttctcatctcagttctcgcccaccgccgtctccgctgatttttttcggatctgacctgtattccgtgtcggatcgtgttgacataggtattgcaccccaaattgccgagtcaaggtaacgaagcttaccatcccctcttctctctctcgtatttacaaatcaggtttcttcattctcttctcatctcagttctcgcccaccgcctctgctagtttttgtcggatctgacccgtataccgtgtcagtgatcactgttccaccgtttggtcgcttgcttattactaatagtggaatttaaccaatctgatatttgtttgcgaaagagattaattatgaattttcttccatttttgttactttgaatttggtatgagctttttcttttttctttcttaatcagttttctttaaaagggtct

SEQ ID NO: 257545 - DNA, 467 bp, Gossypium hirsutum
ttcacgcgtccgggtttttgagagctgaggaaacatgggaggttgcgctaccaaacctaaggttttaaagggtgatgagatgccttctccggttgcaccatctcctgagccggcgaaacaacatgttcaggtcgctgatgatgagggaaagaaggtggaagctgagattgttaaggccaaggatgttgacgagacaaaggaggttgttattgttaatgatgcgaagcttgatgatcaagccaacgatcctcaatctggtagtaacttattgaatgagaatgaaaagaagggggtagctgagactgagagtgatagcaacacaccatcagagccaacgaaaaccgaatcagtagaggcagtgaaacaagaatcaatggagaccgagcctccgtctattggaggcaaagcagcaacagtggctgtcggtgagacacaaaatagggaaacagcagcagcagctgaaggtg

SEQ ID NO: 257546 - DNA, 296 bp, Gossypium hirsutum
tggttgctacagacccgagaactgtgccaacgagatcgacgtggcggagctcagagccaccctcttgaagaagcagtaaaaaaaaaaacaaacaaacaaacaaacaaactagtctctatatttttagctcaacaaagctaacctgcttgcttgctcctccgtcctttgtgtaatacttaatgcttgatttctcatatgcgaatcaaggaatttgtactaggagtttcaattgatcttaatcaaatgcttgtttttacttgcattttcttaataattatttgtggtgttgctatgtt

SEQ ID NO: 257547 - DNA, 424 bp, Gossypium hirsutum
ctccgtttttttaaaaaaaaaaaaaagggagagaaaaacaggcgctcctttaaccgatctgcgacagaaagagcatagcaaagaagctaaagagtgaagcgaagaagacccaaaccggaccccaatgactcacctcttgggcattggctatgtttggctacatgttgggttgtttgctttttggtagaaaagtgtgatttaggctttgaaggatattttggtttcaagttggtgatttaggatgaataacactaacataccaaagagctttggggctccatcccagtttgggaatcccgggacggtgccaaaatcgcaatctattcccatgaacaatcaaccacagacacaaggtgggcctcagtttccgggccacttccaattgtctgagcctcaagcacaggtgcttgcgcgtgcacaatat

SEQ ID NO: 257548 - DNA, 335 bp, Gossypium hirsutum
cccactcgtccgcccacgcgtccgtttggttttcagtatttgctcccatcaagaagaaatgggtttctggggaattgtaagaaaacctgcaaaaccacacccttatcattctgacaatgttcggggaaagcttaacattactcaggcaactttaggccttggatcatttaaagagaggtctgtacttcagtgatctgtcggacacaagagttcgatcatcctgtgttccttgttaccaactcagaatgagacttgcgccttatatcttaaatttgatgaagacgatgatttagctgatttctcagtacttggccctcaaagcatccacctctctg

SEQ ID NO: 257549 - DNA, 304 bp, Gossypium hirsutum
cgtccggaaaactttacctgatgaacgactgccggtggtggcttctcgtttcttgttgcagtttcagaattccccatttgtactttgtcctctaattacgatggcacagatatgtcatttatgttcccatttgcaaggtcaagcaggaactctgctggattcatggcaatgagaggggaacaacctatagatgagaaataagccattgcttccgaagctctcccgaagtaaagcgaactgcctttccctagaagaaccaacttgtcgaatttgtggaacagtctacttgatggctggtggattg

SEQ ID NO: 257550 - DNA, 236 bp, Gossypium hirsutum
cttttgcttacgtacttgctaggagtggtacttggagtgactgctttagccactccctatgttgctacctatgatggtaccaactatggtaaggccaatactcctgctaatgagactcctaaggtgaatgcaccacctcatgaacattatccacctgtctatgaacctacaatgaaggataaacctgcacctaatccaccagcttatacaccaccaacgaaagagaagccagaacc

SEQ ID NO: 257551 - DNA, 308 bp, Gossypium hirsutum
cccacgcgtccgattatggggaaaagcatgagaagaagaagaagaactaatagatgactcaaacaccattaatggaagagtccctttgctacaaagccaacaaagttgaacaatgtagctgttttaccatggttcgatgcttcctcattcattgccatactaaaaaaagtttattgtgattctctaatcaaattcgatcaactttattcgataaactcatgtttaggctattaatatttatttcgggttttaaaaattattttgaagttacaaattaaacaaaatgccttaagttcaaaggattgatt

SEQ ID NO: 257552 - DNA, 170 bp, Gossypium hirsutum
cccacgcgttcgtggacgcgtgggtcgcatggttggagtgtacggaggagaacactggtggggatgacgtggaggaggctcagaagctctgcggaagttgctggtgtctgttgcaggccaagagttgattcaattgcagcattcgagacctattctttatttctatattg

SEQ ID NO: 257553 - DNA, 153 bp, Gossypium hirsutum
aatatcttgcctttccaagacttggggtagggtataaatgttgtttgaatgggtttcttttgtttggtttggatgctaaagataaaaggaaaaaaacacctttactagtttcttgttgtgccatggttaactgattttatcttttcaaggcct

SEQ ID NO: 257554 - DNA, 298 bp, Gossypium hirsutum
taatggaatgcttgataagtgtcaccattgtatgaaaatgaatgataatgaagacgtgtaattcatgccattgaaatgtgattataatgaaaacatgatcttttttgtatcttgtatgacataatgcatgtgcatggggtgggattgtggatgatggaggagtttcgtggagttatggtggcaggttaagactgcattaaaggtttctgcttcaatattcagttgtatttctttttggatttgaagaaatgtactttatggacaggttttccgatatatgagaagaaaatttttgttg

SEQ ID NO: 257555 - DNA, 281 bp, Gossypium hirsutum
caaatgtataactgaagagagatttttcaatggaggatgtcaagcttctacgaattacttattgagatgatatgcgtaaatgcttttattttggatttatgttcaaatcatgttcatattcaagctgtttcataattgggccttttgaatgggagatcactttgagttagatcttttagggtttggaccgagctttcttttagattttgtgaaaaaaatataatccattccacatgtgtttcgggtttgagttatttggatttaggtttctgatttctttc

SEQ ID NO: 257556 - DNA, 131 bp, Gossypium hirsutum
cccactcgttcgtggtcttttaggcttttttcgtttagtcattttcgtgaactgagatgtgggactttaggaaagaaagaacagatcgttgtctggttttttttttggggggttcaaggtttggacctttt

SEQ ID NO: 257557 - DNA, 259 bp, Gossypium hirsutum
ctcagccgtcgaacccgccacgctattcaccaaagactcgaacgctccgcttgaggccgccagtgacggcggagaagctatggccaggaaagaaggtttctctacatcaaggagccgcagctggaggtactgtcccggtaaggtatgtgaggccgcgaggtccggagagcttgacacgtcgatgctgatgtggaagagggactcggcggctgtctcgattgatgagatcggtgttggggtccagacggttctagatcgc

SEQ ID NO: 257558 - DNA, 196 bp, Gossypium hirsutum
gcgcaccaaggcacactgacaacataaaacagaccactgaatttatttcttgtaaaaagcagttaacaggaaaagaaaagaaaaaaggaccaggaagagaaggaaaaagctttttattgtaatatgtggtgcaacgaaaagagcatcagcacataagcttctcaacagatgtaacttacctgaagttcaaagatca

SEQ ID NO: 257559 - DNA, 434 bp, Gossypium hirsutum
ctctttatgagagatccaggcatgcttcagatggggcggtgttgagtgatgaccgacttaaattttaatctgagaattgaaccttttttctctacgtaaagatttatgattttgctttatcagatgagctagggagctaaaaggcctcagccaagaccggagaggcccagtaccatacatggggtattggaaaagctcataaaccatacatggggtattggaaaagctcatacaccatacatgaatggtgtgactacttgatgctattgagctgtgtttgattgcagtcacagaaaaggtccaagcctccatgtgataatccaaaatcatcagaaaaaaaagttggctaccctgtatttatatcaaagagagcttgttagtgccgattataattgtgagcttcaacgctggtacgtcagtgcagactttacatg

SEQ ID NO: 257560 - DNA, 381 bp, Gossypium hirsutum
gattaagtggttgccgaatgtgaaggggacgtatggaaatgtgtacaaataatatttgtatggataattggtttaaaggggtcggcattatacattgttgatatggtgttattaatgtagaacactttagtatagacgtatatacatatggtcacttagaacgtattgagatggccgaataagactaacgatgagtatgctttgattttctataatacttagtaatttgtttaaggtgattaaagatgtgtacgattattttatattgtactaaagagcgtattaatgcatgtttggtacttgagatgaatgtatgctgctgatctctttgtcatattagagtaatgttattttggtgtctttatgagaaggaaaagctac

SEQ ID NO: 257561 - DNA, 391 bp, Gossypium hirsutum
tttgatgatcccgccgaagataatcagtccgaggatgagactgattcacagtctgggaacaaggaaaccgaatctgcttcggacagtgaaaattttgcttcctctatggactataatgcagtagacaagggaaataaaatggtggtatcggattctgctatcgagaaaaatactgaatcccgtgaagatggtgatatagatatggatgctgtagatgcagtcgacaatgttgaagaaactctatcaggggacaagctagctgaatcatctgtcggagaatctgatgaacataacagtcagagtgatacgacgagtaagggtgttaatcaagttgataacgtagctgtttccgatgaacttggagttcgagtctcagttaaggaaaacacac

SEQ ID NO: 257562 - DNA, 438 bp, Gossypium hirsutum
gtataagcgaagagaggaagtttgcagccaaagaaaaaattgcgattgaatcgacggcagagcacagcaacaacagcagaacatccggccatgttaagccatcccttaatcagccattacttcatcactccaccgaaaatgtgtgactccaaaagccctttttaactttttaacaacaaatgggccaggcactaccattatgtcaccaagtttgtgtgtttatgaatgtgtttcttttttgttaatggctgctttctttctccaagtagtagagagggcttaaaggagaagcttttctgaagtgatgatgatgatcccatatgcttttttgtatgtcgatttcttggtttgattttgagattttccttcttttaaatgcaaatgtatggagttaatggtgaaaatcattatgatgtatgatggcaaaagacatgctct

SEQ ID NO: 257563 - DNA, 426 bp, Gossypium hirsutum
tttatacagcagctgaatttggaggaaaatgggggacgctttgtttgagcttgagcagaatctaagatcccgaaaggaacaattaacccgacaagaagaaaacatttttcaaaggtgtaagtcctcggcgcttaatcatttcacggctggtgtaattgctggtggtggtcttgtttgggcagcaacatggaagctgaataggttacttcgggtaaacctctctggtggagctgccataatacttggattttggaaatttgggaattccctagattcgagtgttgaccatattcttgcgttagacggaactcggatgcaaagtgaattagcaaatataatagtgaagaaatatcggcatgatccttggaagatgagacttatctctaaacatttctatttagaggaagtacttgatgattcaacttc

SEQ ID NO: 257564 - DNA, 463 bp, Gossypium hirsutum
ttctaccaaagaggattgcctgtctttggaggggtcaaaattagagttgtattggacaaatccaaagaagaaaaaaaatggagagattgccttctgatatttgtcttaagattttctgtttcttggatcatcagaaccttgcttctgccctacaagtttgcaggaaatggaaattgttgggttcggataacaagctatggtgtaacctattcagagaaagatggggagtggatgaagctgcattttttgcccctgaacccttagaatccacatcttggaaacatgtttacgagacacaagaccgatgtgatcgggttggattggggctgaagataatcaaagaagggggagattactttcttgtacatcaaggtaaaatccaacgctacctgggttcaaggattaaaaggaaaggggtgaaagagtgtgagttcagcacaacatcgaatcatgtggaggaacc

SEQ ID NO: 257565 - DNA, 162 bp, Gossypium hirsutum
ttccttgtttgacttttcaatggcattgctcattgcttacggtaggtgttggatgagaggttgtttgcatggtgtgccctcctccttccctttcgattttcttttatgttggtctgacacttgatattttttggtatccgatacttgtgccaactgtcaatc

SEQ ID NO: 257566 - DNA, 213 bp, Gossypium hirsutum
tttactgcctgcaaatgttgcggatttgatctgattgagtcagcattttcatacacaagagcaaaggttgctttagtaaaaaaaagaaagaaagattgtctgtttgttttgtgagtgaaaaggttaaagtgttcatcgccctaggtatggtctgggtttgagtcatgttaatctcattgttattaggactttatcctattcttgtaactcagc

SEQ ID NO: 257567 - DNA, 437 bp, Gossypium hirsutum
ggttgtcagaactcccttctcactttgtcctcaggttgaggtggacattcaaaccgctgcatcagattggatctccggtgcacttcaggtggagcaatagaaccctgggaaggccaacaaaaaaaatcttaaatcaatcaatttgtatacatccgcaggaggcattacatttagtcatcaattgagttgtgcttctattaatttccattgaaatgcttgttctgtattttccctgttcattttttcttctaggggttcccaaaatatcaataactcgggtgtttgtcttttgttctagctgtttgttgatacaaggaaatagcatggtctaaattaaatatgaccatggtctttctgcaaattcttcatgttgttgttgtgggggcttttcatgtaatatggtcttttgatttgtttaaatttatgtgaatgtttct

SEQ ID NO: 257568 - DNA, 215 bp, Gossypium hirsutum
tttacgcgtccgctttgagtttagagctttggggggctttatcacgggattgggggtcgagaagaagcggggactgaccttacttggaactctggtttctcttgttaccgctatggccgacctatctataactacctaaaatactctcacggagatattccttgggttcaagcgtattgatggcttcaaagcggattttgaaagaacttaaggat

SEQ ID NO: 257569 - DNA, 201 bp, Gossypium hirsutum
  unsure (1)..(201): unsure at all n locations
tttgtttcaagtgttgtcttccaatgcaattnnagttacttaattatgtgggggggggtataaaaagagttcctccacctcctcattttcagtgtttccattgtgtaataaaaatctgctatcttcttcactttcttattattgcagatgcttctactttaaattccagggtaaaagtaaaacactctactaattcatctt

SEQ ID NO: 257570 - DNA, 399 bp, Gossypium hirsutum
cttcacgcgtccgcccacgcgtccgagcggccgccctttttttttttttttttttagggcatagaagaaaggaattagcaacaccatgatcgttgagactgagaagagctacatcaacaatgttgagatggatgctccagctgagaacgatggcaagtgcaattgcggtactggctgcagctgcacagactgcacctgtggccactaagccaacatacaatggtcatgcttcagatcatggcatatatagggatctaaataatgaatttaaggttgaataatttgcgtctgttgtagtttgtgtggtgacttatatctgtcagttaacctttctctcctttactatgatgtaatggctatgcttatggccttatctggttaatgaagtatccttactat

SEQ ID NO: 257571 - DNA, 354 bp, Gossypium hirsutum
cttcactcgtccgcccacgcgtccgcccacgcgtgcggcctaaacaaaagcaggcagccagagtggttacatggtacatatccaatatataaacaaaaggcgacggatactgggaaaactctaatcagttgtaataaatatatggtacaattttttaaaaaaaatgaaaataataaattaaaatttttttaacaaagttataggatttacatcacaatttgcttgcacgtcctctataaactaatgccaaaccccaatctgtcaacttgccgctccccccatttttaaaagagccacccttcttggttcttcttcttcttcttcgcctaacaacccctttctctctcttctttg

SEQ ID NO: 257572 - DNA, 471 bp, Gossypium hirsutum
cctcacgcgtccgcccacgcgtccgcggacgcgtgggttaccatcgaatttttctttttaattcatctccttatgatggcgaactcacctactgttatccggccaccgccaccgtcaccacaaccaccgccacccttcttttcatcatcatcaccaccaccactttctctgcctgataacaccactagcagtactattatcccatcaccctcgccgttaccattctctttatcaccccaaatagaccccataggtcaaaacggaaacatttccatagtgagcatcaatccaccaccacctttccctgattcaccgagaagcgttgatttgtccccactcgaattcattcttgctcttatggcagtcataacgatcccagctatagtctacgctttctttttcgccgtcaggtgccctccttggtcttccgacgaacgccaagacaggtccagggacaaccatggaagtgct

SEQ ID NO: 257573 - DNA, 218 bp, Gossypium hirsutum
tttcattcgtccgcccacgcgtccgggagtatgtatgtatgtatgtatgtatgatatttgattcctgtttgactcaagttgagacggtcatgtaagagagacagagagcaagtgtagttttccaatctttcttgaggcatagagattgaggaagaacctgcctattgaaaaaaaaacaaaaaaaaaatttgataatataaaaaaaaaaaaaaataaaa

SEQ ID NO: 257574 - DNA, 525 bp, Gossypium hirsutum
  unsure (1)..(525): unsure at all n locations
atttgaccaggataagagtagctatggtgatccaaatatcatggatcctccaagaaatagaggtgttcagtttccatttgctgtaacagatcgggttatcataaaggggaacaagagaaccccacaacgtttcgtaggacgtgaggccgttgtaaccatgcaatgcttgaatggatggtatgtggtgaagacattggataatgcagagagcgttaaattgcagtatcgctcacttgccaaagttgcagataacacagccccaaagccaattacaagcaagatgggaccaaactggttatagacctgtaatttataaaatgggggcaggtgagtgacacttcgttgctggtgtcggtatcagtgtgtgccacggttagttcaatatttaacctaactcgaaatattttattntattttttctaccattgttatagtgtttcatgaaacaagccccttgtaaattaccttgtcacgtattttaagcataaaaattacatgcatagagttgaacgagcatgcttaatc

SEQ ID NO: 257575 - DNA, 137 bp, Gossypium hirsutum
gaaggaattgagatttttgaaatcaaatgggaaagcttacagccaaatcccactatgaaagtctgaggaatgctcgcattgtagataacccagctctattagcctctctgggagtgcacaaaaccatgttcgaccta

SEQ ID NO: 257576 - DNA, 465 bp, Gossypium hirsutum
gtaaccatactcaagttttttattttgcctctgtagtatatccaatggatcagcagaagaagaccacctctggggctctccaggcaccactgaccgcacctagcaacaatcctactgctgcagctcaggcactcctccataaccctggtgctgctcaagcactcgccaataatccgggtgctgctgcggctgctcaggcattccttggaaaccgaggtgctacttatcagccactccttaataacactcatgtcggtcagcaacacatgggcgttcccggtgctagtatcagcaaacctagtacaggtgaggcactcatgaagggtcatactggttctcatgcactcatccgaagtgaccgtgggagcatgttaagcttgtcagatgacaatgtgatgatgaagcaaatattggcaactcatgctcctgatggtcgagaatttgatgttagacctctactcaatc

SEQ ID NO: 257577 - DNA, 476 bp, Gossypium hirsutum
ctctatttcgccagtatcctggaccttggcaggggatgcttaagcaagcagatggttcttatgcttgtgtagctgagagttcaactcgtttcactctaggagaggtatttaccttggctcttggtcgttttgaattacattctttccaatgacttgtatgattcgatttggtctagaccaaggaagaattgctgcgggtcctcggattgcaagaggaacaaggaagtcaactagaatttcttcgtagaggctacaaggtttttatctattctattttctcttttacattaccatgtttcgtttgagattcttaaatcgaatgctcatagcaatatcctccattcctccctgaacaaagttccaacttttttcttccttccggttttacatgttctggccatacgataacatttcagcttggtattctcagaaaacatgttctggccatacgataacatttcagcttggtattctca

SEQ ID NO: 257578 - DNA, 356 bp, Gossypium hirsutum
tttattgcatcaaggagaatcgcctagggaggtgaaagagcaggaaggagaaaaacatggaggctccagagcagcacaacaagtccagagttgtgaagattgactctgttgaatcctgggacttctattttaaccaagctacaaatcaaggctgcccagtaagctattcaatcagtcacctccatgtctattttctttctagtggtaatagtttagctttggtccttgtcctccatcattgttccttacaacaatcccatctgtcccctttgctttgtcttataaaagttccatatccacattccacggttcatgtctttatcataaatggtcagtctgttgatctcaaccaagga

SEQ ID NO: 257579 - DNA, 448 bp, Gossypium hirsutum
gtgtttcccctcgttacgatcagtttcatttcggctttatagccgattcccatattaaaatattgttgttttattctctgctactgcttgtgcttcttgctgccatttttcctcttttccaaatgtttgcaagtcatgggagtgtcagacgcgtggaaggccggtgattggcgccccgagcggtggtggcgcgcgtgagaaggctggtggctgaaggcatgcggctaaaaactttggtggccgctgaaatttttttttaacatactgggcttgggctattagggtttataaattgggtttgggtattgtatttgggctattggactcttatatttggttacttgggttttgttatatcgagcccggttaaagtttgggccaaacagaatcattatacgaatatagaaaaaaaagtttcaaaaatatgatattatagaacccctcaagc

SEQ ID NO: 257580 - DNA, 461 bp, Gossypium hirsutum
tccactcgtccgctccttgcataaagaaacgtggaggatcaaggaagagaaccagtaagaggaaaaagtctacaagagatgtgattatgagttctcgtagtagtagtagtaggtccttgagttgctcaacttgtccgagtgacagcgacgagagtggatatgagaagagaaagggcagatcagaaaggagggagaaatatggtaggtcggagaaggttaaaggaggaagcaaaaggagtaagggccgatcaaggagttgttcttcttgtagtagatataatgaaggatctgatcattcaattggggagagagtaatggaagagagcaacacgaggcggctgaaatcggttattactgttgttaagcgagaaaatgaaagcagcagagaattgattgctgatgagcctaaagaagatgtatatgattacgatgattacccatcctgtaggagcaatgatagc

SEQ ID NO: 257581 - DNA, 445 bp, Gossypium hirsutum
actccttacaacagttcttccccgtgattgcaggtgggagatcatggcttacttccggtcgctccctcaggttagtacgagcaaggatgcggaaatgtggatcccaactgacacaaaacaatggcaacaacctccgttaataacaccgatcaagtcgatgaacagtgaacctctgggtttgcagttatacttggaacaccctagcccatctgaactggtttctgggtaaactggtatgagttttgggacgttatgttgtttatgttattatacacttcaaaatggagttggggtgacctcaaaacttttggaatgtggaagaagtaggtaaaagtaccatggaggtctttatattaggagtgagattatgttttactttctttacttaaaaaatagacaaattagttcatgtacgttaaatgaaagagcagattgatcttatttt

SEQ ID NO: 257582 - DNA, 496 bp, Gossypium hirsutum
cggatagaaaatggaataggtttgagtctttggtgcggtttaatccgaagagagaattccggaatgggacggatttgatatggcaaatacccgattcgcctaaggctgttctttttctagctcatggatgtagttgtagagctgttaatttctgggataagtcacataaatgtcctgaatgcgttggtttgcctgaggataggctgcttgtgcttcatgctcttgctcgtaaatttgccgtgttgactatatcaagcgtaggggaatgctggacatttgggaaggaaaggttgattgttgaagatattataacatggtgggttaacagacagaaacttggaaagcttcctcttgtggctttgggggcttcttctggtgggtattttgtatctgcaattgctaatgatttgaagtttagtagtattacacttatgatcgctgaaggcttatttgatcgcatggacatcaaagaggactatccacgcttaataaacat

SEQ ID NO: 257583 - DNA, 498 bp, Gossypium hirsutum
gcaaaacgtagaccccaaagctcacgtcctatcttccaattccaattcagtccaatgcttgctgttctttgcttcatcgtctctggtttcgttttagtaccccaattttgttaatcgatcaaggatgggctcatccaccgcatttccatcgtctcggttcatcgcatctgaacgcccctcctttcttccacgccgtagcagctgcttctcctccttcacatctccaacttcatttgtctcttatcgcagatcctccaactcccgaattctgcatatctctgcttctcttctgcactcaaacgttgacgtttcctggttccctcccgaccccaattctctacctaacaactatgggggttgggccgttgttcaagctcctctgactcccaaaacaaataaaaaaggattgtcttctatttttgttgggagtcttattgggtcttcacttgccattgcaatttccatttcataacttgtattctacaaaaaagggtttaa

SEQ ID NO: 257584 - DNA, 524 bp, Gossypium hirsutum
cggatactagcaagtttgaagattttgtcgataaaaatctcaggggagagttttctgaatccatggcatctaagctggggaaaattgcacttaattgcaccaatgaagaacctaatgacagaccaagcatggaaacaattattaaagagctaaatgattacagtgtcagttcttgatgggggcattatcttttaccccaacttgagaaactgacgatgatgatgatggggtcaaagagattgctgaaacttgatttttgttggtggttgtagatctttttgtcgagtactatgatgatttgaagtatgaaaagatgacaatatcgtgtaaagtggagttgcagataggagtttcctcactgatgactagcaaacaaaagaagtacggagaaatattgggagaaataactttctaatcatacaatttgatacatagattttaattcgtacctccacatgcattgagccagcaaaacgagccaagctagttgacattaaggttaatagcatgtctcttggagaaca

SEQ ID NO: 257585 - DNA, 465 bp, Gossypium hirsutum
gcaaatttaggaaaagaaatttatttcttcccaaattaaaaccctccatttgatttcctttttacgaaatgtgtctaaattcccctaaaccacgcgcttatgtcccaaacaaaaagaattagaagatgggcatgccacaaacccaagagcagcaatctgacagtaaccctgaatcaattcaaccgtaattccaaagtaatcgatttcctaagcccccacccaatcgacctacccaaatatttgaaaacataatcataattcctgttatatttccattgttttcttcttcctcctcttctctctgttgcaggagcttcggagacgacagatttcgaagaggatgaagctttctgcgttgcaccagagctacatcagccgtcgaaccaacagcttcagatcatctgggccattggattcgtcttccgacagtgccattaaatcccctgccgccattttctggcttgt

SEQ ID NO: 257586 - DNA, 277 bp, Gossypium hirsutum
ccaatttttaagttttgccataaagacttttatcaggctggatgatgataaacccgtagttgcgggtatttgtgatgggttatctatagtacctatgttttgagtgcctttctgtagtcttttatctccttcaacgctaatatgcaactgtctgtgagggttagacaacacatttagttcattttcaagttttttttttttgtttaatttcattgaatattgacccttgtttgtttttttttcagtgtgttaaaaagagtatgctttcatgacttat

SEQ ID NO: 257587 - DNA, 516 bp, Gossypium hirsutum
cccacgcgtccgagctactcgtttgaaatttatactagtactaccctttacaaagttccctgagaaaagacttgggaccaatttacaagatcattggagaaagacctaaatcaactcacgccctcaaaaactaggacacgtgatctaatacaaagccagttagttcatctataatatacctatagtagccgagcagatggctattgctgtacatctaaggaccactatgcatgtggatcttgcttcttgctttgctaattttggttttacagcactctacttaatagtactcaatcgtcagaagaatcgatactggataagaacaattatgattcaaatatcaaagtcactggcgatccacatcatagaatccacagttcctttttctatttcgcataatattatataactagtgctagaagaagaagaagaaaaaaactccattagtttcctttgtaggagcgtcaaaggaatgcctcgtcttcatgttttaaggtggtagaggagcaacgcttc

SEQ ID NO: 257588 - DNA, 467 bp, Gossypium hirsutum
caaaattatacctagattttcatttcgcttccaatcacataaaggactttcttggcctgctacttcagataatgaaaatgaggtgtcaactaaggctggtgaaatgccagaaagattgaaggccagtgatcatggaaccttatagcattcaatagctgaggttcttgaagatttcaatggagaagaggaaaaccagttagagattgttcctgctgatgtagaagctcatggtcatggatttattgagcattcaatggctgagcttttagatgaccttcaagataataccagtctgctaagagggaattttaaaatgcatagcagggcaagaggaaaaagggtacaagctgctctcaaaagaagtatatgttcactcggtgatagaaccattgaaagtgaagacctcaatgagcccttcagtggtgggtcatcaagcaatgatgaggctgattaccaaaatctaaaac

SEQ ID NO: 257589 - DNA, 356 bp, Gossypium hirsutum
gtatgtcttaaaaatatagtaacaataaatttttcctcatcagatttttggtcccaaaaccactgttctgactaggccctaaatataatgttacaagtgcaccttctaatggtctcctacacactcacaaagtgcgttagctcacccttaggcctcattcggcctctaaggtcaataaaagactcattttcacattttattgaatgtaaataaaactatgaaaacttaactttacataacgaaaatgcttatattcaagctccttaaatgtgaaaactagttgaatctgctaaaccaaattacgacatatcaaactcctccacacttaagttattgcttgtcctcaagcaacatat

SEQ ID NO: 257590 - DNA, 503 bp, Gossypium hirsutum
  unsure (1)..(503): unsure at all n locations
cccacgcgtccgattaactttagtaaaccgactgattcagacacgaagtcgaaagaatttagtaatcggaattccttctgaacttactttcttcagtgaaaggaataataagtgattagtgatgacataaatagttgaaggaataatatttgaaaggtaagacattgagtgtgacagttatggctgaacagattttgacagtctcttttgaggtattctatatgtgtaattgttcttgagattgttcctatgaccttcactcttctgataaaacctttgttttatggaaatattttctaatcatgatgtatagaaaaaagtattagtagttcaactagtatatataatctgtattgcttcattcccctctgacattctattgtgtttcatctattgaaactttatgaaaaagtacacatgatgatataactctgtttcttctagttgatgttctattcgatatgtatatatatgggaaggtatatcattctttntgcatttac

SEQ ID NO: 257591 - DNA, 252 bp, Gossypium hirsutum
  unsure (1)..(252): unsure at all n locations
attttgcaaatctttgaattcctccatggccagaaaggcaaagttaagctcctctgactcagaacccccgaaaatagcgtcggaacctcaaccggtccaagaaaaacagcggcaacaacctgtatacatacccgaagatccgaacccgaatccaaacgtggacgaagaacagcaaatactanaagtggaagaggaaatcgaagaagaagtagaagtagaagaggaatttgaagaggaggaggaggaggagga

SEQ ID NO: 257592 - DNA, 263 bp, Gossypium hirsutum
  unsure (1)..(263): unsure at all n locations
tcccactctttcggaaatgganaaccttgaattcanagggggccatttaaatgtaaatgaatgtttatgaacaaggggggcttattttcttgctttcaatgtattgtatttcggacgtttttggcatctttgtacatccttatcctctcttcttttttcttccggtggtgcttttcatgttatgtttttaatgcataattctacaagtaaaatatattgtttgttttagtgtcaaaaaaaaaaaaaaaaaaaaaggccccccc

SEQ ID NO: 257593 - DNA, 119 bp, Gossypium hirsutum
tccattcgtccgttgattcatttgagattgtttgatacgatttgttaattttggtagcctcttggctcccaggttgttcatgctttactgtcttgtataaggattgaacaatttgttga

SEQ ID NO: 257594 - DNA, 407 bp, Gossypium hirsutum
  unsure (1)..(407): unsure at all n locations
tttgatgctagcatcttcggagatgtcttgccgatagggtggaagcttttgttagggttaaagaggaaggaaggtcgtgcttctgtatattgccggagatatattagtcccggtgggcggcattttatatcatgtaaagaagtcgctgcatacttgcaatcctgcttcggtctccatgatgcacccttgacaatggataatgatggcgacattgctcagcatatttatcaaatggcttctgaaaatgaaggtgcaatccagaaaggggacgatcaaaggcggactgaacgtgggaaggaactcaacttactgngaatggataacctggcagaagttcaaatacatgatcttttcgaatgtcataaatgcaatatgacttttgatgagaaggatgcatatttacaaca

SEQ ID NO: 257595 - DNA, 396 bp, Gossypium hirsutum
ttcttggctttatactctaaaaaggtttttctgtatcactttaatggctgcatcctccccccattcacttctcatatcgtcttccttgttctatttggattctttttgggtttttcgttttttcgatcgttgtttaatttcaaacctatctcattctcagattcttagtcaaccttgtagtttctaacatataaaaaccgacggccgagaagtagtcaccaacatgggaaaacgtaaaactcagcgcaataatgccgcgatgttagatagtgacgatgataatagtagtgtaagttcatcgtcgaccatgcgttccgctggaatgtcggtttccggaactgaagaagtagagcttaataaggatagtttacttgatgaagctgtggataatttata

SEQ ID NO: 257596 - DNA, 306 bp, Gossypium hirsutum
ctctgcttattactgtattactggaatccatccgcaatcttctctcgagtgacagtaattttaatcatggaacataattgatcatcaataatagactggcaaggataacgtcatattctgtaaacctttgctgtagaaaattaaacttaaattggcatgtttatttcgttaaggattgctagtgttgcatttcatatcctgtatttgggtcttccccatggcacatggcatccgttgggtgtaacatggagaatattttcctcctcttttgtgtgaaattttgcttctcaaaaaagaaaagaagat

SEQ ID NO: 257597 - DNA, 317 bp, Gossypium hirsutum
tttctttttctcggatcttctttctccctttcagcaaagatctttgattttttccgtctccttttcgttcgctctctgaggctggaaacaggctcgtcgaaccccctttgtcagtcgctgagctcatccctttcctagacgttgatgaagaacctgcaattagaacaaataccaccatattatgaaattttaatgaaagtcgtgaatttcacagcttctttgaatcttcagtactttttcacctttggtttgggaagcaatatttgggaagaaaacctctcagaaagcattctaagtttttttttttgttaggcttc

SEQ ID NO: 257598 - DNA, 260 bp, Gossypium hirsutum
aaggaggtagaaggaggagtactttgccttccaatcttctctacctcctccttggcttgtaaattccaaatttgtaccaaccctttttctcctttgttaggcacaacttacattttagacaattgggaaaaaaaggaaaaggaaaaaaaattaatttggaatttagctccaactgatcatggattttgggaattctggtttcttttccttaaatcagtgttgttcatttggttcatctgattatgcttgctttaattcgt

SEQ ID NO: 257599 - DNA, 219 bp, Gossypium hirsutum
ttttccacgcgtgcgatccccttctcataaattctctctcttgatggaagagacgcgatgtgcagtttgactgatacaagttccttcccaacgttcaattaaaaccctaccctctaccttttgctcctatcggagggggggggaaaggaaaaaagattaatttggaatttagctccaactgatcatggattttgggaattctggtttcttttccttaaa

SEQ ID NO: 257600 - DNA, 160 bp, Gossypium hirsutum
ttaacgattgcatggatatgcatgctgatgatagtccacaccaagattctcctttctgaaattcctatggtcattcatttgctgctttcttctctttttcttgtaaaatatcttgaaaggctaggaatctcaaaagtatctcgaaatgtattgcaagttc

SEQ ID NO: 257601 - DNA, 205 bp, Gossypium hirsutum
tctcacgcgtccgcccacgcgtccgtaataaagagcttattgctactggtggtggagttcctcttgttctgaaactaatgttctctccccatgtgtgtacaattcttatagtcagatgctccgagattgttgagaaactttcttctgaaagcaatggggttaaattttttgttgatgaaaaaggggttcaacttgaattggagcc

SEQ ID NO: 257602 - DNA, 242 bp, Gossypium hirsutum
tcgttttttttaaaccaacaatagaagtaatagtttcattacatcaaatgtactacaagatgtgaccctgattgcataaccggaactcaattgtttgcaagaacacgaaaacataagtagaaaccctagctatttagtcgatttctctatgcttggaacaatatctaaatgggaatacaaacacatataccatatgcatatgagaggaaacttttatgttagataagccctgataaaacagt

SEQ ID NO: 257603 - DNA, 193 bp, Gossypium hirsutum
tctcccacgcgtccgatctattctttgccttagccttttgcttggttggatgattaatgattttcgtccattcaatcaatcaattgagttgaatgttgtaggggtcattgctgtatgcatgcttgtgccctttcgttaatgataaccgtaagttcatcgatttgattgttaattgcactagtgtggggaatgg

SEQ ID NO: 257604 - DNA, 505 bp, Gossypium hirsutum
tcgcccacgcgtccgtataacttagggatttctatggatcaagtcaaatgaataaattgtctgattcagagtcaaataacaagtgaagcctaagtggatttttccttaggtattgtcttaatcaatcgaattttccaaaaagtattttcccaaattttctttctatgcattcttagtttagtaattagtttagataaacaaaactcttaatttttagtctagataataaaaagggagtaaatactagtacttgtggttcctttggttcaacaattcggtcttgctaaactatactactgttcgatagatacacttgccttaatcgtgataataaattagtctcaagaaccattcattcataaatctttaaaaacttgtcacgaatatcagataccaagcttttggtgtcgttgccggggaactaggatattaggagcactcaatttttattactttagccattttattttgcaattcaaatttttatttttatttttaattttta

SEQ ID NO: 257605 - DNA, 214 bp, Gossypium hirsutum
ggattgggatcagatttgatgcaaattggttattatgaaatgagtatcccacatggaaatgaagtccaaagagattccgagaaaaaaaatgtttcagtggaggaattggaagtcatcaattaatggatctttaactcagttacttctaagatattaaatactgatgatagaatattagctccattggttttttaaacatgtacctgctaactac

SEQ ID NO: 257606 - DNA, 358 bp, Gossypium hirsutum
tttgtggtctgaaagtattattctcatccgacaccctgtttgaagttcatgatagctccatcaatgttgttgatattgtcaaacaacactgcagttgtgctatgtggaaaccaactgggcttccttgccatcatgcaattgctgtctttaactgcacaggtaggagtgtgtatgattattgttcaaaatactacacagctgaaagcttccggatagcctttgctgagagcataaatcctgcttcgaccattgctcacccttgtggaaatgaagaagattccgaggaagacgaggatcagataatgcctccaagcatctcacgacctgtagcagctcaacaaccaaagaaaataagacg

SEQ ID NO: 257607 - DNA, 310 bp, Gossypium hirsutum
ttttccacgcgtccgtggttgaactccgtcccacaccatacacacagagttgtaagctgaggcttgccagccatatttaacaagacttctgaaatacaatcagattcagttggttatatgtgtccaacctgcaaggccaaatttctaggcagctcactacaataagcatgcagttcatttcccatgtataaaaggataaaaacaacagtgattcagctatgaatgatctccacctttggtaagcctttcatgtacaaagttacagagatagaaccccctaatgttggtaacttaaattaaattgatattt

SEQ ID NO: 257608 - DNA, 216 bp, Gossypium hirsutum
ttttccacgcgtccgtccacgcgtccgggcttattgctgtaaacaaatgggttagtgaggctctttgggaacttgtttttggattctttttcaccattatagagccaatgagagatgtggaaaaaattgatgatagcctgcacagtttgacaatgagaaaaaaaaagaaaaaaaaaaaaaaacaaaaacaaaaaaagaccaaggagacttacacag

SEQ ID NO: 257609 - DNA, 251 bp, Gossypium hirsutum
ttatttgatggaccagagcctgataattattggtatagagtatgtgaagggcaagctgctaagtacattcacagaccgtggcatacaatatggaaatcgaaacgattgatgaacatcgtaaccgagataagcggtcgtatggattgggatttcgacgctattcacgtcatccgtggtgaaaaagcacaaaacaaacaactttggccgaatctggattctgagacctcccctaacgcaatcttaaccaagct

SEQ ID NO: 257610 - DNA, 165 bp, Gossypium hirsutum
tttttaattgttgtaatttaaacggccttaataatgaaattgtggtatcttaaaatgataaattgagaggagttatagttgtaatttatagtgcttgggtgtcgtggttaaaatgtataactctgggattgatattgatgatgtgctggtaatgaataaatcgag

SEQ ID NO: 257611 - DNA, 322 bp, Gossypium hirsutum
tttcggacgcgtgggccgaagcataatggctcagtcatctggtagcaatactgggaagaagcttattcgaattgatgttagttcagacagcgtttgcccatggtgctttgtgggaaaaaggaacctggacaaagcaattgctcaagctaaggatcaatttgattttgagattaaatggcatccattttttcttgatccctcggcacccaaggaaggagtcagcaagagagaatactatgagaagaagtttggatctcgaactcaaggaattttagctcggatgaccgagatatttaggaatgttggattagaatatgacatg

SEQ ID NO: 257612 - DNA, 367 bp, Gossypium hirsutum
tttcccacgcgtgcgcccacgcgtccgaaaaaattgtaattgaaatgttagtaaacgcatggttgtttggaaagcattgttcaatactttgaaaatacatttcacctcactggaggcttaattccagactggagctttttgctcgggggaaaatttagcaactccagttgctttttcttttcctcttttacccatatattcttcaggcttttctgtatgtttggttaccgttgttctctcctttccccttccccttcccttgggttgcaaatcagtttggtcaaggacctcttccggttcctccttcatccagatggatttccaagagcaattcttcaaggaacgaatcaaatttatccatgaagcg

SEQ ID NO: 257613 - DNA, 126 bp, Gossypium hirsutum
tatatatctatattcagctcatagcggctcaattggggttgtagcaatggtggatccgctgtatcaccgccctcaccggcttctcctcgacaacactggcaccaaaccccgtagttctttcaccaa

SEQ ID NO: 257614 - DNA, 392 bp, Gossypium hirsutum
ttgcccacgcgtccgcccacgcgtccggaaaaagactccaagtgctaaaaaagccgaacgacaacacaaggtccgaacattaatgtcgatgcggtgatgatgtcgacggaagctggctgatgatcatcctctgatgatgatatgtttgaatagcatagatactttctatcatcattttgtcttcagaaatttgacatattcttgaatgtctattaccatataggttcatgagggcaattttacttcaatccttgctgaaggggtcagtcatggtttaaaaccttggtaagcaagcgaccttaagtttcttgctatccttcattctttgaagggattaaggtaggatagggaggatttcttgtttcaactttcacaatccatgtagataaaaa

SEQ ID NO: 257615 - DNA, 354 bp, Gossypium hirsutum
tttccacgcgtccggaaggatgatcatcacactaagattaatcttcgagttcgcatgaatgaagcggtcgaagcattcataaatcaaaggttaataagtaaccagtctacggattttatcgatgcattggagatttcgaactccaacaaggaattgttgatgaaactcctgcaggatccaaattcactgctggtgaaacatgttcatgaattatgtgattctcaggcaaagaaacagcaaacaaaaacatcatcactgtcccaaccattgaacacaatagttgtcttgaaggctgtcaaacaaaactgtcctaatagaatcagtaattggccatcaccaaagtctcattatagt

SEQ ID NO: 257616 - DNA, 358 bp, Gossypium hirsutum
ggccacaaaaaaagagagagagagagagagagatttcagattttgttgcagtgtccaatcattcggttttttttccttaattccccccttttttttctttaattcccagcttctctgaatctctttctgtctttcaagctgaaaaaaaaaggcaaaaaaatctgttctttttgaaagccaggtgattcagaatagagatccaggtttgggtttttcttttaaattataaagttttaatctctactttgatcagctaagagggtttattttgggtccctcaaagttgggttttgcctgttctttggttttgattaagaaacaggtccgttttttttggatatggcagctgttatagata

SEQ ID NO: 257617 - DNA, 405 bp, Gossypium hirsutum
tccacgcgtccgacgaacttctcctataagcggctaatgattaatctccatcgccctttcataatccacagccctgaaatggtttccaagattatcaagaaacgaactccgccacgatccatcaagcgccatcgccaccaccaccggagaaagacttctccggtgaagaagaatggttcgttctccgtcattgcctccctcaacaagtccatcaagacttgccgtcgtcgcatcgtgaggcttttctcgaggttagcccatatagcaaccccttccaccgccgccaaacgctaccgcaatggcttccaactcctcaagcaagaagaaaacgaagagcaagaagagttctgtgggttcgaaagcaatttcatcgatcctcgtgctttagtgttcgagcggtgcttg

SEQ ID NO: 257618 - DNA, 123 bp, Gossypium hirsutum
gtaactaagaaagatctgatgcaagatatatcttcagaggatgtttgtgttgacatgccgggagcaaacgctcgttttgatgggtctgatatacggagtatgcttcaaaggtggtttcaagaa

SEQ ID NO: 257619 - DNA, 198 bp, Gossypium hirsutum
tccacgcgtccggaacctcagaaaaaaaaaacagttattaaacaaccaaattcccgtatattcttgctagttttaggaaatttttagccctaaaattcgtttctgtttctcctgaatctgctaatgtctgctacttctgctttctaaggtacgaccaccgcttttttttcgtcaaaaaaaaaaaaaaaaacaagaaaa

SEQ ID NO: 257620 - DNA, 433 bp, Gossypium hirsutum
tttttcttcttctcatctcagtcgtgcaccctaaatccctaaataaaagtttgtttttcttcagctgaaatcccccaaatttcccatttccaacaacaccagtcaatacacctacaccaatcacacttctttttccttttcatttcactgcactgaattcactcaccatagctactccttttctctcgatctgttagggtttcttttaattttaggctttcaatacagtttccttttaaactggaaggagttgaaagataaaggaaacgaagaggggagtaaggctgttcgctgaaataaagagataaaaaaaaaggttgaagaagatgattttcaggttttttttacggtaaggtgttccacgagcaccttcttggaattaactgtgttaaatggagctgcttccttttcactgtttacttggcatattggt

SEQ ID NO: 257621 - DNA, 346 bp, Gossypium hirsutum
gcgagcgccgcccttttttttttttttttgtcataataatccaacactgaaattctattaaaaactagtacttgtgcaacaataactactactatctagtacaacatgaacatgatagatcacacacaaacagtcaacgaaccatgacgcccaacatttttttaattttccacagagctaatcttagtgcttaatatatactagaagcagcaaaacgatatatatatatatattccacacaccacaactacataatattaataattataggacttcctctctatccattctgcagtgaaaatagagagaaagaaagccttaagcaaagggtctagcttagcacttt

SEQ ID NO: 257622 - DNA, 259 bp, Gossypium hirsutum
tttattcaccaaatcactttgataatggactgttaaggttctacatggcaccgatgagcgccagccggagaggtgggtcaggcaaaaccagggcaagcaatgcacattctattgcaaggaccttactaaggttgtactgaattttagattcataagttgtttttctttggtttaatgttaattttgctgcacttgttatgtaaccaaacatgcctctgtattttggtggttggttagattaaaacaaaagcatttcttg

SEQ ID NO: 257623 - DNA, 398 bp, Gossypium hirsutum
tccacgcgtccggaaagtatttggcatcgtttgaagcaaatggggtttcagtcactgtgcatgaatgcagtttgcttaaaagcttttccacttcattgataatagcaaacttgtatgtagctatatatccctgtgagtacttccaattccagaaaattcgcaattctttttctagttttagggaaatatagctatctgtacacgaccaagataccagcctgttccacagactctacattctgctgcccttgtccaccatggatatttgttgacaggtgacctgtaatggaaccatgaactttctataaagcattttcataattgcttgacttttctgtgtcacttgcaatgcaaactaaaggtctacattatcatcactgatggtacttacctctgga

SEQ ID NO: 257624 - DNA, 279 bp, Gossypium hirsutum
ctcacgcgtccgaaatatttatacccaaaacatcaatggttcattacctgatgttgaagttcacaatggtggcaattttactactttaaaacccattaaatttccctttcttgaacaagtggggcttaatgttagtcgctaggtactggcaactaatgccactagggcaccatggtatgcatcggatccacaggagccgtatgtggctgcggggatccgcgctttcaacagtatgtaacttgcgaccaacaaaaactcaccttgacaacacacaccgga

SEQ ID NO: 257625 - DNA, 225 bp, Gossypium hirsutum
tcgtccacgcgtccgcccacgcgtccgcccacgcgtccgtagactttggagcatgtttgtacttgtttgttttaagtagatatgatttttatgtcaagaacacgcaaaaaaggataaaggagagaaccctatcagcctatcaagaattgtatttcttggagccttttagcaaattataaccatgcacaaaagttatccagtgcttatatttatggcttttctact

SEQ ID NO: 257626 - DNA, 275 bp, Gossypium hirsutum
tccacgcgtacgaataaaagtgaatgaaaatttctctcgtttgagaagtgaatcactacaaaatatatatcttccgcaggtgctcttatttgatgtaataggaggcagaattacttaaggctgtagagtagaaacggaggttgctttctcttttatgaatttctcttcttcttttttcactctttcttttgaagtatattaagataaatctaaatgttcttgctaaagagcaagattattgagcactttaaataaaattcaagcaattatgtgcc

SEQ ID NO: 257627 - DNA, 416 bp, Gossypium hirsutum
catcattgccccctttacttctaccatagcaacaagtccaattgagtccggtatcggggttcctcctacccctaatttcagcaccacggtaactcaagaatgcatacgatctgctcagcgatccattcccggcgatctaccaattgcaaggagagcttcactccaccggttccttgagaagagaaaggataggatgaccacgagggcaccatacgagataagtaactccacagcatcttcatccaagccaggcgacgacaagtcatggctcggtttggctgctcaatctccgtagtagtcccagccgagttgaaaattttcaccttttttgaggcttatttattaagcctcctagaccttttttagcaggttttaagcctgtctttggtttttcctcagctgtctattggtttcta

SEQ ID NO: 257628 - DNA, 378 bp, Gossypium hirsutum
ccagatctctttatcctttatcattattatttgtttttttcctttttctttttcatataaaaactgccattgaatcgaggcccagtggatcctttattctataaatcgccttctttgttttctttgtaagcgagacgaaaaatacaaactcaagaatttgtcggttttttggctcttgttatagagatcaagagtgtcctagtgggtaaatctgagtttgttcgaactgatccatggattctgagcaatattatgctcgggaatggaggacagtcccaggtgcttcaacacccgagactttgaatggtaacttcaactgcaatatctgcttagattttgcacatgagccgattgttacactctgcggtcacctttact

SEQ ID NO: 257629 - DNA, 411 bp, Gossypium hirsutum
cccacgcgtccgcccacgcgtccgcttatctccatcttaaaattatttacaaacaaaagagaacaaattttccagggaatgggaaggatattatgaggttgaactgcagtaattccttataactgtaaattttaacagaaaatgaaatgaaatgttgacagaaacaaacctgttcatgtacatcgtttaaaatctcctctcatcttcaagggggatgagctaatctcattcaagttcagtgtgcattgtacggggttaaccccaaaacactagagggattacaaaaattgttgtgtatgtgccattgccataggctatatgtttagcattcaatactcggcttctcggtttacaaaacttggtgataaccttgatacttaaaatggttaatacattgaggtggactcaaaa

SEQ ID NO: 257630 - DNA, 449 bp, Gossypium hirsutum
atttttcataattttaatacaaattgatattgccatcttctttgaaattcttaaccaaaattcggttacttatgatgtcacaagtggctgtacaggagaccttgatatgatcatctttttaataacattcttgtagcatgttgctgttctgacccgtgtcttaggcctactcccttgactcttgcttggtcggatgggattttttgcccatcataacccttttccactcaaaacatcaaaggacaataattttttttttatcaactacaagaagcatgacccataaaattgcaaatatgaaagtcgtttctaagctttaactactcattcctctgattggcatgatccaaagattacattctgctgctttctgaaatttaatatattagtccttgatttttttatctcatctgtaatgggtcaatgtcaccgggcacaaatttcaaata

SEQ ID NO: 257631 - DNA, 373 bp, Gossypium hirsutum
tccactcgtccgacaaaatggatgaggcaaaaacctactttctgatgttacatatatatatacacacagatagggggctactgttttactatgtctagaaattcacatctaatgctttagggaatgagtaataatttactcttaaagtaggaagttagtatttgcctagataccagaaattgagtttggtgacccatggacgatcaaaataccatataaagaataggctacagcttgagaaatgaacacttgggtatagttgcattattaaatttttggacctgttttaggagtttactttgatgctcttcataattacccctctttgccatccccaacccaagaacaaaagtttctattatgttgttttcgg

SEQ ID NO: 257632 - DNA, 442 bp, Gossypium hirsutum
cttcgtttggctctgtcttcagcagctattgtattgcgcataggtttagtgaggctaccatgagttttgatgtcatggatagatacggtgtagaacaagatgttgttgcagtcaattcacttcttagtgcaatttgccacgaggacaatcagatgtcggttgcaatagagttttttgataagatcaagatgaagatcccacctgatggggatacttttgccattttgctcgaagggtgggagaaagaaggcaatttggctaaggccaagaacacgttcggcgagatggtagtcagagtaggatggagtccgaagcacatttctgcttacgatgcctttttgaccacgcttgttcgtggctctcaagtcgatgaagctctcaaatttttgcaagttatgaagaagaatgactgcttaccaggtttgaaatttttctctaacac

SEQ ID NO: 257633 - DNA, 103 bp, Gossypium hirsutum
gtttttcccttttaaatgtggtgttgaatatctagactgatcgtattcctccaatataattgttcgtctggggtttggacatcggtgataattattgcttgat

SEQ ID NO: 257634 - DNA, 381 bp, Gossypium hirsutum
tcgcttttatcctctctctcacaaaaagaggttttttttatcgatcaacaaaaaaaattgtttatttgcagggcgccacgatctgcatttctctcgaccgtagcgaataattcaattccccggcgtcgtaatctcctcctccatttgcaaatcaatcgatttctttgatctttgagtgtaatccatggagggttaagaggcattgtttttgaggtggaattttagctgctgacgtggttttttttggatttggaaaattcggaaacaatgtctacgagaggtgagcatcaaacggtaccgctgtcggttttattgaaacgagaattagctagcgaaaagattgaagacccggggattgtacacgggctagcaagtcacagc

SEQ ID NO: 257635 - DNA, 403 bp, Gossypium hirsutum
tcgactctgctctgtttctcctctgttggtagttgttactggtttcttacactacttgtaagataaccactattatctaccaaaacagcaaaatagagaggaagttgtcacaaaaatttccggttgttacactattagttacttcaaattcggtggctttctctactattttatcagtgttcttggggcattacgggcagattaagaaagggtatttgtttcatggtcatggaaaggctgaactcaaatctgtaccttcagaactgttacataatgaaagagaatgagaggctcaagacgaagcacaagctctcaaccaggagaatcaagccctttatctgagctgaaacagaaactctcaaaggccaacaacaactcacagggaaaaaattcagcaaacact

SEQ ID NO: 257636 - DNA, 355 bp, Gossypium hirsutum
cttttctttactttcctctcatttctcttcttggccttccattctcaatccggggctcgtctccaatccttcgttgattttcagcataccctgggacccttatttccagatagcccaaaattcataacagaagaggcggctctggtatgaagtaagctgatcaaagatccaggacattcgcgaaaaatatggtcgattgtttcagccatttctccacatcgggggcagcttgtactactaacaagttttcggtgctgcatattaaccctgtcggcaaatagttccatgaaattctccatactgtaactttgattttatttggaagatttaggagtcaaagtttttttgtaaaaat

SEQ ID NO: 257637 - DNA, 358 bp, Gossypium hirsutum
gttcatagtcgtttcgtgcgccccatacgaccttaatagatcaatacattatgcacagtcatctcgtgctacccgtgcgatcctatcagaacttcctccgtatcaatgtccaaccccatgcaatatgttgcgtatggcatgctcaatcatcacacgtgtatgcaaaaatggccatgctcaataacaatcatttaaacatatattaaaagcatatcagtcgtacaatcaccgtcaagtcaattaaaacacagtcatacgatcacagtcaattgatcaaattcatagtctaagtcggtcatttacccacaagggcaaaacaatcattttaccctacaagggtatttcggtaattttacac

SEQ ID NO: 257638 - DNA, 338 bp, Gossypium hirsutum
cttacgcgtccgctcgaaaccctagtttttttagtttccgtttttgcaagttgtagattttgaggactatacactggtgtttcatatgctgggattttgaagtttgaatacttgaacttttaatcatcttttcaagacctctggatcggcggaatggctaatatctctgcagactcgccgactcctttggcaacggatgcaggaccggataattcttctacggaagatgcaccgtcgaagctgtcatcgtggactagaaatttaaaaattcctcagccttttgctgcctctcaagaggagttaacacctacagggattgctgggaaatcaactttttc

SEQ ID NO: 257639 - DNA, 302 bp, Gossypium hirsutum
tttcttgtccggtagggtgctcgatggctagctgcgataggaacagataggctattcatatgtcaagcgctgctacaagtcatttattgtaagagggcatgacaagagcaaccatccttcagtcaggttctcttggtctgcttttacccatggctgtaacgacgaaatgtagaacttctccttccaggcaatcttctctatccctctgttaactgtcagtggccagagaatgagcaagagtattcgctgatctaggcacatgcttaaaatagatcctttgaaagccttctttcatctgttga

SEQ ID NO: 257640 - DNA, 321 bp, Gossypium hirsutum
gtccgcccacgcgtccggaagaccctcgggacaggcctattgacgtacgttacaactcttctcttcgctgcatcattgtaattatttccacctatggctttaagccttcatattgaacgctttgatttatggccttttgttatgtgttatatccctctgaatcatatttctgcaactgcaacctttttcatcttggaacaaggactcttaaaggcttacattctgtataccgtggagtactgccattgaagacgtagtatgggccaaaaacagagatgtaccggaatttcatatgcctgtatcttaagttccatgaaaata

SEQ ID NO: 257641 - DNA, 315 bp, Gossypium hirsutum
tttgtcgcgtgggctactacttcagatagcaggggaaggaaaaatcggcggcggcagaagaagacgatggtggtgcaccccgttcaacggcttttcgatgcttgcaaggacgttttcgcccatgccgggactggatttgtcccaccccctgataaaattgagcagcttagcgctcttttggatgacattaagccggttgatgttggtcttagtccacgaatgtcatttttcagtccgcaagcagctcggcgagctccaacaataacctacctgcatattcatgaatgtgaaaagttttcgatgggcatcttttgc

SEQ ID NO: 257642 - DNA, 432 bp, Gossypium hirsutum
ctttattcgggaggcaatcatctgagtcgtttaggagacactgtacttcgggtccattgagaacggggagaggcaatcgtttctggcataaaatgcaacaattatcacggggcagcatcagtgaacatagtgctatgatcaagttctggtcagattcacattaaaaccaatgtcacttgccctttgagttttgaatgtcgaatgacaaactgacggcacctgctccgcatgcctgatgaaaaatgttgtgctggtttcggaactgggaatttaacatggtaaactcttgtgctgcgagattcttaacccgaaaccctgagtagctttcgttacgcagctgatcgatgaagcatatagagccaaagtattcttttatttttcgtgttttttttctgatagggggaaagagtttcatatgatcatcctcacact

SEQ ID NO: 257643 - DNA, 403 bp, Gossypium hirsutum
ttttcattgaattttctgatgcttctttccctagttgtttttgctctaatggcttacgccatggctgccgaggctccagctccaagtcctacgtcgggatccggctcattctctccttcattcgtctctgttttcgccgtcgtggctctgctcttcggctccggtctccggttctgaaggtgatacaccttgttatggcttctacggttgctgtagagagactcctggatttatatatacatatattcggctttgaatttcaataataatagtagatctaagggatgattctatatataatatgagagagaagtaattatgtgcatcaaagattatttgattgttgatgtttggacttcaattattttgttagcattatgagtggtattttcactttttatat

SEQ ID NO: 257644 - DNA, 359 bp, Gossypium hirsutum
tctctttcccacttgctttgaatgacattattaactgcccaggatgatttaaattcatccatacttcaattattgtaggacaatattggaaaatttaattgttgtcttcctcagagttacgacatcggggacaatgaatttccacaaccacttttttatgcttgagattagttaaaatagagatataattccaggagattcttcatattgtaattttaactttcgaaggaagatgtaaattccatattttcctgtaaaaatctttaatctcggtctgtataaaattattactaggacccgaattagcctcctgtaatagtttataggcacttctaactgagaaattgcctgacggttct

SEQ ID NO: 257645 - DNA, 412 bp, Gossypium hirsutum
gttttccttttttttaaagaaagtttttatttgttggattctttttgacattaatttaagagtcaaaataaatttacagagttgtaaatacagctcactcaacaagacaactacttcacattttgttacatggactctctcattgttctaaaatacctgtgtccagccattgtgacctttgaaaaaaattgagcatacccacaattatatccgacatttacttcgagtccaagtgatctagaaaatattcaaagaacaggggggaaaaccgaacaaaatttccagcatataatcaagagaataaaagttgaaaaaacaaattctaaccacaaacaaaacaaaaagagcaagtttgttgggttcggtgtttgttggtattacaagtatttgatgagtaggtatatgatgacag

SEQ ID NO: 257646 - DNA, 103 bp, Gossypium hirsutum
ctttcgttttcgggcgggattacccgctgagtttaagcatatgaacaacaacaaggtggagaaacacatggaattaagttattaaacttgtctgtttgaagag

SEQ ID NO: 257647 - DNA, 313 bp, Gossypium hirsutum
ctttcgtttccgcgattatgtcgaggagttaattgggtgtgcattcgtggtgacgacaaatcctagtgcagttggagggtgcagttgtaaaagttcattcatggtgaaacagtagatgtttcaagcgcattgctcatactaaatcaattttttttttgtcataacatttatttagatgcaaaataatatgcacactttggtctcgtagttctatggtgtttggattcgggatgaatatcataatgtaacgaatggctgctgattatctggtaacgaggaatttcctctcaatgagattggttactctttttac

SEQ ID NO: 257648 - DNA, 420 bp, Gossypium hirsutum
ttcttttgggggcgaagagctgctacaaccttgtatgtggaacggtaccagacgaccatgttacctatttgcaaggaaattctatccagaaaccttagataaattggtgacactcctcaatttttgactgaatacattggtcggatcggtcatattttcttcgttccatctcgtttttacgtagaggtttatacatttgtaaatggccttgttttgcaatcacacaattcttgagtgcaagcctgcaagggtaacaggaagagaacaacgaggatgacaattgaacaaggccggagggtaacgagtttgttagggttgcgtccttccggacaggtaatttcttgtccattttctcccccattttgtgccattgatcatatatgaaaaagaacataaggggaaactcttttttcttcttct

SEQ ID NO: 257649 - DNA, 379 bp, Gossypium hirsutum
tttgtttgtttattccattatttatgttagatgcaaatctttttgggttagtggttagtcatggcaagtctagcgggagatgtggctgaaattgtctggactgtaaggcaacatcttttcactgttcaatatatcctcctttgacagcggtctatgctctatatttgcggtattaaaagatctttttgagcatatgcttcctgccttgatggatcatcagtagtgcttagccttgatttaatggataagaaaaatttgcagattgtatagcctacgcagaaggctgcttgtctaacttgtcgggttgtatttgccgtaatttgtaactactgaatgataaatgctcttcgtgataactgtcatggtttattacctatta

SEQ ID NO: 257650 - DNA, 470 bp, Gossypium hirsutum
  unsure (1)..(470): unsure at all n locations
ttgattttccccagatacaaacagaacatgtctgttttgaacagatcatatagttattcaaaggtgaataaagaagacccagatgagataatccatagacgagctcagttcttgatttacaaagtgctagaacaagctgattctagaagaaaaccatcgttctttcgaatcaaattatgtaggctgaagctgaagattggtagaaaattgaagaaattgaagaaaactgcgatggtcagtatttctggtttaagagttgatgtttacagacaggtttttaatcagttgaaaacttggagacgattgtttaaccgtggtggtaatgatcatggaaccattgctgccgccattcatcgtcctttgctcacttaaaacattatatgtatgtatatacatgcatatacttatatatgtatatgcatatataagatntttatgatttgttttggttaaaaataggagagttctgc

SEQ ID NO: 257651 - DNA, 505 bp, Gossypium hirsutum
  unsure (1)..(505): unsure at all n locations
tttactcttccggtgtctttttcggttcggagaagaaaggtgggtaaaagatgcttgcttatgacctgcaaacggaaacacgcaaagatatcgggtcaccaacagcatgacgcctatgtgaacatgtgtacaaagtgagactaatctgcagcttctggtgaagagcatgtcttatttttcaccttcttcttgacatttatttaaggaggctcacccttaggtattgtgggttggcaaaagaaaaaaaaatgaggatgaaattctagccttattgggaaagagatttggagttctatgtaagatatcacttccatatagtatctaaattttttgctccattttattttggggcctgaggaaaaagaatatacatagagatattgttaatcatttttaggcaaccatttttgaggagggttgaatactgnctgatgacacttttctctttatgcattaatgcctcgatgttctcttcacaatcttggaatggaaaatgatcattctt

SEQ ID NO: 257652 - DNA, 454 bp, Gossypium hirsutum
cttactcgtccgcccacgcgtccgcgaaggctctttctctgcccaccgtgccaccatggcaccggcgaccgacggtgcacagacaagggcctttcagccccgtttcgaaacctcctttcccttttttttaaagaactttaaatcagtttttatttttttttcagaaatggagaaaatgattaacaaacgaacatacaaccactccgtcgccttttgggaccctcggacaccgactacgtccgtcgacgaggagggagaccgattcaggcctagacggaagcgatggtgcagaagcttgccatgttggtacaagcgatgtcaggggagctgaccttcgggcgttggacgtgccgacaatgcacgtgggagggggcagtggctagggcggcttctagggtttgattgaaaatgttttaggatagtggctgatgtgtattgcgtaattgggtttggg

SEQ ID NO: 257653 - DNA, 413 bp, Gossypium hirsutum
cttacgtttccgccggcatgcataatgataagcagaggtccacaattccagcttatcaagcaacagtaatttggagactgcaagagcaaaagattgaaatcccatcctttacttgtgcagacgttgatgaaagggttgcatgaaatccatggtttaaattctgcagctatgccagtaaagatggaaatatacctaaatgagcatctggaacttaaggagcaacgactgtgatcgaactttttatcgatctagttagttttaagtctcatgatgctttcgtttcttacttctgcaaatgtgaatactgaaaaacagtagtcttacatgtagtaatgccttgaaagatgctgttttgtgcaagattcaatgcacattccatcatgttttcatattttttaaagaatgtttgattt

SEQ ID NO: 257654 - DNA, 488 bp, Gossypium hirsutum
tcggtttcttcatttgttaagttctccttgtgctcagagataaattgattcttgtctttttgaattttgcaatttgagaaatgcactgcaaggtattgattttatttctccctctgatgatgaaatctgtgcaaaatggttaggaataaaagtggttcaacaggggaaaacccttgtgattttgctcttgcttactacttcgtatcactcatttccacatttcaccttgtgtatattttagcatttatctttcctgtcttctaatctgcgccacctttcctatccttcacccactccacacgacacacatataacccccttctctctctgttcaattgcagtgcggatggttcatcttttatcgtttactctctctttgtttccgtttgaagagatttttaagctgtttatcttttctcttgataataagctctaacggcaggaaaaaacaaaaggaagggatcttttgaagtggaaaaaaaagagaa

SEQ ID NO: 257655 - DNA, 508 bp, Gossypium hirsutum
cttactcttacgcccacgcgtccgcccacgcgtccggtttcagagattttgctcgagtgaggcatattatctggacgttcttgtccttaacaacataacatttaatatgacatatatgtgtgatataacagttctataacttcatttgtagctaaaaattttatttgtccttggatgcagtgtctatctgttgtccccttggaaattttcagatggataattgcagctgtagctgggttcatgtcagcaacttttgtggcacttaatctcaaagctcacattacttcagctggagaaagatgggtcttaatcgttgctggcatctttctattgcagctgggtcttgctgttgtgctcaaactctatttgttcaccgtttcggtataagagtaaaccgatcttccataaagctaaatcggcttagttgtagatcacagagaaagtgaatttttgtccttgggccgtctaattggcgaaaatattattcatgacaagtaaaaacatcatc

SEQ ID NO: 257656 - DNA, 205 bp, Gossypium hirsutum
tcttacgcgtccgatttttttttctcttacctatcaaccttttttgcttgtaatttatcttcatggcggccatggtttctgcttatctcttcgtttttctagctctctttggcatggttgcatctgactctgatcatctccaggatctctgtgtagctaacaaagctgcaggaataaaggtgaatggatttccttgcaaggagga

SEQ ID NO: 257657 - DNA, 317 bp, Gossypium hirsutum
ttgcttctaagtaatgtgtcatttttgttgaaactagggggttatttttttggtattactcctgactcatctaccatatggcatgaaaaagtaattggcaaataccgctgtttctggatttatgtaatttcctttttctttcttctggttactgcttcacctgtttttgggaggtgattgtgtaaaaattttagtgtgctttagttattgtaagaatatttttaacatttttaactttaacattattgtaagaatattttgaattatacttcagttagcaatttatatcatatatttttcattgaatttgaaggatc

SEQ ID NO: 257658 - DNA, 301 bp, Gossypium hirsutum
cttacttcgtccggttttattgtccttgtaggggaaaggagatggtacctcgattatcacttttggtttcaccggctccttctttgcgtcataataaattattaatggtcggtcggcgctatacgggaaacttgacaattgatggttagatgcgcatatttctcctctataggcctcttcgccgttataaaaaattcaatctctttattatccatcatattttgcagtaatctcttgaactcttcgcaggattgaatttcgtgcccctcaataccatggaattcgcaaaaactttgacatt

SEQ ID NO: 257659 - DNA, 408 bp, Gossypium hirsutum
cactgaaactctttccttctttcttttctgagcaaagccttaaggcaatgtgagaatgaatctctcatgagttgatgagtatactctgtgcttgtcaaactacggatcctgcacatcaaaaattaagcttagataaaatgatattaaatgttaaaagactcaggaagtattttgagtagagatttggtagctaagaggcagtgcccgtttatggcccgggaagacctcgttttggcatagcatacttgctatcatctctattattaatcctcttcctgcagctcttttcaactttttgagctgtactccatggaggagggtctttctttaacagctttctaaaggatttgtaaatttagatatttttgaaataaaatctaggataatttcttccttctacttaaaata

SEQ ID NO: 257660 - DNA, 239 bp, Gossypium hirsutum
cccacgctttcgcccacgcgtccgcccacgcgtccggagcttgattctcgattcctccgaacattcatcttgtttagccaaggtattgaaaaagattagtcctcatgaacatgaacaaatataaaaacagttgtaatatagaaaaacaaaaattcaattggaaggtcactatatttgtaaagaaacataatgtataattagttccagtttgaaataaatgtaggaattggcttgttctg

SEQ ID NO: 257661 - DNA, 310 bp, Gossypium hirsutum
tcgacccacgcgtcctcctatgcgttcgcccacgcgtccggtgaaatcgtgggttttagcagtaacgatagtatgcatgtctattttctggttccacttgtgtaaggccgatgaagatttgcctgaaacaggcagttttggtgatgatccagctcacagagtcgccttggcgttgctctgtaaagaagataaatatatttatagcagctgtgaagaatctagcagattgagtgcaagtggaaatctagacgccagacctgaatacaccgactaatattgcagtggaccttgcctctcagagacccacctt

SEQ ID NO: 257662 - DNA, 396 bp, Gossypium hirsutum
ctcacgcgtccgggccgcccttttttttttttttgtttttttttttttttttgggacaagtttaacaactgtgtaataaagcaaaagggtgaaggaacattgctatgaataactgcctttaacactgttaagtttcccctgagattccattctaccaggtcggaagctgatcttaaagttttggtgtcgcacacagcattaaaaaggatcctgactttggaaccattttcaccacaacgcattacagaaaagaagactttgacagctgttacttcttttgaaaacccagatgtcatagggcaatctcgaaagacgtggaggcttccttcaacttcagatctgcattggggacatctgtcatttgtaacaactttcctgattctgaaattagcaaag

SEQ ID NO: 257663 - DNA, 467 bp, Gossypium hirsutum
ctttcgcgtccgcccacgcgtccgcctgattggggtgatgacaaaaagccaagtcccgagaaaattgagctggacaattcaactcagttggataagcctgaagatgttaatgaaccccaggtgcaaggactaggctttgatgctttggataagggtttcgagaaggaagaaccgaaacagaaaggcaggaaaaaccgaaaaaagaccaacaggaagatgcaagaatggtggaaagatgatcatttgggtgaggtaggcaaaaaggatagtaagctgaagcagctcaagacgaagtggaagaaagggtttaaaatgccacattttgatctagggagacggttttatttttgcaggagcaagaagttcggggaaccgaatcaagatgactgtgatgcgaatggagaattcagttttagaaggggatggaggagaaagaacaacaattcgatcggaagtgacatgtggag

SEQ ID NO: 257664 - DNA, 457 bp, Gossypium hirsutum
cttacgcgtccgctcgacgggctaggagccatggagttggccatgggggcttgggcagactgggtagcatcgaaagtcattccccagaagaaacgtgtcttttttgttacaatgtcaccaacacatttctggtgagagtctatacccctaacctcaattgttctatgtttctctcagttggataatttcacctggtgaaagcttgccaacttatctagttgccataaatcataatatagaggtatattagacagagatgacgaatagatgagactaataaatgcaccatggagttactaaaaggagtgatctgaaaatattagcatgctgtatatactttctggggcttgggatcctagctgatgatctggaaatgttgaagcattgaggacctggttacaaactgaatgagctgcagatttcatttttgatattctatttagactttacatgcatg

SEQ ID NO: 257665 - DNA, 474 bp, Gossypium hirsutum
gacttggaaaatatggatggtcttcacatgatatttaaaatagtcaaggggataagttagtacactttttcgcttaaatgctctttttctttattaagacgtgcttgaatttatgactgattcatggatccatgatttatgttattggttatcttacagttttgctcaatagtgctcaaatttttgagaaaatatttggagacgaattgagcatggatattattggttctcttgaatgtaagtatatcactatttatttacagatatattatcagggactgttggtggattgaattgaatgttcaatttgcaacttcatttgattgtttggatgcgggcttatagttataagattttgtacaattattttttatgataataaccttttaataacatttttttcgttttatcactctttgcacgtgtagttgctctataaaatagaataagagaaatgttatgtaaacatgccat

SEQ ID NO: 257666 - DNA, 368 bp, Gossypium hirsutum
tttttttcctggagttgcaatgtggcagttcatgccgcctgcagcagtggatacttcacaggaccatgtcctccgccctccggttgcctaagttggcaaccaacaatgattggggttgcattttgatgcaatcaagggtataagttaatgttctgggctgtttagatttcactgaagtttttctaactggctttgttgggtgactgtcattgtactcctacgatttggtgctggtaatcacatgtaaatttctaataagttaatctggcaacctttgtttctctgtgttctaggttaaggctaggtactcatgtctgcaaaacaatttgttttgtgctcaatttttataattgattttactttgcttc

SEQ ID NO: 257667 - DNA, 413 bp, Gossypium hirsutum
tcgatttgaatgcccccattccaagtcccttgctccctctccttaatctctacatatgcgcttactgatttcttcaattcttatgacaagcatgcatgatctcaactggtgccactttttgtaaaagaattacatatatacactgtaatttacatgtatgaatagggagtgggaggatgattcatatccctatctcagcaccatgattttcaagttctatgatttgttttgcttctattttaatgtcgtcttaatgcatcagaagaaggaagaaggagaaagacataaaggttagcttccaagtttttcttgatgtcttttgatgtaaactagctagagacgatcagtttgctttaattattgtcactatttcaagtaatttaaatatatatatatattcttattcttgtgag

SEQ ID NO: 257668 - DNA, 342 bp, Gossypium hirsutum
tcgtttacgcgtccgtgctgagtcacatatttaacgcttttccagaagtcttaaaatcttattttgaaaacttggtacatttgcttgtttatgattgcagattcattcggctgctttctgtttaccatcctttgcaaagaaggtgattgaatcaaaaccttaagggtggaaattttgaagctttagaacaaaattctagttattggtgagcattagttatcatcctttgctttgatggcccagtgtagcaacgaaccttggatttggaaatttagataatgcactttcttttttgtctcgcttaggaagagaatttgaggtaatggttgtagaaggatatat

SEQ ID NO: 257669 - DNA, 404 bp, Gossypium hirsutum
tttttcacgcgtccgggaggtgaagaagaaagcgttgacatggatgtagaaagcgatgaagacgacgatgatcttcttattcccaacgtacatgtcgatgaagatttattcaagggattggaagaactggttggaagtggtagtaatggagtaggaatagtcccgacctttggtgataacttctcgtcttggagtaccggtaactccgctgccgccggagccgccgctagtggtggctgttagatattgattttcatttttaattattgtcgtcattttcttttcggtttgggtacaaagaaattaaaaatacttcgattttaattttttttcctttttattatttctccccagagagataaatatgtatgataaagtgcatataacatcacaaaatttattct

SEQ ID NO: 257670 - DNA, 469 bp, Gossypium hirsutum
atcggtctaggcaaaaactgccatcctgtttgagaatatgagagaactcggagttttacttgggaaaggtgggctgcatggaaatgttttcagaataaagccaccaatgtgtttcaccaaagatgatgccgattatcttgttgatgctttggattatgcaatgtcaaagttgtgagcaaaaggggttatctaacttgtggatcctttggtatcaaagttcagcataattttgtgtttaatagtaataagaaaagtacattttgtttgcatttgtatttgtcaaaaaggatcatcaaaatcccttctatattgtgaaatatgtttctctgtgtttgcatttgttgattggattcatcgaaaataagtatagttataggtgggaaacggaaaggttgtgggtatgggttggagcattgtgagttcaggttcatgaagtatataatcattttaacaagctattctagatttt

SEQ ID NO: 257671 - DNA, 318 bp, Gossypium hirsutum
  unsure (1)..(318): unsure at all n locations
atgaaaccaaggatccaaggagaggcacaccaattagaagcacctattgaccgaacaagtggattatcgtaagttcacataagaatttattcaaagattccttctatcatattctgataaatttgtagtaaaaacatctattataactttattattaactctcgataatatagttggatcacgttgtatcatatcttaataagatttttcatgactctacctattaaccccgtgtagtaagagatctagtgcatgaaacttcttatctatgtaagtcgtttccattaccagaagatataaggacaccacttttgcnna

SEQ ID NO: 257672 - DNA, 206 bp, Gossypium hirsutum
gtgatgaacaggaggaggattcacctacattctgctcactcgccctttctaagacatgaactctaacacggtagttattacattcctacgtatggtaaagcccatcgctaatatggacctaaaaaaagagctttgagagatgtttagtttcttagagaaaaacgttttgcaagaagaaaatttgaaatttgttaggtcatttggca

SEQ ID NO: 257673 - DNA, 496 bp, Gossypium hirsutum
ttgtgttctgcttgtttttctagcaaaattctcaggatctatcagttcatcaaagtacaataataatctcagtgttcttgatgatgatgatgatgaagatgaagatattccccatacagttgagtcacttgtcttggaccagcccaaaacaccgctgtcgcagaaagatgaagcaatagaaaacagtgccttaatggaagaaacagcagcagcagaagttgaaatcgaaactcaaaactgcagcctgcaagaggaagaagacgaaggtgaaaaatggggtttggatcctttgatgaaaaatggtgtttttgttggagaaagcactgaaagtacagatgagctgaacaaaaggtttgatgaatttattagaaagatgaaggaagaattgagggtcgaagctcgacagcagttagttatggtttaatttaaggatcggtccttttcaatggattcaatcaccataataaactccttaattttacatgtttctatgatc

SEQ ID NO: 257674 - DNA, 465 bp, Gossypium hirsutum
ctttgagtatttgattatgtggcctcctgtggtgatagtacataatacaattacaggaaagggtaaagatgggcgcatggaaggtttggggaacaaagcaatggatagcaaactaagagaccttgggtttggaagtggcaagtgcaagtccatgtatggtagagaaggtcatctcggtattacagtggtcaagtttgccagtgatcagtcaggcctgatcgatgctgtcaggctcgctgaatactttgagaaggaaaaccgtggtcgcaaggcttggtcccatctacagcctttgactttagggaaggatgacgatgataaaaatcccaatcttgtgaaggtggatgagaggaatggacaaaaaaagaggatcttttatggttacctcggaacagttgctgatctggacaaggttgattttgacactcggacaaggttgtgattgagagtaggggagagcataaa

SEQ ID NO: 257675 - DNA, 195 bp, Gossypium hirsutum
tttgttacatgcccttgtcgtccctttgatttccttatttttgggttttcttttctctaagtatcatgcacctttttgggaatattatatatatgcagtcttcagtttcttaatatcttaatggaaatgagagtgtcatcaatggtcgtgcattgacaatgtcatcttatttatgagtttcagcatgtgtttatt

SEQ ID NO: 257676 - DNA, 281 bp, Gossypium hirsutum
ctttatttgcctttcttactcttccatagttccattcactccttaattccgtatctcaaagcagctgcatttcattcatcaaaactgagctttttgacatttggtaatttatacatttcatggagtaatatttgttgtcattaaaggctgtttaatctctttgttgaaatggttttccctctcttttaagttgtttataggaagtaaatatatcatttcagtttcatgtcattttgggttaggattgtttcgagtttaacttgttttagatttggctgttt

SEQ ID NO: 257677 - DNA, 357 bp, Gossypium hirsutum
gttgcaaagcctcaacccaagaggcctcgtgctaatggtgccggatatggtcctcgagtcactaatatagctgctgacaaaacattttatcccagagtcactgacaggtacatgcagtacgtgtatgacagaccctatgtttacgccggacctgctgacaactacagccactctcttcttgcttctgctacctacaacttctctcctagtcatgggaactacttcggaaacgggtaccagtatcagactccgtatcttcactaattcccaaaaatggcataaaggtaactatgatcctctcactttagcggttagctttaacctttcaggtgcagtgcatgaatggatttagtatct

SEQ ID NO: 257678 - DNA, 321 bp, Gossypium hirsutum
ttgcccacgcgtccggttctagatcgcgagcggccgctcgcgatctagcagaggaccttcaaggtcttacttgtgaggaaaggtgggtggatacactcattgtaagattcaattattatatgattatgagatttcgtcatatctaatttgtgtattctctgcagcatgtaggagagtttgtttgctttctgaggttcttttgttcattatgtatttttaactatcattgcttgttcattttgccttatgtatcataaatcagtcttcattcattgaggaaattattattattttcttttacagatttcaaatattctgttc

SEQ ID NO: 257679 - DNA, 333 bp, Gossypium hirsutum
gttttgtttttctttatttgaatgctttttttgattttgcttgaatctctgctctttttattttaaaaaatatcgtctttgcattcgattgctctcaatattcgaaccttctgtattgatttcgtgtttttctgtaaaaaagagccccctatacaatgaagatattaacggctttatagccgaatcatattacaactgttaatatttcttgtttctattctcttgtctttgctttgcgtgtttctgctctttgtcttgctttttttttgctttgcaggtgatgggacgaggccagagggtgctatgctaaggcaacagaggcgccaggggtgg

SEQ ID NO: 257680 - DNA, 377 bp, Gossypium hirsutum
gttaattatatgagtttttatgtgatgtaatagtgtcctatttgataatagatgaatgttgtgtagtgtacaagttagtccttaaactatgattataaattgattgaacatgtagtaatgtacaagtgccgaatatgatttgatcaaattgaaatggttatgtgtatttggttttttgaattctattaatgtatatttttagttttctattgaagtgtaatgctgtttgcatgttttgcgcattctttaagttacaataaaattatattctactatgtggtattaataattaaatagattattgatattaaaaattggttggcttaaaagtttgtggaagtgtatgcttatgattgttcaaaatttgtgtcttgtct

SEQ ID NO: 257681 - DNA, 320 bp, Gossypium hirsutum
ttgtttacctctttgacggaccagcaccagtccctatggaaaaatctgccgtgagtactgattcaacagatgttgatctatttgctgatgcaacttttgtgtcagcaccgaccaaggtgactcatgaatcaagtcctcaggcacagcaacaagttgatctatttgcttcccagcctgccattactcctgcagcctctccaactgttgacatatttgctgccggtgatccagttgtgcaaccacacataaagggacaggttgatttattcgcttctcagcctgccattactcctgcagcatctccaactgttgacctcttt

SEQ ID NO: 257682 - DNA, 282 bp, Gossypium hirsutum
ctcacttcttccggagaaatcgagatgaaggagccattgcgcaaaacgaaagtggtgataaggcatctaccaccgtccgtcaccgaaccctctattatttctcaaatcgacgatcgtttctccgatcgctataattggttctctttccgtctcggcaagtccagccataagcaacagagttactcccgagcctacatcaacttcaataggcctgaagatgtctttgagtttgctgagttctttgatgggcatatatttgttaatgagaagggtactcaattt

SEQ ID NO: 257683 - DNA, 245 bp, Gossypium hirsutum
tatcgcatcatcctcaagaaaaagttaagagatattcaatgggcagcttttattcttctatgtgctggctgcaccacagcacaactgaattctcgttctgatcatgtacttctaacatctatgccatgttggatcatggcaattgtgatggcccttctgagcggatttgctggagtgtacaccgaggctataattactaagcgcccatcaaggaatataactgcgcggaatccctggctgtatat

SEQ ID NO: 257684 - DNA, 301 bp, Gossypium hirsutum
cccacgtcttccggtatatgatgattctgaatagcaatcaatcaactcaaccccattaacggtgcaggatgatggggtcaaaagcaagcctgcaccggcgctcgggctgtcgcggatactgctgctcacaatgccctcaaagtttccctcgcatgtaattaaggaccgaataatgagcagcagctaagatgggtcaaggcttagctgggaagatttacatgaaacttgctggagattccatgagagcttcctttatactttcttcgaccagggccttgcatatattaaaaactggcacttc

SEQ ID NO: 257685 - DNA, 357 bp, Gossypium hirsutum
gttgggtggatttatcagtttctgaactagaatcgggtaatagtcaaatgcgttcagattcaacacaggatgaccctcaattggagccattgttgtctcgaaggtcttgaaacttgcttgcatctgaagcaaacgttttggataatgccatttttttaacaaggtgtttccgatatctaatatgttgctcgattgtttacaatttagttaaaagattaggaccgagaactccgattcttgtatgtattgtttggaacattattgtactactactagtagtctaacttatttagtagctgtataaagctgcttcttgtacaaattttgattcaatctactcatttcatttcttaaaaa

SEQ ID NO: 257686 - DNA, 350 bp, Gossypium hirsutum
cttagatgcaaggaggtgtttttcaatgggttcttatcaatatgtgctggccaagtcagatctaagggttaccctctctggtggtcaacaacaccatagccatgatattaagcattcatcagctgaaagagatgcagaagagaaaaagatcagtaatatgagtaaaggtgaaagcttttcagtttcgaagatctggctttggtctaagaaaggcaaattctcaacttcatcagaatcccaaactggtatgacatcttctcttaactcagacttgccatggctgaagaaaacacatgaacaatgaaagcttattatgcttttagttcttatgtcacatgtttcttgttctg

SEQ ID NO: 257687 - DNA, 222 bp, Gossypium hirsutum
gttcattgtagtattgataacaaacacaaagcgattacagcttattatggaaatctcgtgaatgaattcgaccctagttctagggaagatcttaattccacatcgtatgacattaagtgatctgttatagattgtcatcagtttaatgagaaaaataaatcctcaaaatcaaaaaaaaaaaaaaaaaaaaaaaaaaaaaaaaaaaaaaaaaaaagggcggcc

SEQ ID NO: 257688 - DNA, 137 bp, Gossypium hirsutum
ttgttattatcaagtgagaaaacgggccattggaaaagggaagatacagttaggcttggacactaacaaaagcttgggagatggtcccccccatcgttatcaccggccttataaatggtgcgattgttacttccagc

SEQ ID NO: 257689 - DNA, 378 bp, Gossypium hirsutum
ctcacgcgtccgcgttcacttactcaccaaaacaccacacaatcaccccatttcaccacaagaacatcactttaatctcccaacatgtctctttaatcataaaacaaatcgattcatctcaaaaaaagcttgctcgaattgaaaaccaactccttggttaccaaacacttaatgtttcaagacccaaccttgcaaatgaactcaaattgttcttacaacaccaccagcttccattagggaaagattcaaggacagggataactgaaatggtggcttcagtaggacattcatgtgagaaatcagctggtttgttgtctcaatacatgacatacaaggtttctggtccttgtcctgatgattggagtcttgcacagaagc

SEQ ID NO: 257690 - DNA, 373 bp, Gossypium hirsutum
tcgtttaaaacaaaaaaagggagatagagagttctctttgctctcccttcactccctatgtccggcgataggatttcccggtgtccattgcgcagccgttgtgggccagtggccggcgttgcgcgaatggatttcttccgacgccgaggaggccaacgaaggtcttcaaggaggtgatgggagcaggtggaggagaggcgatgcaagtgaaggcacctagggtttgctgcttccttattttttttctgctggtggtttgggctagggtagggttgttttaggtttagtgggccgggtaagattgggcttgtacattaacaatagttcataagatgtaattacaataatcacatgatttaatatcaatattagc

SEQ ID NO: 257691 - DNA, 284 bp, Gossypium hirsutum
ctcccctaacccgattccttttatttttcccccaatttccctaaatcggcagccctccgcatctcctcaaagggttgtagcagaaggaggtctcgaactagcaggtcaagtggtacagattcatggagaccttatggatgataactaccagacattggaccaagctgtttgtgttttattctatttttgttctaagatctattaaatctaacttaattttcacgcattctgttgtgcaagtagatcattcttctcttatgtagaatccattcattagtatattt

SEQ ID NO: 257692 - DNA, 191 bp, Gossypium hirsutum
tttacgcgtccggtttataggcatgagattatatattccttttatgacctttaacatggaactcagttgagttctttcatggagttttggttgggtttactttgtttaattgcatgtttgtggagaataaagatggtggagtgtagtaacaaagcatgagcagttaaaagtatggtgattttattgctttg

SEQ ID NO: 257693 - DNA, 190 bp, Gossypium hirsutum
tctttctatgtctgaggatttatggtgcatcaaaaagcttaattacggatcagacgaaaaatgtggactgtctgattggttgaactctcgaccttcttcaccattgatttttgtcgaccctcgtgatatttgacattttcctttttaaacttttgataatgattatcttaaatgatcatagtttcattat

SEQ ID NO: 257694 - DNA, 358 bp, Gossypium hirsutum
gttactgacgggtcaggataggagcgatttctcttacaaggtgattaaggacgtgcaggtggtgccgcgtttcataggtgagtggggtgacgttatcataaccttgaaagatgaaactaaggttgatcttaggagcgtccctaggtttagagagattgcaaagtactgtctcgccatggccgagaaacctgttgttttgaaagaaactggacctaaagggttttaggttaaagctggaaaggtatgtaaattctgggttttgctttgataattttttttatacaacgttggtgtcacattgttatagtttaattgagaagataatgtatctcttaaaattttcatttgatcaacaata

SEQ ID NO: 257695 - DNA, 430 bp, Gossypium hirsutum
tttcgttacgcgtccgcccacgcgtccgtccacgcgtccgtccacgcgtccgaaaaaaaaaaaaaaaaaaaaaaaaaacatctttgcagtcggaggttttccctgatcagggtccagagctcaagcatggcgaaaccggttgtgcagtttctggtgaaacagtttctgttccttcaaatgaaacaaccacccttgaaggggctggtgcgggaagttaaatgttgtgtacagttgatgcttgaaaagggtttgtaattgccagcatatagagtcgcacacaatacattgctatttctcgaggttatccgcattgagacattaggacacattaggttatgctgccgctgatattccgcaaatcctagtatcgtttggaggtattgggtgcaaattggtaaaaaaagtgagccttccttagaaatgtggataa

SEQ ID NO: 257696 - DNA, 428 bp, Gossypium hirsutum
ttcaaccaaaacacatgccgagtccaagaccatgagccatggtgtccatgctcagcaacatgtggctcaaggcacggctgtgcccgcaatttgccatggaaagaaggaaaagaagatgaaagacaagaaggagaaagacaaggacaagaaggaaaagaaagaaaagaaggaaaagaaggaaaagaagaccgagagcaagaagaagcccgagaaggagaagagtaagcacaaaaaagagcaaagacgacagtcgcagtgacagtgacttaagagatggctggccctggcacgtatagtgtgctgcactacactaaataaaaccatgtgcagtctcaacagcagtctaatacagtgtctcgagcaatgtaagactataaattatcatatctcctattaaatataagggaaaatagatatatttttatgga

SEQ ID NO: 257697 - DNA, 465 bp, Gossypium hirsutum
tccacgcttccgcccacgcgtccgctctctttcacccttcaaagtccagcctaggtccggccgatctccggcatcgggccaccacccgtacgctgccgtatacggcggccggagttccaaaatagcctcccttttagtcgatttgaccttctcaacctagatccaagggtaaaatacccgaatcacccaccaaaaatcgaaaataaaagaaaaaagaaggaaaaaaataaaataaaataaagggacccctcggttccctatcaacgctggcgatatttccgacgaaccaaaaggctcggccactccgttgcctggagaaggaggctccaaccaccgcgttaaaggtgacgtgaatggccagacgcgtgcgaggaggcgtgcgacggtggtgcccgaggtggccaatagtgaggagcggcggctgcaaaaagggataaggtttcagctttgctgaaactagtttag

SEQ ID NO: 257698 - DNA, 260 bp, Gossypium hirsutum
tgtgttaaattcaaatgaatcggatttgaattctaaagaatacaaaaaaaaaatagtgttggaaggattgttggaaaggaatcacagggttggataatgaaacttttgtatagagtattttttttttatttacgatgagcaagttagatgtaatcatacgtgttttgctaaagttagcctgttggtcattttgtgtaaaatagaattgaaaaaagggtcaatatattctagaatcatagttcagtttggtttaatttaaa

SEQ ID NO: 257699 - DNA, 162 bp, Gossypium hirsutum
tttcgtgttaataaaattaaaaattattattattcaaaaaaaaaaagtgagatgaaaatgttgtggttggcttctttagagctcaaagtttatcaatatttgtctaatttcagtgaatatttgtgaagaatttcatatttgactaatgaattatcatgagtt

SEQ ID NO: 257700 - DNA, 208 bp, Gossypium hirsutum
gtaattttgggaagactatccttcagtcctctttcgaatgggttcggaaaataatcagtcatcatatctcataattaagttatttcatttttttttggggggttgttgtaaagattattcgcttggttcttcctatagaaatgtataattcgtagtacgaggaaccataatgatgagttgtctgaaataaatgagaatttgtttgatg

SEQ ID NO: 257701 - DNA, 418 bp, Gossypium hirsutum
tttcaagaagcacgaaaaaaaaatcaaaatcttccaaaagaaaaaaatttaaagatggtttgtatagcttgcctattgccactcttcctcgtaccgatcgtcaatattttgcctctcctcttctatttcatcatgggtaaagtttactggcttcttggatgggaataccggaaaccggagagggcacctgcggcgtgtccgtataagccgcctgcgaaaacggaaaactctagcaaagtttggccagaaactgaacctactgtaccagagtctagttcaaaaccaatgggagtaacagataacaagcaggattgatactgaagtttgtaagtgggtttccatggaacaaaatccaggcataaatgtatgatctttttgaagattaacttcttaagcttgttgatcttatctgaacaaa

SEQ ID NO: 257702 - DNA, 220 bp, Gossypium hirsutum
ctcacgcgtccgcccactcgtccgcccacgcgtccggtttgcgtgtgggatggatggtaagttttggtggaaaagaaatgaggtctctgcttgaagaagaccaaatggggtctgaataaggtgatggggattgtgtgggagatgatatttcgccattggtgcagtccagttttgctgcatctggttttcaattaattaatcaaaaaaaaagatgattttc

SEQ ID NO: 257703 - DNA, 302 bp, Gossypium hirsutum
ttcactcttccggggaatctggagttgcaaggtcacttatggtttgtagggcctgaggagagatttttcacatatcgaggaaatgccttctttctacatgggatcagtcttggacctaagattatctcgtcaaaagctctatgatgttttaaggttatattttggcattcctgattagcaattacatcatgttattcaagtcttgacaatgttttttaaatttagttttattttatttaccattcttgcgaaatatgttgcagtattttaaaaaatgtttcaagacttgaataaccctattt

SEQ ID NO: 257704 - DNA, 387 bp, Gossypium hirsutum
  unsure (1)..(387): unsure at all n locations
aagtaatgtttaaacccaatgattcaaggcaaagataaaagatcctagaacaaggaaatacccttttccattttctcaacaactagattaaaacgaagaatcgaaatagattctaagcgagacaaacaaaaaaggggttagagaccactcaataaaagaatgcctaaggtttttttttgagcattttgagagttatttgacttgagttatgagagtacgaatgcttttttcttcttttttttttcgaaaaaaaagacgaggttaaatgtctaattgatttgctggtttatggatctttttgacatgctaattccatacattataattccatacatagacataactntaaattaatcatttttttctcgagccgtacgaggagaaaac

SEQ ID NO: 257705 - DNA, 372 bp, Gossypium hirsutum
tcgttcacgcgtccgcccacgcgtccggtcatgatttagttatccctgtggttatctgcactggctattattgtactacaatgctggataaaaccgagggaaaagctaggtgggaagggtgtcaaataattgtatttctcaaggttttaaaacttatcctacaattacttcattcagagaacttcatttctttgttgaagaattgatgagaaaatgatgttgtcagcttccagttccagatgtttgctacttaaaacttttatcaagtttgatattagtcattcaatttcgtttcatacatgggttttgtatgttccttctcatgccaatgaaacagagaatgagactaaacatctattgcaactttggtgc

SEQ ID NO: 257706 - DNA, 221 bp, Gossypium hirsutum
atcctctgtgtccggttacaggaaagacgagtacagttggaggtatgatgatgataccccagaagatgtgattcgagcttcaactgccttggaaaatcttcaattggacagaaaggcccggaatcttagtacttcttggcggcatgccagtgatggaatgagtgaggatgatggcagggccgatcatatgtagtgccgaacaacatatgttgcattatggc

SEQ ID NO: 257707 - DNA, 488 bp, Gossypium hirsutum
cccacgcgtccgctcctccttactattacaagtctccacccccgccctcacctagtcccccaccaccatactactacaagtcaccacctccaccgtctccctcaccacctcctccttactactacaaatcaccaccaccaccctcacctagtcccccaccaccatactactacaagtcaccacctccaccatctccctcaccacctcctccttactactacaaatcaccaccaccaccttcacctagtcctccaccaccatactactacaagtctccagtacctccaccatctcctagtcccccaccaccatctccctcaccaccacctccttctccatcacccccgccaccttactattataagtcacctcctccaccacctccttatcactactagtcacctctccttgagtgaaatttccacctcattattaccctacatcaccaccagtttcaaagggccactaagctaagttaatatttaatc

SEQ ID NO: 257708 - DNA, 359 bp, Gossypium hirsutum
tctcacgcgtccggtgttatttgatgatagtgcttaagagtttgaatgagacatgacacatatactcacaagttacttaagtttgactacaaaaaagatcgagttcagctcgatcattatcaagttgggcttgagattgctttgtggaactaatcaaattcgagtatcctaatgctttattcaaccagcttcttttgattgttttgttttcttattttgtattagaacttgagctcgaagtcgagtccgatcattgggtatcggctttcaacttgtgcttgagctttttatagcttgaactcaatttatttatttttcttttaaaaaaaaaacaatttaatataattaaaatttatttg

SEQ ID NO: 257709 - DNA, 467 bp, Gossypium hirsutum
ctaaatccaaaaccaagtccaagtctaagactaagtctaaggcagcaccaacaccggattcagactcaccagctgagtcaccagatgatgacccagctgatcaggtagctgatgatgataatgctgctatgtgttttggggctgaaaggcttgctgttgttggattgagcttcttgttagtgtttttcttgctgtaagtgatgcctgatatgaggctaacttattagtcgccatcagtgtggttactccttttttcttttggtactgtttgttttgtagtgtgtgatgagtatttttgtggtgttatattcgctgagtaaatgcaaattgtgatgttagttgatagcaattaagttttgttagtatgattttccttttgaactttaaaagtaacaaaatgttaaggaaaaattgtgttttaatgtaatcacgataccatttatggacggttcatcacattgatgatc

SEQ ID NO: 257710 - DNA, 434 bp, Gossypium hirsutum
taccacgcgtacggccacgcgtgcgtcctgcacagttacattccaacctcaaatccatacagttgtacaggaggcagtcgaaactcgtctcagaagcagcttactatctcacaaatcttgtttcagccaagtctttcattctagacttaaacgccaaatcactttctattgaagaaagtgaattcatggagagtatggaagcagcaaggttggttaatagagtgccacaagaaaccgtaaccaccatcgataatagatcaaaattcggaaaactgatggatcctggtccatcaacactgttgcacgtgaaaacacaaactaacattaatggtggatcaaactatccttacatggaagccgaagctggtgaactaacagttggcgatgtggagagattacttagtttgtacaaggatgtagtaacaaaatatacc

SEQ ID NO: 257711 - DNA, 362 bp, Gossypium hirsutum
atcataacgatccccatgagcatccagatcatattctcctcgacctcgatgatgatcatagtattcatagtgttggtcatctaggtccgaccgtgaccgtgatcgtgatcgtgatcgtgatcgttatgatggaatggaaaaagatgattacaggtgattatggtcataagacaaatcaagctcgggaaattgagcagctactttctctgccagtgctcctagtttagtttagatctcaaggaaactgttttcaatctgctttctattttgatgtcgctggctacttctgagttcagtagtgttttctttggagttggaacgctatatgcttgtttttatattttttgaaaaagtttttttaa

SEQ ID NO: 257712 - DNA, 375 bp, Gossypium hirsutum
attgaaaccctagcctctttttaatccctcatttggccgaccagaactcacccccaatcgccacaccatcattgtaatagatgactagcaatgagttgggcttgattttgaagaggaagatgcaactctgacaacccgattgattcaggtacggaggcaacatggtgggggtagctggcgcgtacgaaggctgctggtggtgtcgacgtggaggcgccattcatggtagtgctggaggctactgtgttccttgctgctagggttctggaacattgataatttgggcttttcgggcctattctagtagttgggccataatttttggaattggactgcaaactgggccgctattgacatttggatttttatattatt

SEQ ID NO: 257713 - DNA, 344 bp, Gossypium hirsutum
ctagaggctttgcaagtttgcaaaaaaaatgagtgaccccaaatatgcttatccctaccctgctcaaggttattatcaaggtcccccagtggtggcaccaccgcaatatgcagctccaccacctaggagagaacctggtttccttgagggctgtcttgcagctttatgttgctgttgtcttattgatgaatgttgctgtgatccatccatcatctttatcagctgataataaataaaaatattctctgtaatctcactatatatattgtgatgctaggtttaaattcttaggaggattaatcttttcaacactagtaaaattataatttatagatagtgatgat

SEQ ID NO: 257714 - DNA, 530 bp, Gossypium hirsutum
tgagactaaaataccaaaggaggggaccacaagctttccattggtttctaaggaggaggaagaaaatgttagctcggttaagaagatagaagaagataaattaagtgaagcagacacttcagagaatatctcagaagattcttttaatgcaaaggaagtagcagagacatgttcagaaaaagaagcaatccaggagcttgacgatgccaagaaagatgaagctgccactgctcaatgtccccaagtggaggaatcaagtgagcaatctttgccttcagaattgactgttgagaacctaaagcgtggagctgaggccagtgaagaagaggaagaaaaggtgaaggaagtggaaattctcgaaaaggaaagacctcaggagcctgaagctgttatggatcaagaaaccattatagttcaggcttcaataacagaggaatcacaaaagattgaagcaaacgaagagaaaaggaaagaagccaaaaagcttgacgatgggaaatttgaagactcgtcagctggagaaacataaa

SEQ ID NO: 257715 - DNA, 146 bp, Gossypium hirsutum
cccacgcgtccgcccacgcgtccgcccacgcgtccggtttagccttgttatcctgttgaaatatttgattatagccattgaattcactagggttgtacttgacactgctattgtagatgaacaagcatgaattttgctctggtttg

SEQ ID NO: 257716 - DNA, 349 bp, Gossypium hirsutum
gttttcctttttcttgttgaataataagaaggttttcacttttttaactcaagccttagatgaaactggaaccagatattataatatccaaatgttagctaatcaaaatcggaattgtttatgttcatatatactgaattttcgatgtaagatctcaggatattaaaatagtttatattccaactgtctttgattgtaaaacccaactagaattaaatactaagtatacataaacaaaatatatgaaaataaaaaaaaaaaaaaaaaaaaaaaaaaaaaaaaaaaaaaaaaaaaaaaaaaaaaaaaaacaaaaaaaaaaaaaaaaaaaaaaaaaaaactaaaagagggg

SEQ ID NO: 257717 - DNA, 493 bp, Gossypium hirsutum
cggacgcgtgggcggacgcgtgggcggacgcgtgggcgacaatccaatgaatccctgtagagctatgtcagttcaaaccaacaccagccatacctcatcactcatcgccgacgatgaggagttggagttcctgatggattctcatagcggtagaatcctcgccggacatggtggacatgtgactgacaaaactggcaatcgtgatcgaccagctgcagattgtgggagaggtaaaccttacaaatcctgccttcccaacccgaatccagacggaaaaagaccagaaaatcctggggtttataaccgtgggtagaacaccctgggaccgataaccgtggatgctgaaggtgaatggcgtattgaactgcttttagtaattaatttttctttttatggccttggctgccttatgtatgaattttatcatttccttttcaatctgctaggcggtctgcatatataaagccaagagtcatatgaaataaatagggat

SEQ ID NO: 257718 - DNA, 369 bp, Gossypium hirsutum
aaagttgtgatcaagccaccccaaaaacagaaggagaagaagaaaaagccaagtcgaggatgtctaataaatgtcttctgcgggaggaactttgtgcctgctaaatgagacagattggcttcagtcaaaaatcaaatgcttgtgttcctcttgctacctagagattctttttagacaatcaggatcaagtcggcttgtttatcatgcaacgcttttagcatacagatttatttttaatcttacgctttaattcggatgctaatttactatagtgatttcttgtatagagttaaagcttaatggacttgtggttttatgcatgaaaaagaaaaacacaagtgtgctttgacttatgtcatcttacaattg

SEQ ID NO: 257719 - DNA, 447 bp, Gossypium hirsutum
aaagatccggtgctcctcactcacaaagcaacaattaactctctctccccctcgttctgttcgccggtaaattcatcataaaatcctcgcttttttccggtggcaaagcaaggggaagctttgaattagggtgatctaagcagagattatatgctttgattgagaattagaggaggagaagaagaagaaaagggaagtgtatcatctccagttgaagtagtgggaagctggaaagaaatgtcttttcagaataagagtttttggatggcaaagggtcctccacatgtgtctgatggagatgcagcattcgataatccttcaagaatcgaacccaagcgatcacatggttggtttgttgatgctgattcgcagctgttccctaacaagaagcaagctgtacaagctgcaaacaacaaatcaagttcaggaatttctaattcaaatgtt

SEQ ID NO: 257720 - DNA, 415 bp, Gossypium hirsutum
cccacgcgtccgctcgaacgattgccgattcgaagacagctttcgttatttgaaaaaaaaaataataataataataataatcttataagaatcaaatataaacataaaaatcttttatttgttttttttttcttttgaatgaatcgcgactatattctgattaaggttcttcccaaattttagctttctttttttaaagctttgatttgattagaggaattgtttccaagttacagagaagttgaagattttaatgaagctaagctttcattgactaaagaggggaaagcgagttgactcaacgttggaactcggtgctgctaaaggtcaattgggattttgctttaaacagaatatttaaaaatcgaaggatatttggtcaagatgggtaaaagtcaatgaaaactacttggat

SEQ ID NO: 257721 - DNA, 482 bp, Gossypium hirsutum
gcaattagatccgaccctaagacctgatttttctgaaattatagacattttgcgacaaattgcaatggaggttggagacgaaggcgagaaccaccataaagtcgacgaccaccaacgtaaagagaaatctgccggcggattcttttctgtccttagaagaggcagccactgaggtaatatatatatatatatatatatattatacagttgatgtttataacctgatcagccatagcctttttgaactatgttggccattcccagcattagcactgtatagtatttaatcaagttttatgattgggtttttgttcattttggtatcgataatttcctcatttttctctcatgacaattaatgttcattgtttacttcccattccccttttttagctttaatttattaaatttgtaagaagggatgataaatgaggtttgtaacatgatatttctgccatggccttatagttcaatagtgattt

SEQ ID NO: 257722 - DNA, 224 bp, Gossypium hirsutum
caaaaagttagtatctgttctaaagaacgtgcctggaattaaaatagagtccacctacatacttcctgcaagcatggttccagatgattttggcccggaaacagccgctggtaacattcaagaaaatgtgagccatgcattaggtgaattgcctgatgatgcaacaacaaaaggtgatgctttagacacaacatgggatgaactaggacctgtgtccaacacga

SEQ ID NO: 257723 - DNA, 125 bp, Gossypium hirsutum
ctgacgcgtgggttgattcaaaagctgctaggtgggctttcttaacaagattgcttaattatcgaccgcgccttttgattctttggagtaaattttatagtatgataattgattattagagctct

SEQ ID NO: 257724 - DNA, 263 bp, Gossypium hirsutum
ccgtgagtaaattgatcactctaatgttggtgggagggttcctactctgtttattacagccaatcctctagtggaaatgtaatcctcaaacttcagtttgattacagttgtggttttccaattgcatatttttatagtaaaagttatagaaatcaagttcggttctatatcattcatttttgtatttctcccaaaaatgaactctttcttggaaaagaaagggttctttcttaatctatcaaaatagtctcttcttttcttta

SEQ ID NO: 257725 - DNA, 376 bp, Gossypium hirsutum
tggtaaaagaagcctaaactaggaggctcgggaggtttcaactagtgttgttgcagagcaaagcggattctgaaatttatttgagaaatgaactgccagtgacgagtggtagaaacattacgatgatagattgatgatgatcatgtatttttggcagtttatcaaaggataaaaagcatgtattaggggtttgccggctgaccttaacaatgctttggtgatacgatctggtgtggactgtaaattttgtaattgagccaagtctataacagatacttactgttgagtcaatctgaggttgtaacccaaccagacattgtatgagaattcaattttcagttttaataatttctctgaaaataaaccaacttacttt

SEQ ID NO: 257726 - DNA, 233 bp, Gossypium hirsutum
cccatgcgtccgcggacgcgtggggagaatacggggggtttcattgaactcaccgggggcagcacccgccggcaagcggtaaacatacccccgggagctttatgaaatcaacgagacaggagagggaggagtgatcatagactgcgggactgccatcactcggctgcaaactcaggcatataacgcgctgcgagacgcgattgagaaacagacacaggggttgccgagcgcga

SEQ ID NO: 257727 - DNA, 412 bp, Gossypium hirsutum
attaatagagatgcctactctaaacacatgggggcaattttggatggattacattacgttgcagctcttgaatattgatggaatccgtaccattgggagtgttcttggtcaaagtattgctcttgactactatgtgcgccaggttgatgggatggttgcagagtttaccgacataaatcgtgggatggaaaaaacaggaacatttaccatggacagcaaaaaactttttcagatagttggaaaggcaaactctaatcttgctgatgtaattcttaagctcggactttttgagagatcggatatcgcttggaaagatgccaaatatgccataatatgggaatttctacgagatgaatttgaattaactcaaagatttgcaagtcttgattttaagttgaagtttgttgagcac

SEQ ID NO: 257728 - DNA, 357 bp, Gossypium hirsutum
cccatgcttccgataggcatatgaattacactcgggggtcttaattgaccttacgttgggtgacatccaacagacgcttattcttaacggctgtcacccacttccacggcggcgttgctatactagaaccccatcgaaaccgccttcttcacttccgctaactggtttgccgacttcactccccgattccggcgctatatgggacaaatactcgtgttaatgtttcgcttgcttgacctaaaacaaccccactgggttggatctcaacgctcaacgctctgaccttctaaaatacacttcggaactcgatcttcccttgacgcaattcatgcaattggccaaatcggctaactcacc

SEQ ID NO: 257729 - DNA, 386 bp, Gossypium hirsutum
cccatgcttccgcttttttttttggggggggggtatggatttgttataaaattcttgggctgcttctacttcgtctcgtatgtatcaacatggatttttcagtgccaaaatccaaattaccatcagactatactgctggaatagtcgttgccttctatgtaagttttttattttttttcttttcccgttttggtcttgaattttgattcatcgtcacaataaaaacttaaaattccagattaacaaatcctttctaaaagctattcatacaaagaacggggaattgaatatgaatcatggcggcggctaacggaattgaattgttttatttgtgtctggtgctatggtcaaatcagacatcaaacggtgacgtattcgagaaaaac

SEQ ID NO: 257730 - DNA, 333 bp, Gossypium hirsutum
tgatggcaaatggaggaaactcgaaagcgccggggatcctttagaacaaggtaacgccgacttcggcggtgttacgaggatgtgggaaggtgaagttgttcttgcatgtcatggaggaccgccgcctcgctctagaatctggctgttgcccctgctatagatttgggaagaacatgcggcgggctggtttaggaatttgtttgcttcagggaactgtttatttcatcctcgcagtcactgctattctcaactttgttgccttcttcgttaccaagcggcattgctttctgtatttgggtgttactttcatcttgtctattggagcatatttgg

SEQ ID NO: 257731 - DNA, 234 bp, Gossypium hirsutum
agcaatgtggggatgggtgcgaacttgtgcacctaccatcagaaaaaatctcttggtgaccaaactagtggatcgatatgcaatggaaacgaaacctagggaaatgttctgcttctagagccagctgataaatcaccttttattggagatatcaaagctggctatagccagtcatctctagaaacaaacatgcacaaggctgacatattaacccacaaggtgccatcaactgac

SEQ ID NO: 257732 - DNA, 413 bp, Gossypium hirsutum
tcgtcatttctgtccctgaacttattttcaggctgtgattttcaacgtgtccacttgtcaattgatccattccttttatttttaaaaatgttttttctagtcatatttgattctcaatatgtgtgcacattctgtctgctttcttcagttactttaattgtatttcttttttaaaaaatttggttacttccatatgattccttatggtttcccaaaggttgacaagtctcttactgctgtccactaatatgttccatttctcttcacaagctaactggattgagtattacgttgaatacctaattgctgacatcacttatattatccagaaatcactattgtaaacaatcttccatagaactttcgggttcaaaatagttctttcattcacatgattatatgtatgcattttg

SEQ ID NO: 257733 - DNA, 223 bp, Gossypium hirsutum
tcctcgcgtccggctatatacgcatatcatatggggatctttaaatattaagttggtaattaacaataataaaaggactggatgattcgaatgaagaatcgttaaaccgatggagaaaaaaactatcactgcaatttcatggagtttccgagagagaggaacgacagacgtaggaacctcttttgtacatatttcttttttttttatagataatcgtatatat

SEQ ID NO: 257734 - DNA, 363 bp, Gossypium hirsutum
agtcacgcgtccggtatgagaagaggatcaccgggctttttttggaaggaagggcgggccagcccccaagggagctaaaagaaagttgggaactcacaaaagggcaaagaagaagcgcgaagagatgtccagcgttctccgcaagatgagagcccacggcggaggtgcagaaaagaagaaataaagctctattctcttggattcttactgttgccgtgctcgagtttcttgtctaggagcagctagaggcttgtctagcatatgtttcatttttgatgttatgagactgaaatcagggctttggaactcttggctattcgagttagagatgagaaattggaagaagtaataactatcaaattt

SEQ ID NO: 257735 - DNA, 351 bp, Gossypium hirsutum
  unsure (1)..(351): unsure at all n locations
atangctacctggactcttgttttactgcatgaggcatttttatatagattggttcgataaattacttctgttgtgtattcaagcttcagtttcttttttatcttaaaagattgccctcttatattgattggcttcatttgtaatgtagcaataaaaaagaagctttggagggatatggaatgaagcttcaatcattgcacaacatactgatagtaatcatatattgtattaagaactgtaatatatgctacctggactcttgttttactgcntaaaaaaaaaaaaaaaaaaaaaaaaaaaaaaaaaaaaaaaaaaaaaaaaaaaaataaaagaaatccaaaaagggcggc

SEQ ID NO: 257736 - DNA, 384 bp, Gossypium hirsutum
tgttgttgaacacctaaatattataatttgggtggaggtgctttgctgaacaacatcgatttgtcaattgttttgttgatttttatcttacgaatatgaaatgttttcaatacaaaaagtcccttggatcctacagctagagcatgctcctcattgtcggtatatcttgttctattatggtataaggctactaagttgtcatatgttttgtaatgtgattcattcattttggatatgaaaatgcaagttattgacatcatccttggattagcaggaagaaaggggaaggaggatgcgataataaacccagaggaacaataaaaccatcgatttagcaacattttgggctgtgatatgtaatgtctctatatagtttttggattc

SEQ ID NO: 257737 - DNA, 335 bp, Gossypium hirsutum
tttacgcgtccgctcagaaacaccaaactcgggtcaatatccacaggttgtatcaccaacctgttaaggatgttgatcaattttgtttgcctcatattcagatattagagaacaatgcatgttcggatatcggcagtcaaggacccagtgtgtcctatcaagcctacaatgaccagatttttactctggaatcatccacggcggctgctagtatcgttgcttatgattccccttctgctataagtgtctcgtcgagcaggagtcctttctctccacaaggttctcaatcgtggatgtctgatcctcatcattcccccgacaatacacatggatca

SEQ ID NO: 257738 - DNA, 223 bp, Gossypium hirsutum
cctcttgcgtccgaaaaaagaagaaaaacaaaggggtcgattccagcgctgttctaatgaaagtaccaaatataagctgcaagacataaacgccatgtcctgctcccttgcccttgccaactctcctgcggtttctccgcccatgtctcttttccgtgacaattctccgatcatctctccgtcgcccgaagctttgaatttatcgatgactcacctcaaacct

SEQ ID NO: 257739 - DNA, 369 bp, Gossypium hirsutum
ctttctcgtccggtcagcagcagacttctacaaaatcactagctgcaaatgatataacaggagtatcttctgcacctagcccgggagctactgaacctttagcatcagaaggctttattcgaggaaggtcttataatatcaggatggatgatcaagttctgctaagattctctcctaagaactctgagtccacttattacttcagtgatatgataggcgggactcttactttcttccatgaagaaggagctagaagatgccttgaggtttcagtcacgcttgaaacttctgagactataagtcggcgttttgttcatccttctaggaggaattcctcaacaattaccaaggttcagagtgatcatcatg

SEQ ID NO: 257740 - DNA, 311 bp, Gossypium hirsutum
ttacttccaaggggacaaaccttatggagaaggtcgctgttgtaggatggaatgtgttggtgaccggctgtgacggcgaccctttaatcgaccgtcaggtggagctcgtaaaatcaatggaagaaaagggtgttaaggtagtgagccattttcgtatgggggatcatcatggagtggattttatgcagcctgataaggccaacgcactgtttttggtcttgaaggattttattgcatctgcaacgtcagttacaataaatgcaaatgttgaatgaatttatagctatctttatcatgcaataatggtatgt

SEQ ID NO: 257741 - DNA, 365 bp, Gossypium hirsutum
tttataaaatgagttcttgaaaatcagatttcttgctctgaatatctctgataatggctccgattgctgatttgtctgtggtagtctcctgacatttccttattactgttcttgaatcccccataagttttactgagtgggttcttagtgaaatccctagctttgtaccatctaaacatgcatatgcctctgccgcaaaaggagaaggaacattgctatgaataactgtctttaacactgttaagtttcccctcagattccatcctaccaggtcggaagctgatctgaaagttttgttgtcgtacacagcatcaaaaaggatcctgactctcgaaccatatccaccacaacgcataacagaaaag

SEQ ID NO: 257742 - DNA, 172 bp, Gossypium hirsutum
ggtaattgcctcttaattataatcctaaattcggggcatatttcaacacttttgcgctgttgaccaacctatcgctcaactgaccagattcccccataagccgcgtctctctccgtctcttgcaaaggaagagaaaagattcttttcaatcgatcatggggtctctataaaa

SEQ ID NO: 257743 - DNA, 208 bp, Gossypium hirsutum
tattaatacaacagaaaaaggagagttctgctagggtttcaaccttaacccttttgaacgccgccaacgaccaggccgatcttcgcccgatctccgattgcgacggagtgggcaaagccaggtatgctgctcctcctttaaccccttttcttatatatacatctatataccatagcataatagaagaacagagaaagtaaagcaaaga

SEQ ID NO: 257744 - DNA, 339 bp, Gossypium hirsutum
ttgtgatcttcacaagttgtataaaagttacagagagaggatgaggaaatttgacatcttgaattaccagaagatgtatgcaataggctttcttcactcaaaagatccacttcaatcaatttcaacccacaaatcatcgtctccagcaattacatctcttcttcaccaaaacctgaggctccgacgccgaaaaaagtccaatttcgaccccaccaccaagttcatcaaggagctccacagtgatttagaaatggtctacgtaggccaactttgtctttcttgggaaattcttcattggcaatatgagaaagccatggaaatatgggaaactgatcctta

SEQ ID NO: 257745 - DNA, 361 bp, Gossypium hirsutum
cttacgcgtgggtttgagtactatgaagaagtatgatttctgtttcagagaagtagtttctggaagaattgtatggtccttgaatgatcttggatctattcttccctctgtgcagaaaaaggaagctgttctgcttgtcagcctatttggggtgtcggagacagttactagaaaccttctttgccattttgagaggctaaatatttggaattacattttcatcggtcctgcaactgactttctgtttcatcttgctcaagggggacatcctgtgattgatgcagatggatttctcgaagatatcaaatcattcaaatcactgagaattcaagagtcaaatgctaggcttatcaaagagatt

SEQ ID NO: 257746 - DNA, 435 bp, Gossypium hirsutum
ttctctcattcccctaagaaacaccccaaccacaggcgccattgtcgcctaatgctccgctcttctttcagcttcagcaaccccacccaccacgagcccgtggcttttgatcctctcgtcgccgacatcgagcgccgccgtgaagatcgacaatgggagaagcagtacttggagcacacccatcctgagcttgtaaatgaccacgctccgggtcacgagtcgcagcccgagtgggaggatttcatgaacgctgaggattacttgaatgatgaggataagttcaacgttaccaataggttggtaatgctgttccccaagattgatgcggaccctgcagatggttttgtgacggagaatgaattgaccgagtggcatctacaacaagcagcataggaagtcttgcacaggtctatgagggagatggaagttcatgac

SEQ ID NO: 257747 - DNA, 426 bp, Gossypium hirsutum
tcttacgcgtccgcttcaacgcttcaaattggtttgcttacgaggtagtaccagaagagtctcgatccaagcgaaaagatgctacccaaaaaatagaataacccctagtcagaaacttaacattctcaactactaaccacataaaattacttacctaagttgtccataaaatgccaaaataaggaacaaaattgcgattgcagttgaaatgaaagcagaatcgaaagaaaaaaggaaagagaagggtagggttcgacaaaagagagaagaaatctcaaatgagaatcggcagagtttttggagagaaacgtcaaaaagatgagtacgtactgaacgatcgcagttaatcgagggatgacacgagaccaaatagaaagaagttgagaataaaaaagaatgggtgagcacaaaaatttcagcagcaac

SEQ ID NO: 257748 - DNA, 325 bp, Gossypium hirsutum
tccacgcgtccgctcttacctgttgctcggggcggattttatataagccttactgtgtttttccgggctacctattatgaagttaaataaaaaataaatagatattaataaccccactgatgctattcgattattatcatcgtcgacgtcttctttaattcattcgcttcgcttctcttcgccttcactgctcaccactttccacttcgcttcgaattctccactatcgtctcttggaccaaccaatcagaattcggataagatattttcttattcttcttctattggtcttgctccgcttgctctgactcccagaaaactatcg

SEQ ID NO: 257749 - DNA, 398 bp, Gossypium hirsutum
cctgtagtgatggcccattcatctgtagccatgaaatggaggagcttttgaaactgcattggaggatcaaagcaagaagattcagacagtcttctaacaaagcaaaatcccataaaaagccgacaaaagtgggaaaaaggaagggaatgtggatgatgctgattatcagggtgccactactactactacggcagccagcaatgatgctggaatggctgctgctgtagcagtgggtgccactacagcagcatcaacgccgtcagaaccaccaccaacaaccgcagcagcaggaggcaaaagatccgaaatcaatgccatggaaaacgacccttcactcattgcaatcaatagacaagacatgccagctcaagatagtcaagaaaccctacatcaacgtc

SEQ ID NO: 257750 - DNA, 209 bp, Gossypium hirsutum
  unsure (1)..(209): unsure at all n locations
caaatgccgacaccaaaaccaatgtccatattacatgggggtaaaattatcatcaatacttgaaaataaaaatacaacaaattcagaaccattccatgataaaacaacaaacaattaatcaaaaacatcaaaaaccataaataatttatgtntntagcagagtactgaaaataagagacataagcaatagtaaaaaggataaattcttc

SEQ ID NO: 257751 - DNA, 402 bp, Gossypium hirsutum
ggggatatttctatgatggggaaactggatccattggagatgaggacaatgatgagtcttcttgagatggtggttcgttttcttggcgcggcggcgtgtgaggagacggacaactccgacaatcaacaatgactaccattccttgcagtggcggcatgtaaggcgacagtggtttgatttcttggctgcgccatgtaagggatcttttttatcgtccgaacatcagagtttcaatcgcaaagtgttttccatgttcatattaatctagatcttgtacttgtttgctttgtttgtcttcatggctgtaataatttgtttctcattcaacagcagttgagggataattgtttctagttcatttgagaactgttatgatattcacgtaaagattttcattgaaat

SEQ ID NO: 257752 - DNA, 473 bp, Gossypium hirsutum
cttactcgtccgggcacaagtccatgaagcagcgggtgaatgttaccccgaaatcaagccttctgccgactactacaagtttcgacagtcaagctgacatcatgtctattttggctacaaaattatcatgtccatgtcaggttctgaagtttgaagcagtgaaagctaacatcatgtcatccatgtagtgtagaaaaatgggagtgatattttcatcttttgtccgatctgacctactgagtaccatttttgtagttaaaaagctctttgtgttgcagttgcagagtgaagagctgtaagtaggagacggcaaaaaaaagaagggtagtgatgctaatgtatttgtagcaactctttttgcctttagatctttcccaaaccagtagtgcttctcatttctttccccacttagatagctttattgtttttcatttattattggctaaatggtataaaagatcattaaacagtag

SEQ ID NO: 257753 - DNA, 453 bp, Gossypium hirsutum
tatctcgtccgcccactcttccgaatggatctgcgatgttggagcgaatgactgcctgtgatgcaagaatctctttgttctcgttccgtactattatacggaagccgatctaaaccccaggcgttcgaagctgcatcgaaatgaatggaggtccatccccttttatatatctgttggagattgccagatgaatggagagtaagatttcttccttttgttactgcaagttctgtaatatagacactgattttccttgctatttctgatcctgacatgagtctttttccataaatgagatgatttctgctaaaccaaatgaaccaaaggctacagcaaaaaagttgaagctgctcttcattacctcgatcaaaaacccagggcacttaataaaaatatgccagctattttcttcagcagaaccgcacctggggcaaagagtgtttatcactaccc

SEQ ID NO: 257754 - DNA, 310 bp, Gossypium hirsutum
atggtgaaaagtccttcatcatcatcatcatcatcaccatcacgtccgggcgttttaggggttcgatgaacaagaaaaagaaaaaagtctgttattaaccacctcaaatgatagaaagaaaaaagggtttttatggtttagcaagtgccaaacaatactaggccaacttaaccataaatgaaataggcttgattgctaatcattagtgtattagctcctgaaatttacgactgttttttataattcgagagtgagatccacttgcaaattgatgacttgattaatacgaatattttatcactccaccagt

SEQ ID NO: 257755 - DNA, 394 bp, Gossypium hirsutum
aactcgagcggccgcccttttttttttgttttggggcaagatagatagcgtagatcaatccatatgcgggaatatatcccgaaagacaccaataaataggcaattaaacaactccatgtccacatacaagaaagcaataaaagcatcaagaaactgaaacatagacacacaaaagggtaatagggggttttagtatataaaggaacacacaagacgatgatatccatatgctctatcaagcaacatgtaagaaaaggaatgtttcaagggctagctttagaaggtggtggagagaagaatgggatagatgggatcatagctggaattgaaggcatgttccgcaatggcggtattgtaataggcaaagttggaagggtagtgggaaacggcatgc

SEQ ID NO: 257756 - DNA, 402 bp, Gossypium hirsutum
ctgttgcgtgggcggacgcgtgggtttgaacccactcttcctttccattttcctctctttttctcttcatttccttcatctctcaaaccattaaaaaaaaaaaacttttcaaacccattgatataaacctaaaaaagcttagcttaatgggtcttgatgatgcatgtaatacgggacttgttctagggttaggcttctcatcgacgccggaaactccatccaaggccgacaaccaaaagcccaagaagtcaacagccaaggtggcgccggtcacaagttttgaaccattccttacgctgggtctttccggtgatagctacggagttactgttgccaaaaaggttgatgtcaacaacaaaggtggtggttatcttcatcatcgccatgaagactctcccccca

SEQ ID NO: 257757 - DNA, 331 bp, Gossypium hirsutum
ccttctcgtccgatttgtggcaatgggcagtgcttcaagcggcatgaaggtttcagtcgttgttcatcccctgccttcgcccactgcgcacccgctgcctcccattcatcaaacagcccaacgccgctggactggtaattttgccaaggggtataactggtttcagaactttggttgttgccttagcttctatttggtttggatctgggtgggtttagcaggactttcagttggctgcttaagcttagggaactgtatttttttaaaaatgatttgtgacacttatttttcttgtttttgtttttagtgaaattcgggtggtgtttcgttg

SEQ ID NO: 257758 - DNA, 512 bp, Gossypium hirsutum
  unsure (1)..(512): unsure at all n locations
gccatttctaagtagtagtggaaaagctaattatcatttggtttgtgaatgcttctttatgactgctagggtactcaacttgggcctcctaaggcattttcggactttaagcatctagtcaggacatttcaagaagtgaagacacacttgccaccttaaaagctatgcaaggacaggcaccttctccacaactggagcttgatatatcgaggcttgagaaggaaattgaattgtattcacaggaaaaattctgttacgaggctcaaattttgagggatggggcacttattcgacaagcactttcgttctatcgactaatggtggtttggttagttgactcggctggtggatttaaaatgcctctgccacctacatgtccgatggaatttgcttcaatgccagagcactntgtggaagatgctatggaactattaatatttgcttctcggattccgaaagctcttgatggagttgtacttgatgatcttatgaatcttattattatgtttatg

SEQ ID NO: 257759 - DNA, 418 bp, Gossypium hirsutum
cccacttgttcgcccacgcgtccgtttcatttcacatgggacatgttctaatctctgccctgggcttcccaggtagagttcagggtttttatttttcttgtttttgcccatctgggtattcataaattttctatcttggcttggtttttaagcacctattggtcttatattgaattttcaattgtagacttccctataaattgattggttttagattaggttatctgaatttttttttcagatttttaatcgatggttttagaagtagattattgacttttgctcacccagtttttcaatttccccttaacttgttcctttctgcagattcatgaataatcattcttttctcttacatctagatgctttcaaggctttttgaagttctgggtttttgaaggttttgctaatttatata

SEQ ID NO: 257760 - DNA, 247 bp, Gossypium hirsutum
gggcttggtatgcagggttgtgcgtcccgcttttaatgacgcgcttgtaaacaacctacctgtctaggcaatgtacccggttccaaagtatgtatttgtagatatgttggggtgtgatttgagtgacacattgatcccaatttcaagggctacttgcattggtttgatgtgtcgtatattgtcacttttaagcatagttatactgaactgagatccggacaagaatatcttgtatggtgatcttaat

SEQ ID NO: 257761 - DNA, 167 bp, Gossypium hirsutum
aaaagttggaaatttgggagagccaaatcctaaacccatcgccaagggttccttcggttgttgacgtaaagcaagagggtactcaaaatagcaacatattcggtcatggcaatgatgaatttcaagcatcagcagctgcttggccccaaatcatgccagtttcccct

SEQ ID NO: 257762 - DNA, 327 bp, Gossypium hirsutum
tcttttagtccggagggcgaggctgtattatctaagagataagcttccaaggttgtcgactttcaaatgaaagacactgccgatgccatcatcgctcgggttcttcttccccaaaaattccaaggccagtttcttagttgcatacatgttgtaagagctttaatttctatgatccgcccccgcccccttttttccccttttgttgtaaaatttgctgttttggtttgggaaaaaaacaactgaattcaaatattcaatgctttgcttaattcatttcaaaaaaaaaaaaaaaaaaaaaaaaaaaaaaaaaaacaaaaaaaaaataaa

SEQ ID NO: 257763 - DNA, 196 bp, Gossypium hirsutum
tttatccctgtttttagctcctctgttttctctgttcatttcgcagcaatctttcttcggaatttaaggatatccattactttatttagttcttctccttgacaagccccaaaaaagaaaaaaaggtgttcttgttttttttttttgaaagaaaaatgtgtgggattttagctgttttgggttgttctgatgattc

SEQ ID NO: 257764 - DNA, 249 bp, Gossypium hirsutum
ttgactcgtggggtaaagtcaagtgtttcaaatcttgagcttgcccttggggttgaaaggagcctttcagctcacagaaatatgcccccatctttggatcaaatatgggaatcatatgagtaatctttttcatgtgtttcagttatgacatatgtttgaagtttatttttgtagtaagttggtacttgatgatggtattaatcaattatggattgtctttgtagtggataaagtttatttttttatgct

SEQ ID NO: 257765 - DNA, 540 bp, Gossypium hirsutum
gggttctgtttatttaaaagctgaggacaatgttaaagccaccttcgaacagtctgtggaaaatctggagatgactttggataagtcccagaatagcagtgacattagcgatacgagggatgaagattcaaattcttttgctagggaagctaaccataacaaagaagtaacggtttcaccattgccaaatgtattgaaaccctttgagactaaccaggttgctttgagttcctacaggaatggaactgtggaggtaaatgggttccatgaaaatggtctaactgaagttaaaaagttgagtaaccggagaaagcataggttaggttgcttcggcttcaattccgggtaatgtatggtctgatgcctcaaccgagatggctaggactagataacttcatcagcaagcaccactttttgaaccgcagagaaaagggaagacttgagagtggattttctaacatcgtatattgaatcatccccatgaataatataatttaatataatgtataccataaagcttttattttcttctcttatcta

SEQ ID NO: 257766 - DNA, 299 bp, Gossypium hirsutum
cccactcgttcgccgttttgagggctcagatgactgaactaagccaaaggctagactctctaaacgacatcctccattatctaaacagagagggtattgaatacactcctgactgtttcaccaaccctttcaatgtgccttatcttaaccaacaaccacccatcatggcctctgcacacatctttcaatactaattgatgaagaaagtattcatgtcatttgttggtgggttttgttttgttttgatttttcaatgtgggaatcaatgagtgggtaagtgaattggcaattctgccatg

SEQ ID NO: 257767 - DNA, 452 bp, Gossypium hirsutum
gggtttacgtgtgattgataatgaagaagaagtgataaaggagctggcgcaaattagagggagaagacttaatatagattgttaagctgcatcactaggcccactgccataggctattgcatcaccaccctcggcgataccaaagaagtcggtttctctttctggtttggccatacagggcgagaggagtgagggttcacccgtgtcagtacccttggtaatgcccaagcacttcatttcgtcagtcataatggcaccaaatatcttaacagacggtttggcaataacatgaccatcaaccaaagtgtctgttgcaacatctggaagctccatgatggggatacctccctccagtttgattgctccatcatcaagcgcctgattaggtatccggtctgcctcgtttccggagttggttccatcgacttcatgatcattgaaagtgagaaaag

SEQ ID NO: 257768 - DNA, 123 bp, Gossypium hirsutum
tccctcgtccggacccctggctgtttctataacccccatgcttatctggagatcattgtcttcacagggtggaagggtccgcattgtggtgttggagacaagagacagcagattgggacattc

SEQ ID NO: 257769 - DNA, 388 bp, Gossypium hirsutum
ttcatgcgatacaaacgctttcaacactgcaggcaagcttagaatgcaagttaaaattgctcaaggagattgctactgaaaagggtatcaccttgcatttggaggaaatggctgctgaggtgaggaacttaactgagtcagccaacgatttgcctgtcggaaaagacatggatgatagcttaagtgagtcaatgaaagcacggaaaacgtacaaagatgtggcagatgctgctcaagaggctatcgtatcagcagcttatgcagcagcagcagcacgagcagctgtggagctctcaagaattgaaccccaagactttgattctccaaataatgccatggcccgaagcgaaaaccttgagctgaatgaaacggaagagactagacaaag

SEQ ID NO: 257770 - DNA, 422 bp, Gossypium hirsutum
agatgatgttagttcgggacaagatagaacaaccagtacaagaagaacatggagcacaccaaattttggttcattgaaaattgtaattgctgatgagtacgcagatagaaaccaaatgaggtctggcatggaggctacacctaaggaaaaaggatccaagcctttcttcagtaagcaaaggtgtggagaactaacacaggcaaagtgtgtgtttaatttattcaatcggtgttttggctgggttggtgggttacagagacaattacgaagtccagtgcacttgcagtttagttattcattgcaactcaaactcgttttaacggtagccatctttctaatcgtaccctttgtactgtattcaagttgagagcaattggctgctatgccctgtagatcatacaacaggtgttggatgatctatg

SEQ ID NO: 257771 - DNA, 363 bp, Gossypium hirsutum
acttttaactgtctctgcaagtggtaagagaagagtttctgaaacaccagtgacttctactaccagcaaggagcaatctcaaactgcttacagagaccgtgcggccgagaggaggaacttgtatggttcatcatcttccacaggagatgatctgcctgaccctgagctcaggaattcgaatcgagatatggcattcaaaaaattctcctcagatccaatgcctttcccacctggtgttggtggtggacggggggttgtgtcagatgatgttcaaagctttgaggtgatcacagcagagaaagcatttgatgagaaatatgagggcatccaaatgctccgcaatatgggttggcatgaaggatt

SEQ ID NO: 257772 - DNA, 353 bp, Gossypium hirsutum
cttagtagatgcaattgcgaggcttgaagaggcatctgatgatgaaagcgatggagagcatcgattctcacaaggtcaatcaatggatcaagaaagagcatggagaaaacggcaatacgatgagatgggtgaaggtaggatgattgaagggtccgatggcaataaatgactcggccgatgagagatagtcagcaaagcaagaattgggaggggttaacgacttgtgattttagccgcagcttttgtatatccagtagcagtagcaacaacaacagctgtagcagtcgcctccactttcagtgcttgcatcttgttttatccttttgaccttctaccaagctaaggtaaatgac

SEQ ID NO: 257773 - DNA, 412 bp, Gossypium hirsutum
gaagaaactcattttgagattacatgtcatgataatgtcagggggggtgtcagcatgtcccacatgaaatgtgttggaagcaagatgagtgttcaaaagtacctctcaacatgagggaattcagaggtaaaactcttggaccttggttaatcagccaaaaatcaagaggattcttggtgaagtgaagcaggcagtctctctaccacctgttccttcaaagaagcctgctgcccagccaaaagaaactaaaccaaaggctgaaccaaagaaagaagccaaaaaggaggttgagaaacaggcagcaaaggcagaggccgctgaggaggaggaggcaccaaagcccaaaccaaagaatcctcttgatttgctgcctccaagtaagatggtactggatgactggaaaaggctttac

SEQ ID NO: 257774 - DNA, 251 bp, Gossypium hirsutum
ctttgggatactttcatgaaatctgaagtcagttactctggggagggtactgtggagacaccagtgacagcttagattccatgttatttattacttgttttaatatttatgaagatgaaaacccatcataagatggtccccattcctctccttgttgaggtgatccagatgtctggctctcatcttcattatattaaataatattaatgtataaaatgaaaagggttcctcctgttgcggatggcttaatc

SEQ ID NO: 257775 - DNA, 149 bp, Gossypium hirsutum
gcgcccacgcgttctttgtgattgctcaccaataatcatatatgtacggatgggttccaccatgcactacgcggcttcaattaactcttttagtgaaaatatgtccgacattcggcctgcccaccctggaaacggctcagccggagggg

SEQ ID NO: 257776 - DNA, 272 bp, Gossypium hirsutum
gcgcggttactttggagtccaacaccaaaaagccaactgggggggggtttaaaatgctattggggttttcaaaaacaccaaaacttgggaggggatcatgtgggaaagcacacaagcatcgaaagcctaagggaaagtcccctaaaggacccatcactatgcctccccttgtgaaacctccaatcaagatgccaccggttgttcctccaatagttaagccacccattgacctccctccggttacggaccctccaattaaccttcccccaggg

SEQ ID NO: 257777 - DNA, 425 bp, Gossypium hirsutum
ggcgtcttttattcctcaccacaagaaaagctttgttactactttaatggaagctgccactctccgctctccttttaaggaagatacctacttcatctaccatttgaagtcttccgagaagaagtccttgcaagaactcaaggacaagcttacggcctctcttggccccggcggccaatgcaccatgtggggcatccctcttctctccgatgacgaaaaagccgatgtcattttgctcaagttcttgcgagctagggacttcaaggtctccgactcctttcacatgttggagaaatgtcttgcctggagaaaagagttcaaagcagacagtgtgacggaggaggagttggggctggaggagctggaggcagtggttgcttatatgcatggctatgacagagaaggccaccctgtttgctacaatg

SEQ ID NO: 257778 - DNA, 354 bp, Gossypium hirsutum
gcggcctcattttcattatgaaagttggaatcgcttgttcggttgaatgacctacaaaccagatggacattttggatgcagccaaggaactgcattttatgagggacaaatttggtgggacgagtatccgaacagacagagaaagagcaaatcatctctagaatatggagttcggatgtctacgatgattgtgcagtacttgtatctaaatctaaaccttgtttaatatattttgttttaaatttccagtcgctactttatttttcttcttctagccaaaaacattaatattacttggttttttgtcagtataactatgtaactccacatttaataacggttgacttctttctt

SEQ ID NO: 257779 - DNA, 345 bp, Gossypium hirsutum
aaacttggtatttccattaaaccaacaacaacaacaaagaaccaatcacttagagttaacctataagagaaaatggtcaccaaagtctacattgtatactattccatgtatggacatgttgagaaactggcccaagagatgaagaacggagctgaatctgttgagggagcagcagccgccatttcacagtggacctggcggttaaggacaggagccaccacatggggaaaaacctcctcatagaaacttattgagtgtggaagttgagggcacacataaacctccacgacattcaggtggtaaacctccaagacactcggggggtaaaccttcacatgttgaggg

SEQ ID NO: 257780 - DNA, 233 bp, Gossypium hirsutum
cggataaatggagacggtttgttgcattcgtgaagaagatgaatgttggaaaaggagcttgtgggtgtatacacaacccgctctagctaaccaacatcatgataatgagctatccaaggggaagcctatcccaggtgagaagcgaccacaacacaagccattccctgaacaccgaccgccaatacacagtggacctggcggtaaaggacaggagccaccacatggggaaaaac

SEQ ID NO: 257781 - DNA, 354 bp, Gossypium hirsutum
cccattcgttcgagtcaacggagatgaaattttccgttttggtgcatagggggctaggcctcgggcagtggacgcgctgacaccgcacgtggaggcagcggcgcagagggatgtggctagggcttgctttcctccgaaaatagttaggtgttgggcttagggtttgaatttgattttgggctttgggactggggttggtttagtttgggcttatttttatttgggtttttaggcccaggtcaaaattgacctgttacaaaatgtttatagtacaaatgagcacgaataatacataattatgtaatatttgttatattatcatgcgtaattacattatcagtaaacatttgttat

SEQ ID NO: 257782 - DNA, 279 bp, Gossypium hirsutum
cccacgcgtcctttagggctgaacgtgggcggttactgcgacgggtgtgttgtgcgactgctgattgctgtgatgtggggcgtgcacgacgttagggtagctgctgttaaccactgtttagggttagactgggatttggggtttggtttagtaatttgggccttattgggccaaatgtaattgggttagattgattaattagggccccgagaatcaattgggtattacaaatgcaaactagaattgttctccaaatccaacactttatgtaattcatac

SEQ ID NO: 257783 - DNA, 425 bp, Gossypium hirsutum
cccacgcgtccgtttcacgcgtccgcggacgcgtgggcggtggggagaaaatcatttgagttttggctgatacggcggccggatgggcgcttgaaggggcggagaaaatgggaatcaaacgagcggcggtgcttctctctggaccggcatctatggcactggcactgcatgttccaaagcttggtgaagctggaattttagatagtgatggaacactaaaaacagatgaaccgatcacactttcagaagatatcccatcatggagtagcggtgagctgtcatggagttgcagtgacgacccagtgatgcagaaacttatatctgcatatgtttcaaccgctgccaaaactttcaaatttgcagaacagattctttgcaactcatttcatgagctcgatccatctgccatgaaattgatccccaaa

SEQ ID NO: 257784 - DNA, 352 bp, Gossypium hirsutum
cccacgcgttcttttcagttgcttctattatagtgctagtttcagtagttcatctattcctgtttcctgtcgtcccatctcttgattacttcagtgctcggcaagtccagtacaaatgtgttccaattaattcatcacttgaacagagtactgatcatgtttgggaaaataaaccacaaggtcttaatttagatcacaggtttcctaccgacttgcataatggagttgtttatcgtaatgcaccgtggaaggcagagataggccgctggctttctggttgtgatgctattgctacagaagtcaacattgttgagacactaggtgggaggcgctgcaaatctgactgcagtgg

SEQ ID NO: 257785 - DNA, 379 bp, Gossypium hirsutum
gctgttgtttccttcacagctttgcctaaggctatagaatgcaatgtgatgtcgtctgtactctgttacatgaatcgcagcgctacttttatagttgagcacaaaccctacttaccccttccagatttcctatctttatttgttttattttagagagaaataattttgttaaaagaacaaagagccaaagacatagatagttactccagagattttgtaagagaagagcaaggagaaaatggcggcggtttttcccacctggattttgatagcggccttgctttttgaggctgcggtggttatgggcagttttcctgcacctttgaagctggagagaaaaattcctctggcgagccatgagttggggctgactcaactg

SEQ ID NO: 257786 - DNA, 205 bp, Gossypium hirsutum
accaaattttgttataaggcgtcgtgctcaccgtaagatctacccaacattgagatggcatgtagtggatgaaacatgcaaagcaaatcaaactctcaaatgtgtaatttatatgtttcttgtttaagacggtgtgtattattattataagctttcaaagcatagacagtatgtcatattgaaaccttgaactgatacattccac

SEQ ID NO: 257787 - DNA, 301 bp, Gossypium hirsutum
  unsure (1)..(301): unsure at all n locations
cttttttgttttttaccttttctctcttttgcaaagttttgcagggctgaaaaaaaactgaatggaaaatagattggcacggttaaatcgatctaaataacgagagcccactaacagaaaagtattaagtcccaaacatcanagagagagagagagagagagagagagctttatctttttaatatttgattttacttgagattgatgatggttttgggagtggcaaacatttataccatatttgcctgaaactctcagagactttagataggtactacttcttttgcagtaaacgaagggg

SEQ ID NO: 257788 - DNA, 411 bp, Gossypium hirsutum
gtcaaagtttaataaagaaaaaaaataaaaagaagcaaaagcagaagagatatttaagagaggaattcgaggaagaaggtgaaggagaagagaagaagaagaagaaaaagaaggagaagaagggactggaagaaaagattgaagagaaattagaaggggaaaagaaagaagaggacacctcagttccagtagagaagtgcgatgagccagtagtccagccagagacgccagagaagaaaggtttcctcgagaagatcaaggagaaactccctggacaacacaagaaagctgaagaggccagtagcccggctccagccccagcagctgagccccatcacgaagaggagtcaaaggaaaagaagggaattttggagaaaatcaaggagaagcttcctggttaccactccaaat

SEQ ID NO: 257789 - DNA, 295 bp, Gossypium hirsutum
cccacgcgtttcttctcacgcgtccgagcaactccaaggaagaaggcagctgttgctgcatcttaagttggttttggtgttttgtttttgagatttctgaatttacacaaactagaagcttttatgatttttatcatcattttgtacttttattatttcaacctaatatccatgaacagatagttgtgttttaccatgaatcttcacgacattttgatttctcacatttttctcttgtgagatagtgtcatagtggtatgtcatccatgatgttaaaattttggtttttgcccat

SEQ ID NO: 257790 - DNA, 345 bp, Gossypium hirsutum
gttttctctcaattttgttgcaggtatattagttctcgcatttggaaagatggccaccacacttcatttttgttgtgctttctgtatctagcggtagtagcacagttgatgaccttgttgtatttggagttgcatatttgaagacaaaaaaggcccccattgagcaatggttaaaatactgccttttatcatttttatgctgatttttttataatattgaattcattcagacctttccaggaccattggctcaataaataaatctcttcatttaacctttttctttttggatgtattcccattttttctcagtgtactctcgataacgggcatgtttttttattt

SEQ ID NO: 257791 - DNA, 232 bp, Gossypium hirsutum
attgttctttatggcaaaccttaagtcccaatgaaaagaacaatccaagctgacaaaggttaatatattttacacccaagtttgcatttttggtttcttcatggtgtggtacatttgtagaggaaatgatccatttgaaaaataggccaaatgaagattgtgatagaatgaggtggatatagttttacattgattgcatttcatgccttttttgtacagaacagctatatac

SEQ ID NO: 257792 - DNA, 365 bp, Gossypium hirsutum
cccacgcgttcgttaggacttggggttagttgttggagggctatcgtgctttcgtccggagtttgcacgcactcacgcgcccccttcttggcctccacgtacggtggttggaaactggaaagtttcctttttccgacacgaatcaaaatggtacgcttcccttttccttttcattatttgcaatatatacatgtacatatatttaaagcatccacctttatgtatttcgatcgactgctggtttctttagtataagaacgattttgtttttattgaatctctctggtcttgccaaaaaaacctttattacagattaaaagaaatgggtttttataaccctcaattacattctagggaaagaatct

SEQ ID NO: 257793 - DNA, 111 bp, Gossypium hirsutum
cctttgcgttcgagcagaggccttgattactacgctcctacggatttgctctcaggaagatcctcagaaattacatgtccaaaacccagcccaaagctaaaaactatgttt

SEQ ID NO: 257794 - DNA, 423 bp, Gossypium hirsutum
cttttacttttcattatgtgtttgcgttgggtgttgcaaggttcctcagctgtgctcactgggttctccaggttttagacagccgaggccgcttgctggtagccctgggttatggattgtggccttctatggttcttatatcggaaattgttcaaactttcattttagcagacttctgttacttttatatcaagagcttgttctccgtctaccctctggggtggtctaagtgaagatgctattttgctgtggtcgacgagcttgctgccgaaagaaaacatagcttggttactaatgtgactaggtgttcttgtttaatttctggtttttgctctcagcacatttcttgtgactgcaattagtggattgtttgtaaatttcgggatgcagaaactttgggtggatatttatagggaagcattt

SEQ ID NO: 257795 - DNA, 263 bp, Gossypium hirsutum
cggtcgcgtgggtggcgatagacataaaaacaagggccactaccagagcagtatttggggttctatctctcttatttggtgtaattgctgagaacaaaaagccggcatttggaaatccagaaattcagacatcaccccttcgagtaatttgcaactatccatcggatcccactgttggtcttgggttcttatccattgcatgactcactacttcaggtgcgctcggatattactctgtgtttcatccttacaattccacatat

SEQ ID NO: 257796 - DNA, 450 bp, Gossypium hirsutum
agctgcaagatgcaaatgacatgactgacttcgtgggtccatttcttgattttgtgcccgataaacggcctagtgctgctcagtgccttgttcatccatggatcgatgctggtccccgacttttagagccatcagggtcttcatcgaaaacccaagtagcggtttctgagaaaaaaacgaaggagatggatgatatggaggcgatggaggttgcaatggggaatattgccataagtgcagattctaaacatgccaaagatcactagcctccttcgaaaccctccaacgcagccatttcttcttccaggtaggagcttgcctctttattttatatatgcgtaggctagttttgtgtctgtatctgtgcacggaacatgtaattctttagaaaatatatattcttttataaaatataacctgaaatgaaattacattcatatgcactggaaa

SEQ ID NO: 257797 - DNA, 252 bp, Gossypium hirsutum
tctacgcgtccgcccacgcgtccgcaaaaatatccctaaaaatcacgaccaaatagggattcccttttctctcattttcctttcatccaaacaatgcctctccttcactcttctgcttgaaacccagaagaaaataaaattatgaataattcttggtttgacaaagggtttgatggggcgaatgatgatttctttgatgatgtaataaagtatttggatttcccattggaagatgttgaaggcactgatggt

SEQ ID NO: 257798 - DNA, 443 bp, Gossypium hirsutum
  unsure (1)..(443): unsure at all n locations
tagcccaaggggaaaaattcgctaggggatattaaatgacgtgtagggtttctcaatggatcattttcataattgtatgtttcttaagtgaaacagctttcatctcaccatcacaggctactgtcaatgatctcaagcaatcgatgaaggaaaaacacctcacagattttttggatagacatgaacaaacaatcaagggttggcatgaagcacttcatttgaagatggttcaaagagaaaagaaagtaattattgagcagaagaagaaaggagggaaaggaggcggaagctatggcggtggaagtcttcttcgacctcgtgccaaaaagagtgcagcaaactttctccatccaacaacattccttagatttctatntacctggttaatccccactatgttctttntataacttggatataagcccctattatatatatatgta

SEQ ID NO: 257799 - DNA, 376 bp, Gossypium hirsutum
  unsure (1)..(376): unsure at all n locations
gacgaaccagagccgtccgattcgactactgtggggtccaatgtacggaaggatctgagtgaatggcaagagaggcatgccactcttgttcttactactgtgaaggtatatatgtgtgtgtgcgtgtgttacatttcactatagattttgtaactctaaggctgcgtttggctttactctgtagttgtgtttaatcctaattgctgaacttggcattgagatgaactttccctgaagtcaattctttgtgtcattataattttgtattccaaaaggaaatttcaagctagacttaagtttagtaagaattgcatgaaacatttcagattttgtactttcaataattactttatgcanaacatattattcttatgca

SEQ ID NO: 257800 - DNA, 160 bp, Gossypium hirsutum
cctactcgtccggccacgcaagcgtgccataccaaaactatactcttcaatgtacgtgttatccccacgtgagacctgaatgggacttgtcatgcaaagccatcagaaaatagatcaaaacgaggcttgcaagaaactaggagcctcgaaagatggggcg

SEQ ID NO: 257801 - DNA, 341 bp, Gossypium hirsutum
ttgttacgcgtccgacgcaacccacttagctactacaacgtttacccaaacttaccaaacctcaaataaacagtttacaggtaatttttctttcttcagatctgaccttctgttttttttcgttctttttttttggtgtcactttttctttcaattcttgtctttactatttttattttgcttttgttccttttcgttattttttttttgggtcgttaggtttcggtttccgtgtgcgttttatggaatatggtttttaattgatgggaactccaaattgggagtgttttaagatgggtttctagttttgtctcttttcctaactctaaaaatggaacaag

SEQ ID NO: 257802 - DNA, 332 bp, Gossypium hirsutum
ccctctcgtccggacctcctgatcctaattttagtccttttctcaggcactttccttctatcctcttacttctcctacctgttccattccctttcccttctcctttcccctctcctctccacccaaagcgcttccttttctctccctttcgtttcctaccttttgggttgcacacttttctttgtcacaacccttatttccatcgagttctgctgcggttcacggtcccgtaaatgcgaaaagcctggttgcaaagggctgaacaaggctttggagtttgatttgcagctacaaacggaggattgtgtgaaaaatggatcacaggagattga

SEQ ID NO: 257803 - DNA, 198 bp, Gossypium hirsutum
ttttcttttaactttgatctgctctggtatttgccataggtcttatgttaatcttttttgtcctaatgcattgttgggttttcttgttttgatgaaatagaaattgggtttttgcttgtttgcgattttagttagatttgcatagtgaattgaggggttgagtggatgaagatctagggtttcttaggtggttgtgat

SEQ ID NO: 257804 - DNA, 280 bp, Gossypium hirsutum
tttctgcccaaaacacagatgaaggcggccgagtggaacacaaagaatacaatgatactggaagaaggagacgcatatatatgttctgcttcaaaacatggaaaggttgatgatgagtgcgtagaaaggtttatggagcaacttaaagccaaagtgaagagtgacgtagattattgagacttccaaatcttagaagaggatttagggaaggatttgagaacggctgggagatttagtgttccgctacgcctggaacatattgcatagagaatgaaagatg

SEQ ID NO: 257805 - DNA, 411 bp, Gossypium hirsutum
gatacattgattaaagggctggcactgctgccgctggtggtattcggaggaactaccatttcagaagcaagagaagtagaggtggggtcgtaccttccgccatcccccagcgacccttctttcgtcgtcttcaaggcctccacaaaagacaccccagctctacgcgcaggaaatgtgcagccataccagtttcttatcccacccacatggaagcaaagccgagtggccaacatcttgtcgggaaattactgccagcccaagtgtgcagaaccatgggtagaagtgaagtttgaagatgaaaaacaggggaaaatccaaggggtggcatctcctttgatacgtctaacaaacaagccgaatgcatcgatcgaagaaattgggaaccccgagaaagtgattgcatcacttggt

SEQ ID NO: 257806 - DNA, 252 bp, Gossypium hirsutum
ttcctaaaggaaaaaaaaactcaagaagtttaggtgtaaatctcacctttttctatttttgtttgatttctttcaatatgcgtgtgtatttctggaaaaaagaagatccaatttacatcgtttcattcggtttttatagccgaagaatcaataaaaataaaagggaaaaaataaataaaaaatccttgttgtaatctgttattatttgctgtcaattattgtttactattttctgttattctcttctcgtac

SEQ ID NO: 257807 - DNA, 295 bp, Gossypium hirsutum
tttacgcgtacgcttttttccttttgatacgattgtggttctgggtggctttttctcttcacatttgtttctcccgatgagcaaacgctcctttgtcgttacaattagaggctattgccactcaactcaccactattggatctgaccttggatatttctgcttcagatttttctgttataatctttctagtatcttctcgaagctgctttccaacggagaaatagatcgaagagagagggcagaacagacaagtgacaagaggaaatggctctccccacaagaagcatataaatt

SEQ ID NO: 257808 - DNA, 346 bp, Gossypium hirsutum
atttttatcaagccctgttgcagagccacaagtttctgactatgccttggaggaggacttcagtgagtacgtcaactctgttcacattgaagataatccagttgacaactatagtatcccagagcaaccagagcaagaagctgttgaagatgaggatccagtggaggaagctcctacagaggaggaaacccttgtttcacatcacagtgtagtgaatactgtgcaagaacctccatctatacctttggaggaacctgttggggagcctccgaggagaacttatgcttctattttgagtgttcccaagcagcaatctgcttcatctgctcaagttcaaccttcttat

SEQ ID NO: 257809 - DNA, 274 bp, Gossypium hirsutum
tttccatctaatctggggaaaagtcctcttaaccgaggatcgaattagtggggatctttgtcgaatattctgataaattctgttggtataatgtgttttttaaaatggtttttcatttcccagtcttttgttttgagtgtgttaattggcttggcttaacagaactgtaaaatgttccctcttccttcttatatcccattttcatatgtaacaaaagattccatttgcttttcttgccagaaatatataatacttaaaacatattttttgcttg

SEQ ID NO: 257810 - DNA, 362 bp, Gossypium hirsutum
  unsure (1)..(362): unsure at all n locations
ttctcagacaaaaccacagggtcatcagatgcagagccaagcatccaatgttcagtgtagctaactattggcctgccccatcattcagccgaataaaagccgcaaaggcccgctcaagaagtggaaggattacgacgaaaatatgaacccaacaaatgagcttggacaaaaaataaagttctttttttaaacgggttgagccttgtaagatattttccattactatttattgttgttttgttgctgtttgctgcaattttgattttgttttgatacaattttgctattatattggtactattttgctattatttggatattggaaaactcttgttttattattaattntgttactattttag

SEQ ID NO: 257811 - DNA, 416 bp, Gossypium hirsutum
tgttttcgattaccagaaggagaaaatggatggggaggatgaagatggatattggtcaactgctgttgaagacatcaggtgggatactatgtttcaggatttgaaaccaacttgaacgaattatttcatttttaaactcctgttgttttctgttcaaagttctccattatgtttgatttcagaggtgagagatgggatttttttagcagttcccaccggttttcttttttttggtgcttgtggtgggggaagattgataacttttatccttatcttcttgagtggtgtttcaatcattaggttgtctccccctgcttttttatctttgatagaaaaaaaaaagagaaagaaaaagtaggaatcagtcactttgggaaaaagaaagactgaaacagaggtatcgaaatatgcagagt

SEQ ID NO: 257812 - DNA, 403 bp, Gossypium hirsutum
tctacgcgtccggaaagaagttgctgctactgagcatgattggggaagtttgtcgactcgtgaagaattacgttcttcatttaatgatttgaaaaaccaactttacggaaaagacaacaacaaagtttctgttaaagacttccatggcttacaacaagcattggataacactattgcctggggaaaacctccggactacctcgaacttattgcgatccgaatcgaaaaagctcgtggaaaagctgccgaagtttctcatatcggtattcaagttctggtttgcgctgcaatcaaagagatggaagattttcggattgaagatttagagtgggatacattgaaaaagtggggggcaactctcaatatggctaagcaacttggttttcaagtggtatttgctgat

SEQ ID NO: 257813 - DNA, 401 bp, Gossypium hirsutum
tttacgcgtgggcttgaatgttgagtttgtgcatgttagggtaataatgcattgaatggatatatgaatgtttattatattgtattgaaaatattaggtaagtataattcttgttacatgagcttactaagcacgaagtgcttacctcgtttcctttttccctgttttgtagtgttaagagctcggaggtcggatttggtcggagacacatcacactgtcaacctcacgattccggtatataaagaaactttattttggaaatcaatggcatgtataagctaacaaagtaaatgttaacgtgaaatgaatgtaaagctagccattagtatggttaacaaacctggttatagataagtgatgacgttatcttatataaatgcatgaatctatcatgaaaata

SEQ ID NO: 257814 - DNA, 373 bp, Gossypium hirsutum
gcatattaactgtttggcaatctgcatatcatcttggataagttctttaagacctatgctcggggcttatactttagttttcattgcgttccattattccgtccatggtctatttttaagtttcccttaccttttacttcttgttgttcacagctattcgacggtaaagatggaaggccgaagtacccccgaagatgggttattcttcctccattcctgtagaaaggatcgatgagcatcgtacttttcgagatattaaatttacgacgttgaaacatggtttccgagttcattgaaagatcaattcttgctagattatggaattttagtatgtgggcatgcattaggatgcttctttgcttatgtaaaatca

SEQ ID NO: 257815 - DNA, 259 bp, Gossypium hirsutum
gatatgttgatccaggtatacttataaggaagctccaaaagtcagggaaacatgcacagctatgggggtcagctcaaaagggttcaaacaatttcccaaaccaaatgaccaaccacttcatgaacatgcatatcgatggtggcaaaggagggaaagacaacagatctcaaaagggtggtaatggtggtggtcggtggctggaaagagtcatcagcaaaaaggtgggcagcaatttggaccaccaccacaccttatgcag

SEQ ID NO: 257816 - DNA, 384 bp, Gossypium hirsutum
ccctcttgtccgcccacgcgtccgttttattttaaggacagaaaacgttccttctccatctctccctcattttcttctcctcttagcctcccccatggccggacatgggttcatcggaaggtgactccacgttcgctccgcgaacggcgaccggtatcacacgaggtgggcttcccttgtttcttctccgaacggaggtcgaagacagagcctttgcggcccaccacaacggaagagaagaggaaaggccccggtcggttcgtcggagcaccccaaacagtgaatcggagtttcatcttgcaggtgtcagacgcgtggaaggccggtggttggtgccccaggcggtgatggtggtgcgcgtgatggccaagggcagaggggagt

SEQ ID NO: 257817 - DNA, 452 bp, Gossypium hirsutum
gaactttttcgcctggaccctgagagctctaccccttatgtgcttttagccaatatctattcatctttaggaagatgggatgatgtaagagttataagagctgatgagtgaaaagcagattgttaaggatcctggttatagttggaccgaagataaagagcaagatacatgtctacttgttgggtgatacatttatggatggtcaatgaggcttttgacgacattactctctatgttagaaatcagtcatttaggttttgtgggctgtgccgaagatgcaactaaaatcactcaatagaaggccaagagaatgacatgggaaaccaatgatctttgctaccaaaatgatttggccatagtttgcttattgtttaacttatttatttatgtaaaaaggtggagaatgttgcagagttttgaagtggaggttcagtggcgaatcacccaagaac

SEQ ID NO: 257818 - DNA, 413 bp, Gossypium hirsutum
cccacttgtccgctttagaaaagaatggcgaaccctagccacagcgccgttcagaaatcaggccgctctaaggcctttcgagcctcgccagaacttcgatcgcgacggagcgggctgagattcaacaacaccaggtgcatggaggcgtgatgacatggaggtgcaacacgcgcggaggcctaattcccaactgcggcgcagactattcaagaaaccctaggggtttctggagatttcaaattgggccacttcaaatcgggctagggtttaattcggtctaggattgtattgggtctaggattgggtcagattttgggtttaagttattaggctttggattttgggccatacgggcctattgtaactggactgttatgtttataggactttttatttgctttatatattttttt

SEQ ID NO: 257819 - DNA, 253 bp, Gossypium hirsutum
ccttcttttccgcccacgcgtccgcccacgcgtccgcaatgacagctttcaaaaccagatgtagtttcagtagctgtatttatgctatgaagccttgaatgtgtactttgattggattttttttcttgctagttgtcttggtttatgcatacacatctaattgacatcatagggaatatcttcctgtgcccattctcaggaaatgtaggagggaacttcattttagtaggctcaagggtgaaccaactttttt

SEQ ID NO: 257820 - DNA, 135 bp, Gossypium hirsutum
gtctaatagtaatgttaagcattttatttctgtagtaacagttccttaagagaatcgttttccttttgttgtattttatttcctgccttttaagcttcagattctgacatgttagtatctgcagttttttgaacc

SEQ ID NO: 257821 - DNA, 452 bp, Gossypium hirsutum
  unsure (1)..(452): unsure at all n locations
ccctcgcgtccgattccctctgtttcatcaacaatacaaaaagaaactcatctctcttttcttacctcctcctcctctttcccaagcaaaaccaaaagcatgaagaaatcttgggcgctaatcgatgcagcctcgtggggtatcggcgcagccttattggtcttaatattgataggttccatcagcgcaaactctgtatcggagaaagcagatgtgaaagggatgagccaactgttgaaccgaccttgtgatgaaatctatgtggtaggagaaggggagacccttcacacaatcagcgacaagtgtggcgaccctttcatccttgagcgcaaccctcacatcaatgaccctgatgatgttttccctggccttgttattaaaataatttcttcacctgctagaaaactatagactggttttggtcgnncttcttttttcttcttctttatcat

SEQ ID NO: 257822 - DNA, 492 bp, Gossypium hirsutum
aaattttagcaaggaacaataagaaccctgcggctaaggaagtgtctataataactattattttgcctttgttctctttaagtttctggtaatgtttcaataaaattgcaagttttagaaaggccacattcgaaaacaaactactataatgtttatcattgtgattcaatttacaaacaaattaggtgttgatattgtgcatatttagttgagcttcgattttggctattctattcagcaatcgagttaatatagcaactaattggttattatggatgttccatttgctcagcgataaatttgtacggattttaagttgatttacatgaaattcaaggtccagtctctatatttgtaaatcctttcctcctttccccattgtagtgtacttattcacttgtgtaaaaaaaataattagttattatcgaagtaacatgatccttgtttagataaccgattgaaaatagttaaataatataaaattaatatttt

SEQ ID NO: 257823 - DNA, 354 bp, Gossypium hirsutum
ctgttgctcgcgatgctattgctaaagccaacccagttgttcgggcagagatgctcgataaaatctgagaacaacccggatcaagatgaagatatgtggatggtttatgtaagttggttacttgtctcatcaagtgtccccttgattgatattaaatgttgggagtccatcatagggaatgttgggagtccatcatagggagggacatgatttgcattgtaagtctatattttcccctgtttgtaagtgtttttatttgtgcttgtttgatggacattgatatgatcaacttgtaatgcttcttctttgtggtatgcattttttttctactttttaagttgccttttaagtttg

SEQ ID NO: 257824 - DNA, 444 bp, Gossypium hirsutum
ccttcttgtccgcccacgcgtccgcccacgcgtccgggtgcctgcaattgcaagaactttgtgattgattattaagttgcaatacctttattttagcattctaagcattttcctcttattgcgttaacaaaccttgctgatatatattggacttgacagacttgagaatcgaaaagtccatatttattaaacctaaaacatttcacctgacggtgctcatgttgaagttgtggaacaaagaacgagttaatttagcaactgaggtattgaagagtatctccccaaaagtgatggatgccttggataatcgacctctgtttgtaagacttaagggtctggattgcatgaggggttctttggataaagcccgtgttgtctatgctcctggagaagaaattggcagtgaaaatcgactttcatgtgcctgtcaagttattattgatg

SEQ ID NO: 257825 - DNA, 468 bp, Gossypium hirsutum
ttttcgcgtccgattgcttctctgcccgagctcaaaattaaaacaactaaagatcccaatgttacggacaacaaatcgggaggaaatggaatgactcagaaggtcagtggaagtacttcttcgaccattgatgttgctgaaccaagtaggaacacggacaaaggttcacttaatattgatggggacgacggtacagtaattgagaaaaccgttgtgatgcttgaatccattcccacggtaaattcatcagaagcaacgacactagaacagaaggagaacaatggcatctttaaaatcgggagggaaactgagatggtgtcagattatgctgccattcgtgcacctgtttcttcatcgaatcttgatgcagttgataaagaacatcagatacaaccaaaaccgcaggcttatgagattcaaaagggaaatgtaagtaacaccgacaaggaattgtcaaaatttacgagc

SEQ ID NO: 257826 - DNA, 293 bp, Gossypium hirsutum
ccctctcgtccgggtgagtgtgcgggtgagggatagtggagatttcagtggaatgtgcatagaagatctactcaatcacttccaggctgaaactgaggcttttcattaggatgatgcgactctatcaacttaacatgtggaacatcaagggggggattggctttttcccttgtattatttacatctctgctgcctcctgattggcttttagaacttgcaagcattttgtttggagaaattacacacatacattctgttttactttaaaccatcgtcttcccttcatcttttta

SEQ ID NO: 257827 - DNA, 405 bp, Gossypium hirsutum
ttttgaacatggagcaccgtgaacggatcgggaacgggggttcaagcctctgccccatttcatctcctgatttgatcttgatggagttgaaagaagcaaaactgaaccttggggtgaaggtgaagccacagattgccaacaatgtgggtgctgccaatcatgggagttttgagaattgttccaacatcttaagatctccatttcacaacaactcgaagctcgagcagtttaagaaaacggttgatcctgcaaaaactgaagttccaagatcaacgccactaccagggaatgaagaaaataggccctgtcgcaggactgctcaaatgagatggattgcagccaagaagatggaggaagccgccagggcagctgaggcacttgctctaattgaaatgaatgccctta

SEQ ID NO: 257828 - DNA, 336 bp, Gossypium hirsutum
ccctcttttccgcccacgcgtccggaacatccaggttttagggtatcctcttggaaagaattggcatcaggtgccacgtcggttatgttgcaaggtaaacaatactggtgatgaagcctttcagttgacggttgggcagtgtgaaaagggagctcttagttctttttctgattctctgtgaatgattgagtgatgctgttgagtatgtatattcaggcttcaagatgggacctcaagctatcttgtgcattatgccttttagctgcattgaagttttgggctgtgccttgagatcaaaatctggcttttttcttatttcttacctcctatatcaac

SEQ ID NO: 257829 - DNA, 234 bp, Gossypium hirsutum
ccctcgtttccgatgaaaataaaacgttattgcgctaatgcttctataattgcaagatcatgaacctagattaccagggtagaaattctctgtttcacgtgaaaaaggaaaaagcttatttgtatagcatagaagtagggaaggcaaaaggtatttagtttcccatttcatattatttgtatttatcatttcttaaccctccaaagagatctatatcagtagttgatattgtag

SEQ ID NO: 257830 - DNA, 295 bp, Gossypium hirsutum
gaagtgtcaaaacccaatattgtagaggtaaacattgtgttgaaaaatggaagaacagatggtatttgcatgggtaatgatattttgcctcgccatagcaccagtctatggccaacactactccaaaactattaagctaggtggtcgggtggaaaagaagacgcgactccgcttcttctaccacgattttcccggtggcaaaaatcctactacagtgctgttagctcaggccaacatcacccaggatttcttttccccatccccatacagcagcttgtatgcaatggatgatccc

SEQ ID NO: 257831 - DNA, 312 bp, Gossypium hirsutum
ttttataagatcatacaagtcacttcactcctatcgggccctctctcacagcacacaccgcccaccatgtcggagccaatcgccaagccgcagaagcacgccaactcgtacctccacatcaccgacggcgaggagcgcatccgcacgctcattaccgagttcgcccagcaggtcgacgacccagaagacagggaatggacaaagtacctctttccctacctgaccgtccactccgtctcgcccgacggcccccgcccctcggtgacctttgcctttaccgtccagccgcagcactgcaaccgcctgcgcaac

SEQ ID NO: 257832 - DNA, 233 bp, Gossypium hirsutum
cattgttattggccttatatgcataagatgaacatgtaaagatcatttggccttccatgattgcaatatcttgaatgttggcatgtgtttcgctttattgagtattcctctatagaactttgaattatcctagaaggtagctgagaaacacaaaaaggcagtggtgtatttcatttgctataaaattcttttctctttctattgaaaattgctatatatatatatattggttc

SEQ ID NO: 257833 - DNA, 421 bp, Gossypium hirsutum
cccacgcgtccgaatgacatggaaaaaactggcagatgtggcagcggagagaggagacaatatgttaacagtgtaactgattaatgaagtaattcgttttgggatagtggctctgctgcagttcccttctccattttggtggtattctttttcttttgccccctaacttcatttctattttatttttgttgtcaatctgatcaatgaagacatttaaaattcatggagtttgttagttcatgctgaagattaagaaccatctgtgaggaacgacttgtattttttttccttgtcactctttgttcttcctacaaaagaagtatcagacttttagtttgtattcatagtattacatgaaatttcattctttgagataaaattaggatcaaattattgaaactcatgtggctggatatctcaa

SEQ ID NO: 257834 - DNA, 439 bp, Gossypium hirsutum
atttggtatccctgtgtttatagggaataaatcgaagatagcagatctgacattcctgtgcttacagcgaagcagatcaaagatttcagcatggcatccctgtttttatagggaacaagttgaagatagcagatttggcatccctgtgtttatagggaataaatcgaagatagcagatctgacattcctgtgcttatagcgaaacagatcaaagattttaacatggcatccctatgtttatagggaacaagttgaagatagtagatttggcatccctgtgtttatagggaataaatcgaagatagcagatctggcattcctgtgcttacagcgaagcaggtcgaagatttcagcatggcatccctgtgtttataaggaacaagttgaagatagcagatttggcatccctatgttatagggaacaaatcgaaaatagcag

SEQ ID NO: 257835 - DNA, 388 bp, Gossypium hirsutum
cccttgcgtccgcccacgcgtccgcccacgcgtccgcccacgcgtccgcagtagcaggctcgattcagatgctgaggtaacatatcccacatctcaaacatcatccatcaccagtgaaaatgttggtttaggtgaaactgcctcttctagttctagtcgtttcccaaattcaatgaatgctcagtcaagctttccaccaacatcaactgctgatctacaagaacagatgagaaatcaaatgaaagatccagccatgcggcagatgtttgcatcaatgatgaaaaacatgagtccggaaatgatggcaaacatgagcgagcaatttggaatgaagctttctcgggaagatgctgcaaaagctcaacaggctatgtcatccttatcacct

SEQ ID NO: 257836 - DNA, 215 bp, Gossypium hirsutum
tcgataatgattttattctatatgtcatgaattatgaagagatttttacggcttctgggcggacctacacccatttggcgccttagccacccacgagatatgcactatgacccagaagctcgccacgaacccggaaaatgatattggcgccctgagtattcccaatggcacggttagaattcaagaaggcatcaaaccgacacatgcttggatgg

SEQ ID NO: 257837 - DNA, 292 bp, Gossypium hirsutum
gttttgttcatcgaagctgtctcggattatgaagttaaggagttcgaacgagctccacggttcgtaactcagtggaggaacttcttgtcggtccacgtggcggatgtcttaaaaggggccccaccacttgtcgtccagctgacttggcttaaagacggcaatgctgttgtcggtgtcggcattaatcattgcctttgtgatggtatcggcagtgctgagtttcttaactcgtttgctgagttagcttccatgagtcaaaccaagttttctgagttcaagtttaaacctaaac

SEQ ID NO: 257838 - DNA, 129 bp, Gossypium hirsutum
cccagcgcgggcagtagttcggccagcggcagctcgtccgtgccgtgcgcgcaggcggcgatctcgggcgcgaagtcgcgccggcccacccggcgcagcgcggccaggatgtcgtcctcgccgatgggg

SEQ ID NO: 257839 - DNA, 451 bp, Gossypium hirsutum
agcttattctgtttcttctctcagtgaaaaccccatcagttgattttttttttatttccatggcttctcttgttcttttattgtctgaacttgttcgtcaccatgaaccaaactttggtcttgtagcaccatctaccccttcttcttcatgtggtgcttcaatgtcttgtactgccattgatgccagcaagtacgaaccagagattgtagaagaagatccacaagagctaaaggtttctgttgacctcgtctggccatagtgttccattactatgatttgatgcatgcatgcatgcaagccagatttctatggtttctgagctcatttttggcgtgtcatcattttattacatgtacaaaactaggaagaataatgtctttatgtaacacaactgaacccaacttgggtttcaattaatgtatttaatctttttcattctctttgtagaat

SEQ ID NO: 257840 - DNA, 483 bp, Gossypium hirsutum
  unsure (1)..(483): unsure at all n locations
cgtgtattcttgtgtgcaaccatgcatgtagaaccgtgcagagttctcaggtggtggctccaagagctgaacccgatgacaacaccatggatatgctcttagttcacgggagtgggcgactccggttgatgagattttttgtgctactacagatgggtaaacacctttcactgccatatgttgaatatgtcaaggtaaaatctgtcaaaattaaggctgggaaatgcacgcataacggttgtggcattgacggtgagtatttccccctcaatggagaagtagtgtcatcgttgcttccggaacagtgcagactaattggtcacttccgtggccatcatgatgtctgatgaagagattttttatttatttgaaatgttcttgtcatatctagaatgcaaaaggctccctacangactcacggctctgtgagtatgcggagtatgcttaagacatatttngtctgaatattatattatatcacat

SEQ ID NO: 257841 - DNA, 329 bp, Gossypium hirsutum
gtttcttacattgttgatctcaagaaaggagaggttaccaaaggttagccgcttatttaagacctatccttattttccaattcggttcaatcctgcttttcttcttcttttatcttggttgggtttgtttatcttggttctattaatataattacaactttttaaattctaatgatggaatagagtctgaagtttgtgtcttttgtaatcacacatcgaatgtagaaatttcttgtggaatttgtatgtgcctgagctcttcaattatagtagttagttcctgaggtgtggttctccacagttttacatgaattggggttagaaccatc

SEQ ID NO: 257842 - DNA, 292 bp, Gossypium hirsutum
cccacgcgtccgctttaaatggctcataaattgtatgctgtagctagaattatcactgttcatgaattaggtggatttacttcgattctaaatctctcttttcttttttggctacacccacagttcgggtgaaaataaacaggtctgtgaaaagcttgctgtttgataatgcctgaatcttcgattgagaacttcataaattgcccatgccgctaaaatgagttctgaccagagattttgtaggatatcctgtaaaaaattttaatgtgcatgagattttcttgtggagctt

SEQ ID NO: 257843 - DNA, 356 bp, Gossypium hirsutum
ccttcgcttccggggttgcatgtaaatagtgtgttctctgttcttttcttttttttcaatgtgctattttgtctctgtctttgtctcttgatgctatttgatgtctcgagtaaccgtagaaggtgttttaagagctgacagctaaagctttagtttgcccttgtttttttgtaagtaatgttggccaagggtgcgctagcccacggtggctattgatgctttgtcattcaagctgccaccgtgagcggcggatatattacataaataaataaagagattaatggggtatgtgtaatgatgtgcataagtatgttattttaatttaatcaaagcattaataatatttaattaatttt

SEQ ID NO: 257844 - DNA, 190 bp, Gossypium hirsutum
cccacgcgtccgctagtcttagtaacttagaataagggttttttgttccttgtctgcgtcatgatgttagccaagactggtatggcccgactacggagtacatggctttgaaatggaatagatatactgatattagcactttcgttccagagtgcgcattttgtaattaagaatctgagcttgaagggtc

SEQ ID NO: 257845 - DNA, 269 bp, Gossypium hirsutum
cccacgcgtccggaactttgcatcggggactgggttagggttaggccatcaatttcagtcccgactcaccactggggagaggtaactcactcgagcatcggggtagtgcatcgaacggaaaatggggacttatgggtggcattctgctttatggaaaggctatggctttgtaaggcttgcgagatggaaagggtcaggccatttaaagttggcgacaaggtgcggattcgagaggggcttgtaacgccaaggtggggatggggaatgga

SEQ ID NO: 257846 - DNA, 412 bp, Gossypium hirsutum
cttgcatcaaagttggtccaaggttttgaaggttctgcagatgataaaaccttctcaatatctgattagttgcagtcaccaactaacccccgacagaattcaaaatgccacgagctagtgaatgacttccaggtatacacatggtctgctcgagcacttgcttccttaacttcacgctcgcgtagggaagaccgatttggagttgctcaactatctggtagcaatgctgctgccatctcaacactcatagcttgtttacttgctgttgaaacattgatggggaaaaaaataagcttacaaccatctcatcagttaatgggagcattcagcacgaaatcggctaccttcagtactggaagaagagatgttaggacaggaaaaaggagagatgacccactatattctaaagcat

SEQ ID NO: 257847 - DNA, 223 bp, Gossypium hirsutum
cccactcttccgcccacgcgtccggcttacctcttggctaatcccgaagcctgcaactaagatatagattgctttgaattctcatgctgcttttaaagagtggccattactttcaatggtgttttttatattttctttttccacttaaaacctaaactttcttatgattattttaataagagcggtggtggtgatcgagctttgatcatctttattttcaaaa

SEQ ID NO: 257848 - DNA, 341 bp, Gossypium hirsutum
gtgaaatatagttgaagtgtctccttctctttcttatagatgtgatgtatgtctattaacaaaggatctttcggttgaaactcaaacatgggttgcaaatttttcacaaaattattgaaaatttttggttcagccatatccaatggatattgaaacttaataatcatttttgcaaaatccaagcgattccttttctgatcaaacattgagcttctttcatttgtggtagttgaatatatcaacttcctttcttgatttcgtatttttctttctagacatctttctcactgttttttcaagcgttccactcttgcttaaccctgttaacttcttatgactct

SEQ ID NO: 257849 - DNA, 252 bp, Gossypium hirsutum
gttttttcgttttccaggtaaaattaaagaatgtatttgttcttttttttattaattccttctttttcactccaacaagaagtattgaatcccagttttctgctaagtctctagggtcatttcctgtttgtcaattgcttaagttaatcattggtgtgaaatgtgtaactttaatgtgtatattacaaataaacattacatctgttggttttatccgggatttttttttaacttattagcaataatttgttt

SEQ ID NO: 257850 - DNA, 367 bp, Gossypium hirsutum
tgcttctattgtttcattgaccctactctttgccttgttgtattcactaaatttcttgtttttgatccacaaaatctcccataccttatcttcagtttcctggattctcctcctttttgatccacaaaatctcccataccttatcttcagtttcctggattctcctccaatcacttgcttctctcgtgtatcttgttttgattctaagctttgtttgcttacttgtgtgtctgttcatcacatcatctacatttccctccactgtttctctcttctatattttcccaagattattttctctttcctttttttccttcctattttttttctcgggaaaaaaagactttttttccggtatacccagatc

SEQ ID NO: 257851 - DNA, 368 bp, Gossypium hirsutum
ctctttgcctgttgatatttctcattgagcaattatggtctcaagtcttaatccaagtgaccagtagaaggatagcttttctcattgaacttgtgttttcaaggatacccgtacaaatactctgagttccaaaagaagaaaagggttgctagctacaagatgtatcgtgttgaaggtaaggtcaaagggtcattgaggttgagctttaggtggctgaaagatacgttcacacaagctgtttatgggtggtggtgattgtagcagtttctgggctcttttgtttctagttgctcttataatttgtcttgcttgtatccaaggtatgtgtgaaaaagaaatttcaattttaaaaggaaggtttttgataa

SEQ ID NO: 257852 - DNA, 220 bp, Gossypium hirsutum
ggcgattctaatttttggagggagatttagcacccaaatgtgcttgtaaaatcttgtatgattggtacttatagtgtcgttgatgttcgattcgacaagacagcggtaaccactgcataccgtatacataccagagttatctgtacaccacactgtagaggcccaatttagcctgggcccgaaacaaaactaaaaaataaaaaaatatatcagtctatgt

SEQ ID NO: 257853 - DNA, 526 bp, Gossypium hirsutum
ccctctcgtccgcccaaattgagcctgctaaaaagctggatatgaacaactatttgattggacaagagattctgtcattagctgaaacagatgttcccccagaagatcttgtcttccacaagttttatatgaacaaaatgaattcctcgaagaaaccaaagaagaagaggatcaataccgtcatggggccagcatcaaattcaggttgcaaatgcatcatcactaaaccaaaggggcagcaggggtaggagatggtggtctctcttttgagaggcttcagtaatctggtggtccagactcaaattatgtatttatattctaatttcacccgtggattgttgtgagtgcaatccttgccatcgcattggtatattagtttcattatttattttggtttattatgtcagtttctggcctcgggagccgaattggacatggttatagtttgctatcccaactgtgctgtgcttgcccaagatttctttcaattgactggacattgattgattatcagtaactgaaaacc

SEQ ID NO: 257854 - DNA, 389 bp, Gossypium hirsutum
cttgtttgtactcacttgtcggctccacttgcatctctctttgtttatcaatctctccctctctccctctgtctctcacttactttatgcagggaattcaggtggtttagtgagacaagaggcatagaattgggctttgaagatgtgaagcatttgatttctttttgctcgatgccatcgatattccttatactagttgagtttctttaggagctgctggactaaccttgataacttatattgttgggagaagattcaacttttctttttttcctttctttttcccacttatgggaaccctatattcttgatttttaagtcttggcccgcagcttatacgtttggggttatatttttttggttttttcatattcatttgtggattgggg

SEQ ID NO: 257855 - DNA, 192 bp, Gossypium hirsutum
aaaattaaaaataacaaggaaaagggacataaacaaatatctccactggaatgatggtactattactcttttctagtaatacggaaaagacaatatatacatgttaaactacatttacaattcggatttgatcttgttactttaaacaagaatattttggttatatttaatttttgatatgtttttattttt

SEQ ID NO: 257856 - DNA, 368 bp, Gossypium hirsutum
ggtttttgtagatgacaaagcaaagagacaacaagttgaagaaatctcctgaatctgatccttcttctgagaattctgattctgggtattttagaaatggaccaaagaaggtggaatcagatgattctgtcgatgggtttctcaagaacaatgagtttaagaagcctaatatagaatctggatctgggttcagagacagggatgcaacttatagcaagtgtttgagtaaattcaaaagtgtgaaaactggatctccaaagtatgatttaagaagaaatgggaagaatgattattacagtcctcaaaagggaagcaaatatgaatgtttaacctgtaacaagacctttgactcccatagggctcttgga

SEQ ID NO: 257857 - DNA, 387 bp, Gossypium hirsutum
cggaattcctgggggaatatggtactttgcctgttattgcaacatcctttgacggctttcctttccccgggctcaattcttttcccttttcgtgttttattctttatctcatctttttttcctttgatttttctttttcgattttgtacgacttttaagatcaaatctatcatctcaataccttagtttgagatggcgacgtactttcatggaggctcagacttccaggctgcttcagctgatgggttgcaaacgctttatctcatgaacccgagctgctttccctacgctgacacacaccaacaaccatgggctgccactaacatgttcttgttaaaccccacaagcttaccccaagcaccaccgtctaaccatcatcagcgtttc

SEQ ID NO: 257858 - DNA, 395 bp, Gossypium hirsutum
gaagacatgaaggctttcttctgtctaggagcagcaacgagggcatctatcatttgaagtgactttcctgtacctgagattagcaagattagggatataatcccaggaaatccgccaaatagtaattgcaatttttgagggtagctgtaggctccataatttcttgtaaaattcttttatctcggtctgtaataagtaattaatagcattcggattagcatcttgtaatagtttacaggcactgcatactgaaaacttgccagacaattctcttttccaaatttgagtatcctcgtgctcagtcactgcaagacggatctatagaattttttgagcagtttcctcttgaaagatagaaatattgtctcctctgcccactctccaacacatccttt

SEQ ID NO: 257859 - DNA, 460 bp, Gossypium hirsutum
ggtaattttgtgaaaatatgttgaaaaccaatgctagttgtttgaatgaatgaagtcaaacagttatgctttgggttgtgttggctatcactagagcttctggattgttaaagcaattgctggttttgattaattacatctatggtctgtccaataggaggattgaattgctttgcacgtcatcaaggtcttttcttttagagtttctagtttgcttgagcttaaaatgtggatgtgttttagtagcattttgtctttatatgtttcttacaaaagttcctcttatgtgccttttacttttgtgaatcatgaggatattgatggaacttgagcttcagtttaggtttctggattggagtgtttctccttgtattagggctgttaataccaccctgtgtttatctcaaagctaaagatacgaggtgtcaaactacatttctttctgctttcatttaaatgg

SEQ ID NO: 257860 - DNA, 300 bp, Gossypium hirsutum
cccacgcgtccgcccacgcgtccgctttgttgattgagttgcatgatggaatgacagaaatatatggtgtgatgttctcaaacccaggttgctgcttatggcggacttggactttgtaagaatatttacagtacttgtcaatgatgctccttaccaagtcatgcaaaatataaagctgtcatgtatccttcctatttcttcaacttatacaagggccatttccattgacaccaaaaaaaaaaaaaaaaaaaaaaaaaaaaaaaaaaaaaaaaaaaaaaaaaaaaaaaaaaaagggcggcc

SEQ ID NO: 257861 - DNA, 194 bp, Gossypium hirsutum
tttatttttttttattcgttcgaacttaaattgtgtgtttttttttaatattgacccaaaccttgccatgaaattttttaaattgtgcaaaatgccctatattgcaaattgttagttcctggttctccatatttgatattatatgtgagggaaaatcatgcttattataagcctctacttcacataattgtact

SEQ ID NO: 257862 - DNA, 497 bp, Gossypium hirsutum
tttaaaaaaaaaaaccttcaaattctccttgcttctctgactatgggacttctccagaggtctgccctaccgccgccgtagccagtggccggcattgcaggaaaacgagcctttacccttgcctccgagcgaatttgaaggccaagcaatcggagcccgaatagccgagaagtgatggttctcaatcccatccctttcacgggttgatcctcgacgacagagaaggactctccgacatcggccatgggaaacgagttttcaaggaaggaagaggcagaagctgctctgaaggcacccgatgctgtaatgggtaaccgctttattaagctctggtgtgcaaatcgggatagaatacctgatggtgacataaacagtggcagtggtgtgtcagtaacttcacgtggtctaacagcttctgttattccagctcagaggaaagattattttcaacctattcctctgaattcccccaagcctcatagtatgaatggtctcat

SEQ ID NO: 257863 - DNA, 421 bp, Gossypium hirsutum
cctacgcgtccgcccacgcgtccgaaccggtgcatgtgtcccctgtattttacgctattttcgtggctttcactggcaaaaacttgagaacattggccctactgtagttactgttggaagtgctctaacacacatgcttttgaattccacttaaagtattcagattgagatggtttttatgtcaaaagttacgtttcaccgcaatatcaaatgctaaatgtgtaattttttttggtttttgattcaatagtcggtttccgagccataatgtagcaatattacatttttcttctttgagttttaccattggctttacctttgttttttttgtttgtttcctttggacgatacaaagcgtatgaatgttgatatcatgtgatgctgttgtttatatagaatcatatgtactcattggtattat

SEQ ID NO: 257864 - DNA, 274 bp, Gossypium hirsutum
tgtacgcgtgggttttgttttcttaattatggcagcttcctttcgtaagtcagaaccagtgcagggtagatcacaaacccatgctaccttagaggttgaaaaccttaatccaacgccagcgagtaaaaatggatgccgaagtaacaggtttatggaggatggtgttctcttgacttgggacaatttgtcggtcacggctgctggtggaagaccgatccttcagggcatgactggttatgctcgccctggtgagccgttggccataatgggacct

SEQ ID NO: 257865 - DNA, 327 bp, Gossypium hirsutum
  unsure (1)..(327): unsure at all n locations
atgtcactcaggccaattcgtatgttgctcgaatatgatacagtcaaatctctctttttctttaatatgttctgtatttgttgactcccagatgacacttttttccttttttttttcccttttcattaactgctttaaacatttttatcatgtagccattacctgatttctatgttagtggtctttgttttgacaaaaaaaaaaaaaaaaaaaaaaaaaaaaaaaaaaaaaaaaaaaaaaaaaaaaaaaaaaaaaaaaaaaaaaaaaaaaaaaaaaaaaaaaaaaaaaaaaaaaaaaaaaaaaaaaaaaaaaaaaaaaggnaggggg

SEQ ID NO: 257866 - DNA, 393 bp, Gossypium hirsutum
cccactcgtccgcccacgcgtccgcccacgcgtccgattgccctggttttgcccaaagaaacaaactttgagtgggtttgagcttcatggcttacttccacagaaacccttgttccagtctatgaatctttgggaatggataaatggtactcgtgcatcaccagcagaggggtaagaacccagaaaaaaaccatgctgcttatctccataatccattgtacagaaagcctttttgtccgctgatagcttattagttttgttaggtactacatgacagaacgaacgttatagttttaaacttagattgatgaaaaaaaagtcatcactagttttgttggtactgtttgatttcaaatcctgtacataaagcaatatttcttttgtttttgtggc

SEQ ID NO: 257867 - DNA, 235 bp, Gossypium hirsutum
gtttttctttctttttttgagttaatctgcctggttttgtctgtctgaattattgttgcagattctccatggccgtcaagtaagagtagactatgcaaatgacagacctagtcggaactttggaggtgctgacggctatggtggtggcggtgagatactgatgattcacacacctgccatgctgttccaacacaactggcttttggtttcctttggattgagctcataactatac

SEQ ID NO: 257868 - DNA, 372 bp, Gossypium hirsutum
ccctctcgtccgcccacgcgtccgcccacgcgtccggaaaaagaagccacaactaaaaagaagacagttgggaagaaaaagcagctccatgttgataaaccagatgatgatttggtggttgctgcttatgatgacattgatgattacgactttatgtgattcatttttgggcaaatgccacccaccttcaagcgtttgcactacggatccttgggttaccacaacaaccatatatatgcagatccggcggctcttctcttttttaatttttccctttctttcttcttccaattcttggagaaatttagttgtctgatgaatagtctatccataatatggatgatattgttacatgaagaaaaccattagatt

SEQ ID NO: 257869 - DNA, 251 bp, Gossypium hirsutum
tgtacgcgtgggcggacgcgtgggtgctatcttgcgtgtactgtcacagaggaagtaacttggagatggatttttaacccaaaaaaaggaccaggttgaaccttttgtgcaactaaaacagtgaatctactagtgaaggtaaggttgctatggcaacttgaaaggagttgtttcaaagtggatctgattaccttgacttgctaaactcaaaaagaaggggctcagtctttgattagcaagctgtattaatg

SEQ ID NO: 257870 - DNA, 237 bp, Gossypium hirsutum
cctacgcgtccgcccacgcgtccgctgtctttatgattccaggggcttggccgatggcacctctgaaaacattaatatggttcaatattggatgaataatggtgttcgtcatggggaacctgttatcaggaaatctgatgattccagtttaaggagaagaatgaaatttaaaccacgagagctaggttggaagttctgcaggccccagatggttaattttgtcatttttgttgttga

SEQ ID NO: 257871 - DNA, 289 bp, Gossypium hirsutum
cctttgtgatcgaaacatgaagcaggtggattatatcagatttcatggctggaagaaagaggaactttgagggctaacatttggaatcaagcaaatgaggtgtttgaagagggaaaaaggaggctgtcgaatttttattacaaccatgcttttgagatcttttgaatctgaattatctttctctaatatttcgatgcattggtgttggtacttgttgtttcatacttttgcgtgttccattgtttgaaactttcattttcccaatgcaattcattcaagtgtggttttt

SEQ ID NO: 257872 - DNA, 100 bp, Gossypium hirsutum
ctatggagcccacaaatgcacagtgtctctagtatcatcgccaatggctaaatgcagcaaaccatctaatctccatggtggattgaagggagctaccttg

SEQ ID NO: 257873 - DNA, 399 bp, Gossypium hirsutum
gagattttgattccttcttaaccactcctgggtccacaactgtatccttggttccaagggaaaatactcacaacatcaattgaaacaactctgcttttgttgtttccaatcttaggtggttctcaaacttcctattcaaaggtacaatttttttcttcaaaagatacatttaagttttagtcgtgcagattagaatggatcaccaggggcatggacagcccccggcaatggggatcataggtggtggagcccaaatgccgtacggtactaacccgtatccaaaccaagtgactggggccccgaattcaggatcggttggaggcattcaaccgagcagccagccaacaggagctcaacttgcacaacaccaacttgcttatcagcaaattcaccagcagc

SEQ ID NO: 257874 - DNA, 143 bp, Gossypium hirsutum
tcataatatacttggtacctgatcatcttatagatggaagaaacaaatggtgtactttgtacttaaatttttaccacagaatttgggtcatattcgatccgtcacttgggacttgttttgatggatagtctgttttaatgaat

SEQ ID NO: 257875 - DNA, 295 bp, Gossypium hirsutum
gttgtgtgtagaagagaagggcctctcttctggtgccatccagttcttagcccaccaatcttcttcttcctcctcctcccttgtttccctttcctgcccatttccatcttccttctttccttcctctttcctttgtcttcttgctttatcttccctttatcttcaatcttttctgttctgtttttttcttagattcataggtaagttcgttttggttggcttgattatttcctcacttcccttcttttttggttcatcgtgatcttttcatcaaccccttttgattgttatatag

SEQ ID NO: 257876 - DNA, 406 bp, Gossypium hirsutum
caaagctaataatacttaaattaaattattaattatttaaaaagctaaaattaaaataaatccatttaatcaaatgttaaaagctctaaattgaattttttaattttagggagaggttaaaaatcaattattttaaaaaataaaaaaatgaaataaattttccaaaaatcaaattatatcttcttgttgaaccaatgaaaccaatcagatgttttaacccaactcaaatcttcgtaataatatatcttaaacggtagcttcaacaaagatgagatttggtgaaagtgttgccggcttgagaagatcattttgatcacaacaatatcacattaagggtgggtttagatggatgatgcgtttatctgtggttagtgtaaaaataatggtgacagtgagattaaatatt

SEQ ID NO: 257877 - DNA, 157 bp, Gossypium hirsutum
  unsure (1)..(157): unsure at all n locations
cctgagtcnctttcaacaggatgcaaaactagtcctgtccctttgaaagatgagattgtggaagaactttcttcccagttttcagcagatcatgttgaaaatggtcatggttgcaataaaaaagagtctacaattgaacagtacaatttgtttgcag

SEQ ID NO: 257878 - DNA, 213 bp, Gossypium hirsutum
caattttgccatggactggttttcttggctctcaaaaactggcctggacccatcccttgtctacgagtacgcccttgctttctcccacaacgagcttgaagaagaagatatagtttatttcaaccatgagtttcttcaaagcatgggcatctcaatagctaaacacaggcttgaaattctcaagcttgctaggaaagagagagggctgacccc

SEQ ID NO: 257879 - DNA, 483 bp, Gossypium hirsutum
cggatttctaccgacgattaaagaaccctctcccgatctaattacactgcatttaaatcggatagagagaaagagaaaacaacatgaagagaaaagatacagtcaaactcatcagcgctgaggagatggaatttattattgacaaggacgctgccatggtttctcagaccatcggaggttttgcggagatggagcttggagaagtgacttttccggagataagcgctgtgattcttgagaagatctgtcagtatttttattgggctcttcaatattcaagttattaaagctgcatggtgaggctggaatgactttgcgtgaaggacaagtaggggcatattcttgtttttgaatcttttgcagtgactattgttcgaggacatcagcagcatcccggataacatctgaagatgttattttcttgtattattggctatgaactgcaagaaacgttctggtgtttgaaatttagaaacaggcaga

SEQ ID NO: 257880 - DNA, 225 bp, Gossypium hirsutum
cccacgcgtccggaaaagatagtggagtaaagtgcaaaattacgatattttgcaccgaggtaagtaaacacgtgacttaatgtattattttgatattatttgatatatgttgagatttatttggaattaaaataaatgtttggcaatatcctaaaaatgttgttaaatcgggaaaggtgataaagggttgcaatatatgggttatgggttgaacactcggaataa

SEQ ID NO: 257881 - DNA, 325 bp, Gossypium hirsutum
cccacttgtccggttcgatcaccttgtcctaaaactatcagacatttctcagcaattggaatcatgttacagggatggacttcagctatttgccattttaaaacgtaaataaatcaacgcttcatttcgatatcgtaacgatgctatccgaaaagactctatcttgcatgcaaacatttttaataagattcaggtttcttggattattttattaaagcataaatttgtactttgcttggatagattgctggtatgaatgagcaagtttgttctctgatggtttggatctataataattagaatcccattttctgggtttcttttc

SEQ ID NO: 257882 - DNA, 550 bp, Gossypium hirsutum
cttagttatgcgacaacctcagacagaagagcaagccaaggcttgtgctgattcttcagagtctgcaaagaaagatgaaataaatggcagggatacttgttccaccacagaaaagtccagttccttgcctctagaatccacttccactcaagtggtacatgttcaggtaccttttgagacacaatccaccttagtaatcaatggctccaatgttggcctggagcatgcatcccctgatactagcatgtcatctttgggacgtgcatttgatagatctccgtcaaccgaggaaacagtgagcacatcctgtgctcgaactgatacatcagcaagtacccaaagttcatctgatgctgacatgtcaggtagcacaaaagccactgtaacagttatacggaacccctctaataacatcatggatggtttgatgcgtcgctgggatcttaacttctttcgaaacagtcgatgaaaggtaagatgagcttgtttgagctgccttgggattgaattatttttggaactaagtataggatccgtagctttgaaaatg

SEQ ID NO: 257883 - DNA, 272 bp, Gossypium hirsutum
cccatgcgtccgcggacgcgtggggaacattttcatccgtaaaatattttgtgataaaaaaattaaaagcattaataactggattaagtaacgacaaataaattattaaaaaagtggtggcgtacaacacatagttagaaggggtatcaaataaaaaaaaacggccagaaacgtggggcctaaaattttggaaaccgatagagaaactttaataaagtggatcatccattaccattttttatagactaatttaagataggtgaaaaataaat

SEQ ID NO: 257884 - DNA, 341 bp, Gossypium hirsutum
tatgagatgcttgaaggagaaccaccattctcgaattatgaaccttatgaagcagctaggtatgcagcagcaggacacacgaccttcttttcgttcaaaatgatacctctctgaactcagagacttaacagacaattgatgggctgtcgatatgaatcaaagaccttcttttttgtatattcttaagaggcttgaaaagatgtatgaaaaaaaatgtctgctcagatcattgtgtgaggatatacaatacatcgtattcaagatttgatgtagctgatgataaaccttgcgtttccaccaatcacctccaagctcccccatttgtgccgatggatggtact

SEQ ID NO: 257885 - DNA, 513 bp, Gossypium hirsutum
ccttttcgtccgtgcgtaattgaatcgaatattcatactgtctcccttccctttcttctacctccaattcatatcttgctctgcaaatcctcagttttaacaatttttctgagattcaaagccaaacacaaatcataattcggaaggcagagaaaggagaagggaaaccatgataacgcgatcgaatttagctgagcaattgagagagtatcagcttcgatctaagcacgattgggcttccgtttcgtttttctcatccacgtctaatctatcatcttacagggtggatgttatggtctttgtgatatgggaacttgtcattttagctttcctggttttttcagctgtttctttgtattttgggcatatgcagcttgcctttatcctagtatgcatcacaatgctattgcttctctgcatgaaaatcacaaagcaagtaaagttggccaggaaaaagaaaagaaggatgcttcttccattatctatttagagctacttgaagcttggattagt

SEQ ID NO: 257886 - DNA, 448 bp, Gossypium hirsutum
cggtctcgtgggcggacgcgtgggaaaaaaaatatatagcaaaagacacttcactcaaaaaaacagaagacaaaagcgaaaccaaaagtcgagatccccaaattttggttacagtgaaatgcgaagatccatcggttcaatggcgcaacttgaagaaatagatgaatcgaagaataagaacactaagcagcagaaacgaaatcatggatcaaccatgtttttcgtaatggtggactaccttttcctgctcatcttcttcggtttcctcgttttcattctctttaagatacttcatttcttctgattattcttcttcaggttactcttttatttcttttatcaattacccttgtttttcgccatttcaattcaacaaaaaatgtattgtacttcttttcgtgatctttttgcctgcacattcaattaactgcaactctgtcactctttc

SEQ ID NO: 257887 - DNA, 188 bp, Gossypium hirsutum
  unsure (1)..(188): unsure at all n locations
atngtaanccggcaaagagggatcataatgccatcaaaaaagacaacatctaagactccagcaccagctccaaagactggagcagctcctgcaaagaagacaagcaccaataagaatgcagctctctttgaaaaaagacccagagttttcagcattggtggaaacttgagaccaaagtctgatttgac

SEQ ID NO: 257888 - DNA, 122 bp, Gossypium hirsutum
gttatctagctaattttcctttgatggacttaagaccaggagctaaaggtacttgactattcgcgattagtcgacacattgtggtgactgcagatggagctggaattactgatcgtgaatac

SEQ ID NO: 257889 - DNA, 151 bp, Gossypium hirsutum
atcgtcatagatcaagatccttctctgcggttgcgtcgtgttaagtctactcgcaatcgcgaaccgaaaccgcgacagttcttcgtttatgggatggaccggtgactttgaccgctcttcttctccaaggggaagatactcgattgtaatg

SEQ ID NO: 257890 - DNA, 462 bp, Gossypium hirsutum
ctttttctgggactgggacccaaggtactacttactaggtgttggcctcagagcagggttacggggaggtcgaagagctttgtgttcgtattacacaattggaagcccctcagcaagaaagaggacagtaagaaagtcaagagcagacttagccggaccgatataaaaggattctcctcccttaacatatgttggagggactgccgatccaatttcaagagacccggcctcactttcattaccatgcctttgcccaagtgacttcgtatctcacctgacccggtctcacatcctttagtcgctcagaacacgaaggacggtcaagcatgctctcgtgaaatcccaactttcatccgagacttcaaggataggaataaagcagctatcaagatcaaagcctttttcgcacagcacaggagggaagtacgaccagagcccagggaaagacttaagccaagactg

SEQ ID NO: 257891 - DNA, 436 bp, Gossypium hirsutum
tgaatcttttatttttctctcaaactcccttctgccaaaatctagactccggcatcagaccaccatggcagccgtctgttgccggcgacggagccgctgtccgtggttgccaaaaaacaaaaagtctcattttttggggttttttggcttcccgagtctaaagacgccatctttcatcggagatggtaacctcggccccccttttcacaacgatataactgaaaaggtaagatttttttttcgtttgtttctttaaaaaataaacaaaataaaaaaaaagatgaaaagggaaaacagaaaaataaaccgcctttagaaaatttatattattttgattgctatctctgtgtattcgtctgtaaaaaatttacatcgattcttgtggctttttatagccgaaaaataaatacaaaggttcttttttttccatattttc

SEQ ID NO: 257892 - DNA, 445 bp, Gossypium hirsutum
ttctgcttttgcaggttttgcagttagtcaaaatatggggttaagttcttacctatggaatgcactcccttttatggcaacgattacagtggaatgcacagatgtgggtatatcagtgataagtaaagcagctttgagtaaaggaatgagcaacgttgtttcagttacttatttcaatgctttgggtactttgatccttcttccatactacatttttttcagagataagcaagctcctttgactttctcactgctttggagattcttcctcttaggcttgatagggtttaatttcatataactataattattttttaatttcttcaggaattttgtttcctatttttgagaaataaatttgtgacagctgacatatttgttcattaattttcagaagctcaggacagattatatttcttactggagtcaaattcagctcccctac

SEQ ID NO: 257893 - DNA, 460 bp, Gossypium hirsutum
tccacgcgtccggtttaaagttgttttataaaaaaaataaattgcaaaagagaagggaaatgagagttttcagttggtacatgtgatgcaaacaaagaagatcatataacaaggaatttaacagttaagtgaattaaatgaaaacttagttttatgaaaattttgtaattttttaaagttaagtgatcaaaacttaaatatactaatagtttagtggcattaggtgtagtttacccaaaaaaaagaaaaatatcttatcgatttttcacctaaaagctatactcgcttttttccgttcctcttcctcttcttgtttcattgtcagaagcttcaatcaaaagaacaaagaagcagtgagagatgcatctatggccatcagttagactaagggattcattcaaaatcgcttatttaagaaaactagaatggaacctccatcgaatgaaatcagagaaacaat

SEQ ID NO: 257894 - DNA, 415 bp, Gossypium hirsutum
cggacttttgggttcttcactttgatttgtcattctaaaaagcaacaaaagtataggatacccttttttttccttcctctttttatctctctccctctctatatattttgcacccaccatttgttttgctttagattctcgattctcatgttcatctttgaggatatattgccgctgctccgccttgatcgtttgaggtcgaagagtaggcttttcccagagtcctttttgcaaacaataaccgattcaatgagcaacacgagctgccaatcctcggagctagagatttgccgtgacgaatcagcggcgttgaagttaaagctgatagctatagcctcaatcctcctcgccggtgtggccggggtcgctattccactcatcgggaagcaccgtaagttcctccgtacagatggga

SEQ ID NO: 257895 - DNA, 444 bp, Gossypium hirsutum
atcgactttacagacacatttgactacgatttggcaagcgagaaatcccaatcgaaccttaggaatagattaggatacaagtgacatgtcactaatgttttatgttatgtgatccagatgctggtcctgtatgttctaccggtggatgaatataccggcatatgttgcggttacttgacatcttatgtgagtagcaccgtgtagctatgtctcgactgacagcttctgtgagcaggcccgttaatggctcgagagcgagcatatatatgttatgagataaagcgtcaccaagctagctcggtttggagattgtcggagatggtatcacactattaaactattattttgggtactgatgattttaaacattttaagaatatggcatgtatagagatttggtaattttgttatatgtgtcattatgaatttagccaaatgtattaa

SEQ ID NO: 257896 - DNA, 417 bp, Gossypium hirsutum
tttttgctcaagagcaaggctgctttgaaggattttgcagtgctgatatagaaaaatgctgtggagcaataaaaaatattaagcctgaaactcgagaagaggatcatatgccatctgtttcacgtggacttgacttaaatgttgtctcagtacctgatctaaatgaagaactaactcctccatttgaatcctcgagggatgaagataatggttgcactttagagctggctgtggaggcggatgacgatgctgcttcgcttgaaatagagaagaacaggctagcaagatcacatggtagtggagattcccagacctggactaatggggcgacaggggaagtgcctgctgtggattctataccgagttgtgcaggataagagcagcatactcaaatgaagagacacatgactgtgatag

SEQ ID NO: 257897 - DNA, 481 bp, Gossypium hirsutum
cgccacaccattaccaatttcatcatttttatttttcatgtcattttttttgttttttaatctcatcactctttttagagtccttgttgtatacgctttaattaccaactattaggcaatagggtattacataaagctcatgaagaagacattactgttgattttgttaaaggtcacttcagtttttcagccatcatgttcttttcttcttgcattgcccatcctctaatctcaccaaagggttgccaacttcacaaattgctagcagcgtatttaccttgggaaccgcagcggttcttccattctatactcttatggtttttgctccgaaatctgaattgactaaaaagtctatggaaagtagcgtcccttttattgtgctcgggcttctgtatgcatatctgctgtacctgtcatggacgcctgatacattaaagctgatgtttgctagtaaatactggctgccagagctatctggtat

SEQ ID NO: 257898 - DNA, 253 bp, Gossypium hirsutum
cccactcgtccgggtttttatggagttgaatgattatccaggttcaggagctaataatcgtcacactccaaggccacaatttggcagatgtgccgattgttgagtgtagatgtatgttttctcatagtataatcctttaaaaacaatgcttttggtccataatctctcattttattgcttcttaaatttgtttctttgtttcttgtctgttttcagagttgggaagttaatctgtatttagagctattcatag

SEQ ID NO: 257899 - DNA, 515 bp, Gossypium hirsutum
  unsure (1)..(515): unsure at all n locations
gattatgaaggggaaataaatgaaggttagggttaaggtgaaagaatgaacagttggtatttgatagagagattgaaaaaccaggggccatggtctttggatactacttcacctgcaaacgcaaatctatgggctaatttcaaacagcggatttctatctttttctctctctctttttatatacgcatatataccccccaattttctttttcctgcttttaccccttcgctttcctggtttctacaacattatgacccctgctctcacactatcatctaaatatctccaatttattttatgtctggcttttctcttattgttttttctacatcttttctgttgattttagtcataaaacagtgatttgccctgtatgcccttagttttaaaaatgcagtaaaatattttaatttttcatttaagaaatacttttatttttttatgaattataataacangtctgtctcgaacaacaagcgactcaaatccaaactacacctagagtaataaacac

SEQ ID NO: 257900 - DNA, 262 bp, Gossypium hirsutum
cccactcgtccggttgatggtaatagacagcgacgttgaacggcagtggatgactcaaaagaaagaaagaacgacaagtttattgtagcacaagagaaaaaaagaaaataaattaagcaggaagaataataatggagtggaaggttaagaaaagagacgataataaatgataattagataaaaagaaaaaaggaacaaagaaatggcaaaaaatagttcaaaagtggaagaaagtagtggtaattgtgctgttgtggtggtg

SEQ ID NO: 257901 - DNA, 477 bp, Gossypium hirsutum
tcctcgcgtccgcccacgcgtccggggaatcagtctttggtatcggtgatataagacaatctcaggaatggctaggaaatcggtggataaatttgaaggaaaggcatgatcttgtgagtaccatactctgggccggaaagcaagacgtaagcagatcctataatttcaataccgacaaaaacaccatttgtgagagtggacagtgtggtaaagaagccactgagtgtaaaggttctgctgttgaaccaggaaatgagagggcacaagatgcgagtgttgttccagatctttcaaaggatgatcggctttctcagttgaagtggaagtcatctaggaagagaaaacgtgtgacttcgacctgtgtacggaagctgaattgcagtcgaaacctcatcaaaagcactgcacagtcagttgcttgtgaacgatttttgattcctgcatccttaaaagtcgataatgagaactgcaagaaca

SEQ ID NO: 257902 - DNA, 496 bp, Gossypium hirsutum
  unsure (1)..(496): unsure at all n locations
ttgtgactaattctgagaagatgttgaccaatgttatgtcggaaaataattcagatactcctagtcctacactaacttctcaaagaaacacgaatcctttgactattggagctactgttgaattgaagcaaactgaagtagcaacaccatgcacacaacatagactatttcctgtcccagtaccagtgaagggtataagattgaataatccgtgcaatggatataatactataattcctccaatgttttgtgcacggtcaagttcatccatggcgccaagtccaagcacagccaaccaacaggaacctgcctttcatttgaatctgtttcgtcattccagttttgaagctaactcctctggacagttgtatgaccgacttgcctccaatacaaaccagtcaaccagccagctcttgcacanactggaccaaaagttggattcaatcgaggatagaggacatatttctcccaccactgatcagagtgcaagcagcag

SEQ ID NO: 257903 - DNA, 449 bp, Gossypium hirsutum
ttttaataacttagtcatgattttacttaatcaagcatcttaccgaggcctataacaacataaacacaattttaacattttatgtaacaccccttacccgtatccgacgtcggaacaaggtacaaggtattactggacttgagtacttgtaatcatttaaaaccgagacataaaatttcatcaattttaaacttttcaaacatattcaagactatctatattaaatgactttatgcaatagagaccttcaaataacataggtcagtattttaggccaactcctagcaacttaataataattaaacgagtccccatacatgtcaaagacttaaaaatactttaaaatgtttatatatcgatcaatagtttgatagtgtgatttaacctctggcaacctccaagcccaagaaaaaaggaacgaggggaagaatcgacaaggaatccataac

SEQ ID NO: 257904 - DNA, 438 bp, Gossypium hirsutum
cccatttttccgatcaaaatgtagagttcatatttgcagggattgaaccaccattttattgggtagccgatgacgcatgaacaacatccagatcttaccatcgaaggctccactcggggaaaatctggtgagccaaattattttatttttttttagaaaaaaaatattaaatctcacattatttgttcaagagaaaaaagaaaatgttgaaaatcgaaacattcaacagcctgagaccctcgcccttattttagagatattagggacctcactggtgccatcttgaggcttgatgaataatacttttaacttcctctttcaactttattctcaacgaagtgaacagaggctaaaaccacttcgaaaggtataatctaactcttttttttcttttgtgtttccacatgcaaaaatgatgaagataactgctggaaaaat

SEQ ID NO: 257905 - DNA, 303 bp, Gossypium hirsutum
cggtctcttgggcggacgcgtgggcggacgcgtgggcgggcgcgtgggtttccgaatgaaggttctatgtcttcttatgctcttccatgttggtctctttaattgctctcttggtgcattgaattcaaagcttttcaagactttatgacattggctacccttaatttcactctcactggtgatgaggggagtagcctctaatcttctccgagataatatttgggtgttatcaattttcaatttctctaaaagtttaaatatctctatatatatcatgttacattagtgacataaatttgattt

SEQ ID NO: 257906 - DNA, 178 bp, Gossypium hirsutum
cccttgtttccgggtatttgtctcttaattagaaggggtgcttttaatgaagtgacactgaggaatgcttcctttttgaattatatgtttgattcaatcaataaaatttggtactatcatatcactgcgctatatactcatgcttggttcaataaatatatttttatgattttggttc

SEQ ID NO: 257907 - DNA, 324 bp, Gossypium hirsutum
ttaattgggagctcctcctttgtggctgagttgtgggaggcactattgcaaattcttgaaactcagaccaccaccaaagccatgaggtatcgatctcttctccatcaccttaagaaaaataatatttctatgtcaatgtatctagcagagattaagcatctatgtgattccttaggtgggtgtggccattatgtatctttagaagaacaaaaatcagaacttctcaatggtcttcttctagaatttgatcacgttgtgtcaattattgcgaaaagtcgtgttccatttgatttgtacgatattactacaacttttcttgatgct

SEQ ID NO: 257908 - DNA, 454 bp, Gossypium hirsutum
ttaattcattggataagcgtaaagtgaattcactttgtttgcttattataaataacattttggaattgtaggtctttttaaaaaaaagggggggttcagtttttttttttttaatttttaattataagaaagctttctctggagaagatgataaaagtgtcgactatggcggagctgttaggagaatgcacggcggcactagcgacggtgagggagagggtgttagcaccatggccgacccttcatttccgtcgtctcagcttttcatattctgctgcttctgccgtcctcaatcaggattcttctttccttgtttacttttagtatatatcagaacctcttattattataattattattgtttatttattattatttttaattgttatcacttatcagaactcttccatgtaaattttgaggaaacccattttgtttgtttattttttttttc

SEQ ID NO: 257909 - DNA, 326 bp, Gossypium hirsutum
gtttatattctaatcctatttaatttatgaactggaggtgtagttcatctgcaacagttgtgattcctgccaactttgatatcaatgtttttgtaaggtgttggcacagagatagcgttgaagtttgatgttgcactgtcacctctactggcccttgtgataaccagtgactggcaacaatgtcattgatcttttgcttgtgcttcgccgtgatttttctgttgaccgaagttgctaggtaggtcaaacggtcttaagaagaaatgccttgtatgtattctggaacatttggtcagctattggaattttgtcttggaccgttcaaa

SEQ ID NO: 257910 - DNA, 244 bp, Gossypium hirsutum
cctatgcgtccgcccacgcgtccggaaaatgaaggggtatatattataaggtattttgtatagtattcagcaataaacctatatatagagagagaatgtattttatatatatgccatatattataataccaagtttgcaagcttaatgcttcatgaatgttaaagtacaatgaaagacactcatggcatgtttgggatatcattttatgattgaatcatgtcgcgatcgtgttcgcttaatgtt

SEQ ID NO: 257911 - DNA, 363 bp, Gossypium hirsutum
ttctcgcgtccggagcaggtacgcaagcgttggggtgggttttcaattccttttgggccccctacgaagttttctggtcttcctcagcctcccatccgcgtcaatcttgggcactacctacactttggtcttgtgggtttataggacttttactgatttggtgaactttattttatttgtgtctagtcatacaagcaatagtatgagcgtcagagtttggagctattgaaagactttgttacagagatgatgtatagtcaatagcagtgatgtttaccttttacttttcttcgctttttctttcttaatggaagcgatcttttatacttttattatatgtatgggtatcctctttctttcttt

SEQ ID NO: 257912 - DNA, 406 bp, Gossypium hirsutum
gttggattcaggtgtagacgtatcatacaatgaattcgagtatggacacttagacttcacatttgcccaccacgaagaactcttagcattcgtgatgtcgcggctgctgctcgtggagcctgatctgaagcgccagtctagtccgaaggaggctctaaagttgaaaaaaacagggcaagctaggtctggagtctcctccgattgatccatcatcgatcaagtacgtacaaaaaccatgcatttccatgtgttttagcttttggatttggcatgcatttccatgtgttttagcttttggatttggcatgtatcttgttgtattgaatgttttggatgcttggtagatgcttttttggtgtacgtgagtgaatagttggatcatcaaagacatcttttacatcattgg

SEQ ID NO: 257913 - DNA, 353 bp, Gossypium hirsutum
tatctatgagatcaagttgcatatcaacttgttggatttacttaagattacttttcaaactaaacaaaatgaatgcttctggtcctgctcgaatgttggtctggtatgttggacatcaccatggtcgactgttgcattgcagttcatgcttaacactttcaaatgattgtatattccaagacctcatattttacattcccttcggtggaaaagagagtatcatgaactttcggcaaaatctaatggaagcaatgggacaaaatgttcatttcgtgattgatagttggatggaaggcgacaatttaactgcaagtgtaatttggcatcttgagtggaaaggcaaagagatacca

SEQ ID NO: 257914 - DNA, 161 bp, Gossypium hirsutum
tctcttgattgtgagaaatggtgtggtattttggtttcttttcctaagagcattatttttcttgcagttaccttggaattatgtactctttccaatgtcttgagtctgacctgaccttaatgtttgtttggctcataagcgagtgaatatcatctcatctc

SEQ ID NO: 257915 - DNA, 146 bp, Gossypium hirsutum
gaatgaaaacttggcggtacgccgtgtacaataaatggcggttgccttcaatgagaggcaaatatatacacatcccaaattgcatacaccctctgcatttgatacctataggcagttgatcacgttactcgttatcatgtattcat

SEQ ID NO: 257916 - DNA, 419 bp, Gossypium hirsutum
catagacatgttcatcataacaacaaaaaaattataaggatagggtataagaatcaaatccggtgtttctccgaggcttgactagtttgctctgctcttggcttctcctcttgctcttgttgaaccgaggcttccacaaacacttgaatactgctccaaatggtggttgaaggacactttctcaagatgtgaaatcaacaaaggaacaggggaagaaaatgaagaacaatggaagggaatgaagagagaaaagtgagagagaagcgaagaaatgaatgagtttgagatgtatttgaagtgagcagccaaggggggtatttataggtttattgatacttcaattataaatatttcgaagatgtacttttttttattgtaccttgttaatgttcaagttataatttgattaaggcttctaa

SEQ ID NO: 257917 - DNA, 425 bp, Gossypium hirsutum
ccttctcgtccgcctgattcagatagttgtagtactgaagtagctgaatgtgtgcagctggagtgtccagagaaggatgatagctccgcatccgaatgtagcgacgattatgccggtgcagtaaatgagacagttgctaccgataatctgacccgaagtgcccatgatgattatcagggtggtgttgtagatgcttaagattaatctaataccctaccaagctgttagagttaattttcgggtggcaacaaattggtccctgctttgaaaaagggtattcattgctagtaaaaaatttaccatgattgattaaattttttttttttactatttgtaattttttgtatgacataaatattatcactatttgtttcttttactttgataattcctgtttattgaactaatggatcagttaatttaac

SEQ ID NO: 257918 - DNA, 549 bp, Gossypium hirsutum
ctctctttttggtcccttcttccattaccaaccctttcaagctttaacttccaatttcctccatggatttttagtgaaatcccaagaacaacttcatggcaagttaagtccgttgtgaagttagctagaatacatatttgtgggaagagaaaagaaaagttaaggatttgagaaggaaggttattgaagagaaagataaaagaagtgaagcacagattagggataaaggcaagggagttgcaaaagagtgaagaagaagagaatgactcatccaagtattagattgtgaagattgttttgaaactttagagtgaagatcaattctgactcatctcaatacaaactgaggcttggaagagagtatgttttgatttttggcaataattgatggcatgtacatagggtcatgttaacaatgttttggatgaactttcatggaaacatttgatagtatttgattcttcatgcaaattttgtaaacttggacttgtttaatttagttttaagcggcattatatgatgtcttgatggggaaccatgtgtgataat

SEQ ID NO: 257919 - DNA, 381 bp, Gossypium hirsutum
ttttcgcgtccgatagcattgtgttaaattcattgctatcatttcgcagtgtggcagttgatagaagttacctatgcctataaataacagaatccacctcataaattacgagagtgaaaacttggcgttatgctgtggacaaaaagtggtggaggccttcaatgagaacataaatcttcggaggcaaatatatttacacatttcagtttgcagatacccttttgtattttgatacctataggtagttgatcacgttacccttatcgtgtattcatggttttaaaacatgtagtttgcagcatatatttccctttttttatttgccgtctattaaaaaagaaagaataaggggcgtgcaatatatgaccattacatcggctt

SEQ ID NO: 257920 - DNA, 485 bp, Gossypium hirsutum
tgtttgtaccaaaaccagaattgcccaaagtgactgagttgccaaaacctgaattaccaaaagttccagaggtgcctaagccagaattgccaaaagctcctgaattaccataacctcaattacctaaaattcccgggttaacaaaaccagaattgcctaaagttccagagctacccaaaccagaactacctaagttacccaatctaccaaagccggaaacacctaaacaagaactgccttaagttgcctgatttgcctatcgtgccaaaaccttgaatcatggtactatgtttgttttccctcgacaataaacatatgatttttagatattcttcttataagagtgtgttgattagcatatttaaattcatttcatggattacttgtagaccagattatttatatatgtttggtttgagtgattttattgttatcatctatatattatacatgtatactttctaaataaatttatagttatacac

SEQ ID NO: 257921 - DNA, 453 bp, Gossypium hirsutum
attatgtttaattgcacctccaacaaagattgagaatgcattttatggtgattccattgcttctattgagacaccaaacagtgttaaatgttagaacaatatctatctataccatggatgtatcaccattgtcatgttaagggctttggtgttaagggcttaatggtttcttggttatacgtggttttgtgttgattgttgcattcttgtctttttgagggtagattttcgcgaggagggttgggagtcttagtggtttgatattaagatgttctcattttaagatttggtattattgctttgggtgtgggactattttgtgggagatgttgcatcttgttaattgtaacattcttcgcttttgcttattgtgtattaattaagcaaaaaaaaaaggataatttgtaccattttagtcgctatcaaagaataaaaattatatgttctttggat

SEQ ID NO: 257922 - DNA, 475 bp, Gossypium hirsutum
ccttcttttccgcccacgcgtccgaagaataaaaatgaaattaaagaaaaaaagatgcaacccatagaaatgaaatccagatcataatgagagactcctttcttttgttttccattcataaagacagaagctaagacgaaaaaaagaatcgacccttcgagtattccaccaaattgcctgagaaaactgagagtaagagggacatatatatgttatgaaatacccatctatattgaattgcgaatacagaaatgataaaatatttttggaccaaataaaaattaatatgggtctccgatagagacgaaagacggataaacaaacaagaaaataggtaaagacccttcgatttaagaatctgtatctatatctactaaattcaacggtttcgcataaaaagaaagcatataaataaacgaaagaaaataaacaaatgaaagaagggggaaaggagggagaaagggggaaggagggg

SEQ ID NO: 257923 - DNA, 341 bp, Gossypium hirsutum
tccctaatatggagtggccggccatgctatgggtggaaacatgttgggaacatgttggctagtgaggtatgtggataaatttaataggaagtatggggaataaagaaatggaaaaaggaaaggatgtgtggtaattgtttctttcctgcccttttgccgtgaaagtgagaaggaaaaacaaaaaaaagtgtccatctttcttcatttccccttggccgaatgttctaaagaagaaagaaaaaaatttgttcatcttttatcatccttggccgaaaatgctaagaagaagggggaaggggaagtaagacattcggccactccttctagtcttgaataaggta

SEQ ID NO: 257924 - DNA, 491 bp, Gossypium hirsutum
ccctttcgtccgcccacgcgtccggaggtattcaaaggaggcagccctttggttgttagccggccagatgatgcatcggaggtaggtcgagcgctagccaacagctgccggactgtttccggggtgctagtcgatgctcacatcggggacaagctcagcgaggagctgtttttacgggtggaaagccgaggcacgagccatgctaaggagttgctagaacagttgcaattctttcacattgttgcgtctctttcttttgcttaaaggaaaaagaaaaaatgaaaaaggctttcatatcctttttttcccctttcccttttgtgtgttatttcatttcccattgtaatgaaaagggatatagtattaattaattcacacacaaaagagagaggggaaaggatctcttttcttttttctttcttgttaactttgttttgtgtgtttttttgtgtgtgacatagttaatgaatattattaatacttttgtgttc

SEQ ID NO: 257925 - DNA, 376 bp, Gossypium hirsutum
tctcttggaaagaatactaatattcctgctattgcaaaagaaaacaaaactaataatcctgtagaccatgcccatacttcagccgataggagagatttctgtccatctggaacgagtagctgggaagttgagtatggatggagatgataagaatgttaaaaacaaccactctgtgctttcagaaccccaactgtgggcagcacctaaaaagtcttggcaacagttatttactcgttctccttctcttcctcccgtctcaaatgcaaatgttattagtagaccgacttcgaagaataaaccagaagctgagggctcacaatttcctagtcattcaacaatacaaacatttgataatcctataaattgtggactacca

SEQ ID NO: 257926 - DNA, 516 bp, Gossypium hirsutum
ttttcgcgtccggccatttgagccgacacttcactaaaataaccatccttcattaacagcatctctttttcttcatacatatgagagaaggagcaacagcatcagaaaagaagtagtggttcatcgtcgaggaagagtagtagtagtgtatgtgatggagaatcaggttgtttcgccaccccatgtggatgcatttcgaccgtccctcggcttccctcttggcactgccctcctcttaatcatcattttcagcttgagtggtatcttctcctgctgctaccactgggacaagctcagatcactccgccgatctcccgccgaccgcaccgatccccatcccgatatcgaagcttctccctccaaacccatgcctgatttcttggatttaaagaaaaaccaaagccaaagcctacctgtattaatgccaggagatgagatcccaaaattatagcattaccatgtccgtgtcagcctccacggcaagacaaggttgaagtgaaaattgaaaagccaccc

SEQ ID NO: 257927 - DNA, 534 bp, Gossypium hirsutum
  unsure (1)..(534): unsure at all n locations
cagaggattcatacagcagcagcagcagccatcgaaattatctcaagaacagcaacaacaacaacaaagtccaaagctttagcccatcaacacccccaccaacatcggttaattaccgaactgctaaacgaagaaaggggattccacatagagccccaatggcaggtctaatcatagaatattaagccatactatttaactattattgccccacatatacaaaggtaattatcttgtatatagaagcagcaatggtgaacaaaaaggggataaacaagtggtataataagctccaaatctcaaggacttgaatgatattattaagttataaactttttttgttttggtcttttctattagtttagggcttagggtttcatttttagggtgagtttatacatataagtttctcttcctagtttttttttgaacaaatagtaatggggggatgaaaaatgtaaatagggttttctttttcttcttttcttatggntntagagaaaaagggtagtgaaaaataaagaaatagaagcc

SEQ ID NO: 257928 - DNA, 422 bp, Gossypium hirsutum
atggcttgtggggttgacatcaagacgaaatcatgcgcaacaaaatgcaagagatttaaatgatcacaagtagaaatttgactctagaggagattagtgtgtgtgaaggagctgcatatattagaaaatgaaagattgggctgctcccttcgtagctgcagcactgtttgcatttctatcaccaggggtaatcttgcaaatcccagggaagaatcaacccatcggttttatgaacatgaaaacaagtgtggctgcaatttttgtgcatgctgttctctatgctttgttcctcatcctgttccttgtggttcttcatatccacctctatgtctaacaacaaaggcactctctctatctaacaagattagattttcattttgtattatcctgttttctgctcccatgaagaagaatttgctact

SEQ ID NO: 257929 - DNA, 119 bp, Gossypium hirsutum
cccatgcttccggctcttcttgcaagatgtattatgttgttgtaaagcttgtatgatttatgctctggaaagttgtcacaaactctgtaactcctcttcaaatttcaatctattgcatt

SEQ ID NO: 257930 - DNA, 231 bp, Gossypium hirsutum
ctttttttgctttataaagccgatgttagtgcgtcagccctagaggctgctgaatgtttcgaggctgctgcatttcttgaagaatctgcaccaattgaaccctttagataaaagaaacaactttgcccgcattttgtttttatgtaattttggacatgccatttttgtaaatcttataggttaggctatctaacatctaaaaatgttgaaaatttttacgtgagttgcttc

SEQ ID NO: 257931 - DNA, 271 bp, Gossypium hirsutum
cccatgcgtccgacatgcttaaaacaccattgaaaagggctggttgtccggcaacgtgtccttaaaaaatatatcccctgtttttttctttttggctactcctatgttgttttaatgttagttttgtttttgttgcttatggaacatgtaaaccaacatgaagtttggctgtttcttcattgtggttacagttttaagggtagaaaactcaaaagtgcctcatttccatgttgtcttgagccatttgttctatgaaatctcggatttaatt

SEQ ID NO: 257932 - DNA, 477 bp, Gossypium hirsutum
ctatgcgtccggacatttgcaagggatatgacccttaagtcaacgaaagctttagtgcagcccgcttcaatcccggatgaccttgatccttggagatccaagcttctatgggcttctcgtgtgctacctatgccactcgttggtcttcttattattagcggtgtttgtgctgatggaggaagccaagcatccaattatcccgagctagaagctttatcaaggcttgattttggtgccgccatgaaggttttcctggcaaaacgactaacctccgagttcactcaagtgacagccgatgtggaagagaaatcggttatcatcggcgagaggaacagggctgcaacagaagcattgagacgagcggtcaatgatggtcataacaagatagcaatactatatgggggtggtcacatgccggacttaggtaggcgtttaagagaggaattcgaccttgttccttcccgagtacattggata

SEQ ID NO: 257933 - DNA, 480 bp, Gossypium hirsutum
ttttcgcgtccgttcaattgttgattcgagtattgagcgaaaggttacacctatgggtctgtattgtgggtcaaccctactacactagtaccaataggcggcatagaggaagaagcactacgcctaggaatcaacaacacgaaaactttgttattaatgattccctttctttatcgggatcggaactaagagaaatggttgggacaacaaacatccatcttgttcgtactttggatacccatataaccatcgaagattgttgaagtgactaattcctggaaattaaggagcgttgagaacaaagaaattgttggagtttacttttttatctagtacgaacacgcttgatggtaagaaaagatcttttgcaagagggttggctagagatttcttgtaaaaacattagccccgctcagttcataatgacaatatttcgaccttttttttaattccatggattattctcattatgcacataaa

SEQ ID NO: 257934 - DNA, 408 bp, Gossypium hirsutum
cggtgaactcaacgcccaacagggtctcgagggcgcgggcttctatctgtctttgaaccatatcgagtcaatcgacgaacagaaggcagctaaagaggcaaagccatggtctcaccagcggagccaccgaaccaccaactccaccgcaacctcaccaacttgctccgcaccaccttctctacccaggccacttctaaaaccacaccgtcccttccaccttccaaaatctccatttctcctctcctattcgctgactcgcttctccacctcactccctcgcccttcgagtcaactcaacatgactccgtttcttctaaatccacaatcaagggcgtgtcttcggccgagtctacctccggcttcccatcaacggtcagggtttcgggactcgcttccagtggaaagcgt

SEQ ID NO: 257935 - DNA, 340 bp, Gossypium hirsutum
gttcgtgacaaaaatcaaggtacagataatggctttgggtagtcttatatacagatttgatgaaaaataaaaattatattttccttctatcatttggctgtatattctgttactgcttcttctcgtgtattcctgtgcaaactcggccatacagagaagcgaggagaagtgcgaaggaggccatgcgaggagccactcgtgggagccccaactctctggcctattccagaagcttctagtgctctcatctgctgtactctttttttgggcgtattgggcctcgggtttgggctattgggctttaggatttatttaattgggtcggattttattggacttt

SEQ ID NO: 257936 - DNA, 435 bp, Gossypium hirsutum
tcttcgcgtccgggagaaacgcagtgtgacatgggcacccaatgtgtacgatcctccaccgacatcgctattgcatatgattagaaacaaaaggcaacacaagttgaagaggaacaacaacgacaaaaagaaaataggaaggaaagggttgaaaggcaccaagtcgacgcgaggtaacgtcggcaggaaaggcgtcaaacaaattcgcagaagcagcgaaagttcttataggtggtttaaagaactggtggttgaagatagagtagttaatgagatcgacaatttcaacgtcgacaagccggacccttattgtggcagcggttttttaactcagtcgtcgaccggaatgtactactctgtggcagaggctctatgagtatgtcttcttattcacatcatggggaaatctatgcctttatttttttctattcttta

SEQ ID NO: 257937 - DNA, 531 bp, Gossypium hirsutum
tgataaagtctgggaaaacaaatgacaagcaaaaagacgccggagaaaaagctggtgatggtgaccatggtccaaagaataattcagcagagaagaagcctgaaccagccgctgccaaaaatagcggtgttggtggcggtaaaggttctgctaaagataaccagcatccaaaagcggaccaaatgggaggtaaaagcgaagaacctgaccctacccaaattactgctgctggtggtaaaaagaagaaaaagaaagggcagaaaagcaaccctggtcccaacggtgatacaccaccaccacccagtgacactcagtcagccatggcagtggcactcccagtcccagtcccagccccagaccataccccaccaccaccaccaccacccaatgcttcaatcgatctaaatcctacaaatcaaccaatgtatccttacacacctatgtactatggacctccattttgtggggtaagttacaacaccatttaccctagctcaagctcttcatattatgctcccgccatgcattcta

SEQ ID NO: 257938 - DNA, 427 bp, Gossypium hirsutum
aatagctctcttggtgcaggccactgtctctttggccatcctaacgtgtccctttggtccacaatccattcggccctagagttcctcttggctcgcgccaaccgcttcctggcttatatctgaccgtactcatcgaagaaagccatccttttttgctgtcggacaaaggcttgcttgctttgtcttattctctccttgctgtgcaactagcgatatttgtttggtcgcgataatttgaatcccatttgtggccctctgcactccaaattcatcttgtcacttggccactctaacggtgggcaaaactgtgctgtacaaaacaactctaaaattattatggaaaaacgaattgaactcgaaaaacgggggcgcagtcccgatcagatcaaagaacttaacttggacaactgtcgtagtgctaatattt

SEQ ID NO: 257939 - DNA, 309 bp, Gossypium hirsutum
cccatgcgtccgcagtgacagcctggtggtggaaagagtggtgcagaaagaagtagtgggtaaagggtggattgatcaaatgaaatgggaagcagataatttgggaagagagatagaatggaggttgctagaagaacttgtagaagaggcggtgaccgatttaactggtaagttgttttgaggtgtttttagttttgtctgtttgtcgtctttccccatccactattgactatataactatcccctattatttgtgaatttgtgcatttgattttgaagaaggatgatcctagccagcttattttgttg

SEQ ID NO: 257940 - DNA, 468 bp, Gossypium hirsutum
tgttctttgcgtccgcccacgcgtccgggtttttaaggcccattatcgcacgacgctggatcaccgtggccccaccatgggtggtggtcggagccacacgaaggtcagattttcggcctttttaagagctcctgaaaacaaagcacaccaaactcagaaaacatgaaagaaatggcctctcccccttcctttttagcctgattcagacaacggagagtagatctcaggagacgtgaccacggggttattccggtgtcagaggtgcaccagaggcatgtgaggtcagtgatggtagtggaggcgcgtgcggggagggctgaagtgacctggtgcgacgcctagggttctctctcccttcttttgctgaaaatatttagtgggctagggttgatttgggtagtgggctgatgtgggttttaggattgtttatttgggttttaagtttgggctgatggttttttgttttgg

SEQ ID NO: 257941 - DNA, 455 bp, Gossypium hirsutum
ccttcgtgtccgcccacgcgtccgaaaaaaaataagaagagaaggctcgccgccttctcacgtctgcgctagggtttcaatcctagttttacaacaccgaaggctccgccgatttctggcctcacagccctcgtctaaactcctactgaggcggagtgagcgaggtttcagtcgacactaacacccaggtgtacgagggcagaggtcgacatggaggtacggaggtagaggcgcaagtgtatggaggcctgtcacgtgtgcaggggtaggccgaaagcgtgtgcagaggagatgcacgcgcgcaaaggcgcagcacgcgggggggggggggaagccttaggtttgactgcggctctggaaggagggctgatgctagggtttcttttagttttcgggccacctagtgattgggccaggtgtagttgggtataagcttgggctaggttaactgattt

SEQ ID NO: 257942 - DNA, 457 bp, Gossypium hirsutum
ggcctcctaattcttcgcctctggttttcaccagccagaagaccaagcaagcaagaaaatgacgtcgttttgcaggacagcattaatggcggcttctagatccctctcttctcgacccaaatcccttaatttaagaaccctaaccccaaaacccatttcttctcctttctcttctccatcaacaagaaccctcccttgcgcttcaaggatcgtatcggcgttgggaggagtagagtcgatgatgccacttcatagtgccattgcttctgctcgattacaatcaaacatcgccgttgattcttccttctggagctggctctctcaagacttcgcggttcctcggtgacaagagtgagagcttccgtcattccaaaccgaactgtcttgcagtcaaccagcagttcgttttcatcccttttctgcatttctcatctctttgctggaatcattttctacc

SEQ ID NO: 257943 - DNA, 165 bp, Gossypium hirsutum
ctttgttaactcttctatgtctactacaacacgaaattttcaatttcagtttggagattgggaagccaaggcttcacaacaaaatggaggatgattttctttcaacttacttggtggcatacattgaaaaagagagagctgaagaattttcaattctttttttgc

SEQ ID NO: 257944 - DNA, 341 bp, Gossypium hirsutum
ttgttcgcgtgggcggacgcgtgggcggacgcgtgggctcttcttagttgctgtcatcttctttgggaaaacgtctgctcataccgctgcgtctgactccgatccggcagataaggccggtgaagtcctccttgactacgttgctggccaaccccaacttgctgttgacaccagttacaagcctgagtagaactttcaagcctttactgtaatctctaactctctctctctctgctgctgtaacttcacctcttttcccttttcttttatttcctatcctgcgaactgtaaagtttgggaggaaaataataataaactaattgctagttgctagttgctgt

SEQ ID NO: 257945 - DNA, 321 bp, Gossypium hirsutum
ctacgcgtccgataatatttgactattaattaagggataattattatataatattgattatataaatgttagactagatccacctaattgtgttactgactgtaattacttgaacagtgtagcatttttttttacttttttcattattgttttttgtagtatatatggctattgtgtggttaagcaataagcagccatttccttagttgttatataacaatgacaatttcttcacgtatagtttttgtatgatattaatgtgttttgactttattgatgaatgtagttttatttatataaaaggtaaattatatttaattt

SEQ ID NO: 257946 - DNA, 317 bp, Gossypium hirsutum
tttattatcctccaccctcgcctattcctcaacaaaggctagctgtgccacatgtgatagatccgatttgattgagtaagttgccagtagataagatacgtaaacatggggctgaggaattcagggctaccgttgatgatgataatgctgagagagttgagttttggctcaagaatactatccaagtattcgatgaattgtcctgtactcctgaagaatgtatcaaatgtgtagtatctttacttagagataatgcgtaccattggtggaaaacattgacatctgtggtttttagagaacaggttacctgggagttc

SEQ ID NO: 257947 - DNA, 132 bp, Gossypium hirsutum
tctacttcttcttgttcccttgattttacctcactgtctagccaaccaaataccacaggaatgggtgtggaattcgaaaacagtaattgtacgaacctcgtgttcacatatggcaccttgaaacggggcttt

SEQ ID NO: 257948 - DNA, 488 bp, Gossypium hirsutum
cctacgcgtccggtgggtgattccaattttagagaaacttgacaaacttgatgtcaggaaattaagtggtggtggattgggtcatgtagaagagataactgagggaaacacgccagacttgctgaagaaggaagctgtcatcgttacagctccagaagagcaggaaagtaaaattcaggcagcaagggaacgttttcttgctcgcaagggaaagaaatgaggtcgggtattatgtgttaacagatcagtgcagtgagagctgcttgattactcagtggacattccaattttcaaaattgttggtgggactgagaatcatgtgcgttttgattttccagttcccactatctattctatagcactttgctgatggcatgtgagctttatacattccttgatgcttatagaggaccttgttaaatgaggagtgtggccacgatatgcgttggtgcgaggcaagattacgctctttgttccttcagacaaat

SEQ ID NO: 257949 - DNA, 335 bp, Gossypium hirsutum
tattaaatgtaggattttggatcctgggtttgatttacttcatagttttcatgtgattttaagcagagtactaataaaaaaaggggggggggcataatgaatgattttagcacgaaatatcaattgccttttttttatcttccattgtatgatgacattttttcccactgtaatcatgtttcttgtcttgattgaagttaaaataggttgcatatcatgaaatattcatgaaaatattttcacctttattatgtacgaagcactggtactggtaggtagaccctgaaattagcgtattacataatgaattaattgtcgtttccttttactacttc

SEQ ID NO: 257950 - DNA, 353 bp, Gossypium hirsutum
ttttctctctttgagctttcttcttcggcttatctctgaagtcttatcatttcaatcactgtgctatacacacatatatatacacacatatactttgaaaactcaaaaaaaaaaaaaacctctttaaagctctctttgaaactcaagcatcactgtataatctgatcatctcttcaaatatgccacgcccttttttccataagcttattctctcctctactctccaagataagaaactgaggattcctgataactttgttaagaaattcaaggatgaactttctgttgcagctgctctcactgtccctgatggtcatgtttggcgtgtggggattaggaaaggtgacaacaag

SEQ ID NO: 257951 - DNA, 469 bp, Gossypium hirsutum
cctacgcgtccgaaaagcactttgcatggaggatcagttaagatcactaggaatacttgatacatgtaactctgattctatcgtctttgatggtattaatcttgaagctaatttgccaccaaagaagatgagagcagctatttcttctatggagcctggtgacgctcataagttgcttgaagacttggtgaaattgtggcaatcaaggtcatgtagtggaaattatgttcttccgtggatatatagtttgttgctgactcacggtcatcttatgtctcaagaatctgaaacccagatgcttaattccttattgaagaataccaaatcgagaggattggcccttcagcctttgctacaattatctgggcggttacagctagtaacaacacagattgacaaggcggctcagaacagaagtcaacacttcacaagtgatcacaaaatggatgaaagtgaagaagatgatgat

SEQ ID NO: 257952 - DNA, 430 bp, Gossypium hirsutum
cccacgcgtccgcccacgcgtccgcccacgcgtccgcccacgcgtccgaaaaaattaaactcgaattgacatgatctaaaatcaaatttatgcatccaatcgacaagtctagtttaaagacatttgtagagagatcgatgattaggagtgttcaaatagttaaccgaaccgaactaatattaacaaaattaaccaactttttaatcctttaatcattaaccgaacccaaatttttttccaaaaaattagctaaactaaaatttatatgtttttgttttttgattaaaacaagtataaaacatatataaaaatgaattaattacccggtttcgaactgaattaaccgataattaaacttttaaaaatcattagttgacctccgaccgaattaaatcagttaaccacccgattaatcaaattggatcgattc

SEQ ID NO: 257953 - DNA, 318 bp, Gossypium hirsutum
gtttatatggaaattgtttcagaagaggctgccattggctttacaatcagtgctggttctcacaaacaatagaaagatagctcatcaattccttatttctttctttgtacatgctcaataaatttaattgtaattttgtgattcagccagttgctttaaattatagcatcaatcagaatttttttttcatggtaaaaaaaaaaaataaaaataaaaaaaaataaaaaattaaaaaaaaaaaaaaaaaaaataaaaaaaaataaaaaaaaaataaaaattaaaaaaaaaaaaaaaaaaaaggggggggcctttttaggg

SEQ ID NO: 257954 - DNA, 174 bp, Gossypium hirsutum
aaatcatctaagaagtcgcgcgtcaaatttgtttgctggtctcattgagctcctccattgttatatcttacgcccaaactcaagtcttgtccaacattataattaatgtctcgagaattttcctatatacaatcaccaattgcgatgcctttcaatgaaatactgtatctcatg

SEQ ID NO: 257955 - DNA, 204 bp, Gossypium hirsutum
actgatatcatacttgggttgcaaggagaggctcctacgaaacgcatgggggttccatacattggtgggaaattcacactcctcgtcatactcttcaaagtccagtgatctagataagtactagattcaatcttgcattgctttcccttttcatttgcctctgatgctccctgaatatcatggtttatatagtcttcttgttag

SEQ ID NO: 257956 - DNA, 227 bp, Gossypium hirsutum
ctcctcgcgtccgctcaaccccaattttaaacgcccaaatttagaaccctagatttttctctgcataacttttgttaatccacaaggtttagctgctctatgagattccatcacagatctgaaggactcgaggctccgcgaattaggataagaaaaggatatttaaattcaaattgactactttttgagaaaaggatgaagaggaggaagaggtagataatgatgaa

SEQ ID NO: 257957 - DNA, 430 bp, Gossypium hirsutum
  unsure (1)..(430): unsure at all n locations
tcttttacgcgtccgcatttctccacttgttctcactgtatcatcttccattaatggacacccatctcttcttcttcgtcttacttgttctccccgtagcttattccgatgaccacgacctgttcttggaatgcaatcagacattcaattgtggtaccatacaaggcatcggataccctttctggagccctaccctgcgccctagttactgcggtcatcacgggttcgagctcatttgccaacaaaatcagtcccctgttatcaccattaatacccagagatttcatgtactgaacatgactcctcctcccctgatgaccattgcacctgttgatacctgngaagatccttgtcctcaacaattccataacatctcattaaaccacctctttgattttgctgcaaccattcgaaatctcactatattcta

SEQ ID NO: 257958 - DNA, 326 bp, Gossypium hirsutum
tttagagaagacctaaagaaccttgctacaatattcaagaacacagcatatacagaagggttttacgcaggtactcgctatcaacctaagcgtctttgaagtcatttgtgatgcttagcttaaactctgttgtaccattttgcttactggaaacaaaatccaaacaaaaaacgtaaattaaagggagaaatgtagttctcattgtctcataactcttgttttttcctgacatttgatggtaactatgtaagccctgtttttgaatcagataaaaatgttaattggatacgttgttatcaggataatgaaggagctttttagaatgt

SEQ ID NO: 257959 - DNA, 416 bp, Gossypium hirsutum
  unsure (1)..(416): unsure at all n locations
cccactcgtccggcagactaaattccgtcttaacaattatggattgcctgaacccaatatcgtcaaagtactgtttcaacatctaaaacattcttgaaaagaccgaccgatttcgagaagacggtggagaaagtgaaggaaatgggctttaatcctccaagcatgtcattcgtattagccgtcactgtcttgaatttcatgcctaaatcttcgtgggatagaaaactagatgtgtataaaaagtggggttggtctgaaaaagaggtaatagaagcttttcgaaagaatccttcgtatatgatagtgtctgaggagaaaacagtgaggagaatggattttcttgtgaagggaatgggattccacctctgttattgccaggcgcccccgtgttttaacacanagcttagagaagagga

SEQ ID NO: 257960 - DNA, 383 bp, Gossypium hirsutum
ttttaaacccatcatcgcaggtggtccttcattggtccaccgtggacggtggtttgggcagcatcgaacgggcttttcagcccttgatcaagccacgtttgaaggccaagccttcaaggcctgggcgatcgagatcgggaggcttctccctctccctttggagttcgaacccgatgatggagggaggagttccggcgacgcgattcggtaagttcctgttcccctccttttttatttatttcaaacctcttttttataaagaaaaagatttgcaaaataactaaaataaaaacaaatggaaaaataaaaaataaaaagataaaaaaaataagaacaaacaccttttagatttcttttctgctttcgatttctctgaaaatatg

SEQ ID NO: 257961 - DNA, 472 bp, Gossypium hirsutum
gcttaacgaactttagatactaatatctcgatctatgctcaacttttttatctaaaatcagtttcgttcatctaattattcatatacgcctaattcacaaccttcaaactagacaaatctactcaattaatcgtattgacatttttcgatattttttaggcgattttcacaaaattcatttaaacatgaaaaatccataacgaaacttaaagataagtttaaaaaccttctaatcacgctaaaacaagttgaaaaacactttggaaccaagttttgactcaaaatcccaaaatccaccattaatggcttgattttcgatttttatttaaaacgtgcaatttgagggctaataatttagatttagagtctaaataacattaaaaaaatagatacatgaataattaccttttttgaaagaatggatgagttttgacgtaaattcgagaaacccatgtttggagatgatgaaatc

SEQ ID NO: 257962 - DNA, 351 bp, Gossypium hirsutum
tcttttttaaaaaactttcagaaaattgatccatccaaggttttactttttcattcactcttcttctttaaattttttcttataatattagggtattgatttagtcccttcttccttttcattaaccaatagcttcttttaagcttgcgatgctattttctttaaatttttttaataaatactgatttgattgttcgacttactttatttatgattggtgaggtctggtgtagaggagttgtatctctcctaaatcaaactaacccttcaattatttcgctataagtttctttatttttgttgctttgatatgataagctgagaactacgaaaaataattctcttttctag

SEQ ID NO: 257963 - DNA, 458 bp, Gossypium hirsutum
ttatcttcccgatttgttttacctcgagcggggcagcctcgaggagcaaaagttaaagagatcgcgtttcagggagctgaaggaggatgtgcagaaagcatttaataaagacaaagccgagtttaaccgcaacggcttaacttcgtcgtcgtcgtcttctttaaaagatggcggtcggtataagctccaaaaattatgaagaagtctgggtttttttttatatattttgtgaaattaatgtttttaattgtttaacaaaccattaaaatgtctatagagatggtttttttaaatgtattcttgtaggctttgcttgatagggtgaaaggaaaattataaggatgaaaacttgaaaggtagaaaactaaaaggatggaaaacataatttttcctatgcttggtaggaaagacaaaaggttggaaagatggaaaaatatataattttgaaataaaatata

SEQ ID NO: 257964 - DNA, 215 bp, Gossypium hirsutum
accattctttcgctcaattcttagtacataatcacatggtttatgataagatatataagggtttgttttctgtcaaatattttatgatttgttaagcttggtgagttttttgtgcagattgagaaagcagtttctgtattctttggtataaaaatacttgaacaattacatgattgtgaaaaggattttaaatagttgcagtcttttttgagctt

SEQ ID NO: 257965 - DNA, 248 bp, Gossypium hirsutum
tttattttgagtggtaaagtccccatattccctgcccaagtattcaacattgaaggaaacccttacctttataccaaaggaacagacaaggtggataaaggatcattgcccaactccagcaaggccaaactcaacaaatctggaattttttatgttataaccatactaatggttccttattattattctcacttgtgggattcttcatttttcatatgaatacgtatatttaatagaacaactttgac

SEQ ID NO: 257966 - DNA, 370 bp, Gossypium hirsutum
gcttttccccagccgagtttgccaccaccggttcagcatgcgaaccagttccctcagagccatgttccttctgttcctcagcaagacccttactatccaccgcctggtcaaactcaagagactcctagtcagcaatttccaatgccacctactcagcaaccacagctccctcctgcaacaccacctcatcaaccatatcaaccagcacctccaccgcaatattctcaacctccgcagccccttcaactacaaccttctgtaggccaccatccggaagaggcaccttaccccctttctcagatctatccaccgaatctgcgccagccaccttctcaaccacccagtggtggtcctccctctcaacaatatt

SEQ ID NO: 257967 - DNA, 416 bp, Gossypium hirsutum
  unsure (1)..(416): unsure at all n locations
cccactcgttcggcaaggaaggccttagaggagcctcataagaattttgaaggtcatgttttgcattgccagaaggccattgatgggccaaaacagacgaaaggcgggtttggtggaggtgcttctaccgggcatcatcagcaataccagcagcatcatcagcaaggacaacatcaaaatcagtctcgttaccatcactctaagaaggggaaatactcgtctagtggatcagaaactggccatttgatggctccatctgggcctgctgcagtgggagntggggttcaaccctggagttgctgctgctgggtttaaccctggggtggctgctgctgcaccagctttaaaccctgtgcttggacaggctttgactgcattgctagcctctcagggagctggtttggggcttggtaatc

SEQ ID NO: 257968 - DNA, 390 bp, Gossypium hirsutum
ccctctcttccgaaagggttcagttttcaatctgcgttttttttagtgttgttgtgagaaaaaaaaaactagttatggctgaagtttttgggaagggaaatctgtttacgacttgtaactatagtcagacgaagaatctagaaggtggaacttgtttagttcctaagaaaatttctgggttttctttagaaaggaactgtttttcttctttaaaggttaaatctcaggctttgagaagtggttttaatgggcaaagaatggtttttttggagaagaaaagtatgaacaggagaaggttttgtcaagttcccatcaaagcacagatgcaaagtgggcttattggtcgagttcagaaatggtgggagaaagggcttcaaccaaatatgaaag

SEQ ID NO: 257969 - DNA, 157 bp, Gossypium hirsutum
atgtcaagtcaatattccgatggtggcgatccaaatgggtggtggtttgctgataatggcggtggcgacagcgcttccacaaccattgtttggatcgtggtggggatattaatagctgttttagttcttgtggtggcttattatgtggcaaagaaag

SEQ ID NO: 257970 - DNA, 496 bp, Gossypium hirsutum
gtcttcctaagttgatcaatctgtaagtttgaatgagtcagtccatgctttcctagtttgtaaagtttgaacataaatgcatgatgaattatttctttttatacttttttttaatttactgatgaaatggttgaattgtttttgcagttttcttgattcgaatgatcttagtggtgaagttccagatcttttgtttaacattccaatttataagtatgattattttttattagtttgtttagtttcctatttgtattgaaataacactttctatatgattaaattatttttggtatctgtgtttttactacatcctttacacaccagacacatattcatcagctgggaacttaatcgcttaactttgtttattcagttttgcaggaaacaggttaaattgtggtgaaaattttcctcacccatgtgtgtcaaatggaaatgattcaggtgatttcagtaactattttgactaaataacattttttttaagaagttc

SEQ ID NO: 257971 - DNA, 340 bp, Gossypium hirsutum
atgttgtgtttgaatcttctggagttgaagaaactaggagtcctgttacaaatggtagccgaagccacactaacagacgctatcatgataagacagctagtgtaacaactaactctggtcattccagtaagactgccctcattcgtaagcagattcgggcctaatcaggcattggggccaccgccaaagtccccggggcttcaaagttgaaagtcatatagatattgaaggtgtagtagaggattcaatctcttcaagttggaaaagccaaggcttagcacttcttcaagtggaatgttatttaatgttgcattccatggtcgtttatcttagtcggaac

SEQ ID NO: 257972 - DNA, 261 bp, Gossypium hirsutum
tgtttttgagcacagaggataaaatccaatttacagaaaatcaaagagtcaagagctggacagatatgatacttacagatgagatagttaagagaggaaaatgtttcatattttaaaaaaactagcaatctttttggcatctaactgttgtgaagaaatctagattcagttttctatttatagccatttgggagtatggttgctcaattctgtagaaaaattttgttacaattatcattatgtttacggtttgtttttgtg

SEQ ID NO: 257973 - DNA, 382 bp, Gossypium hirsutum
  unsure (1)..(382): unsure at all n locations
gttttattatatgttgatggtttgaaggggattggaccggcggattgggtttacgggatgaaattgtcttacgccgtgccggacaccggttgtgggaggtgtactcggtccggcggtgcttgtggttatgataccgagactggtgtcatgatgtgcctttgctctacttccatgaatgctacgagagaatgtggtagcaatggagatataggaagtggtcaaaagttggcattgcggacaaagtttcatgcatttgccttggtggtgggtgcatttatttactttgtaatattcatatgaacaatgaatatagtggctgnatgttttcttcttcttatagttactggtgctccaaagaaagtgaccaggccattcttgtgga

SEQ ID NO: 257974 - DNA, 317 bp, Gossypium hirsutum
atttatatctcaattgtggctaatttttctcaaggtccacaggtcagccctgattcttttttttcccctccttcttgcattagggactgccatacagaaattcattatacaggtcctggtattacaggtataattgtgtagttactgaagcaagttcagtatacaatgttttggcacagttgtgtgttgaggtgcatttaagcaaaaatatagtttctgatttgttgtaatgtcaaagatataaattctttacaacactcaagaggaacatatgtatgatttatgattctataaagttatttctctcttccgtttgc

SEQ ID NO: 257975 - DNA, 356 bp, Gossypium hirsutum
tcctcgcgtccgcccacgcgtccgagaagttacacccgatggtggagtagggaaagccaacacattccttccagggaagcttcattgggtggctattgggatgatgtccatggctatagttctatggtagtagcttaaagtggaccctcagtcaccagtctgcagtttcatcactgagagtcgattttacttcgatatttgatgatttatgtttatttgattattgttctgggttcttctttatatatatatatatatacattattcatttctgtataaataagtcagacctggtgagggatgctgttttgtactcaactctatttgtatactgtggttatttttgagtatatact

SEQ ID NO: 257976 - DNA, 408 bp, Gossypium hirsutum
gtttattctacgtttgatacgccttgcaatggaagccgttatccactaagaaagagaaagtggttaatgagcatgatttatactaggaaggaattttcctttttatggtttatccttggtgacgaagtccttgaggagaaaagaaatggaatggtcagtttctgctgcaatgcataacaattatattgagaagctgaccagtgcctgctttgtaacacacattttacacgtaaaccaccatagtacctgtcatggtatgcacatatgattaatcaagatgagttgtaacaatatatgaaaaagattggtgccaaattctatggtagaggtccaaatgagtttactggaataaaatctctttttcttttttccctctagagtcagatatttatgtaccgtaaacatgtt

SEQ ID NO: 257977 - DNA, 423 bp, Gossypium hirsutum
cgttttgttagggttccttccagcgactgccgatccaccatttcattaggtggtcagcgatgcacaggccacgaccagatttccccaacgatagcaccatgcgaggaaccaggtatgccatcttatttctttttttttttaaacatctagatctaatgttgttctaaaaaatgaaaccgaatataaaaaagaaacttaatatcatccgaccctcacccgtatctcaatatttctgagatattcggggtttcattggtgtcgttccaaacgtttctttcctttatgctaaagtcgtaaggaaatgagaagaaaaacaaacggataaacagacttgaagatcacctttctctttggttgctttgtattgcttgcgtatattttcgttcgtaaatgttcgtactcgattacaaagattaaaatctg

SEQ ID NO: 257978 - DNA, 252 bp, Gossypium hirsutum
attgactttatttggaggcaactatgattacggtaatggagattttgagcattggaagatgtgtaccaaaccatgccacccataataaggcccttttgccccatgcattatctaaattttaatttaagctactgagaatgtctcatttactacatctccgccaataatttatctgttgatttttccctttattttttttaatgcagttgtgtttgtgttttttctaaaataataatataaaattgtattcct

SEQ ID NO: 257979 - DNA, 420 bp, Gossypium hirsutum
gaaaaatgtgttattcgatctgtttaacattggccgctaccgctggtaataacataggcaaagttctacaaaagaagggcaccggtattctccctcctctctccttcaagttcaaggtgataagagcatatgctgttaataaatcatggctgattgggtttctgatcgatatatccggtgccttgttgatgctgagagctttatcgttggctccggtatctatcattcaaccagtttctggatgtggacttgccattctttcaatcttttcacacttctatctacaagaagtcatgaatgttattgactggttggggattacattagctggcattggcaccataggagttggtgctggtggagaggagcaagtggcttcttcagtatctattttacagttaccatggttggcattctttg

SEQ ID NO: 257980 - DNA, 306 bp, Gossypium hirsutum
cctcacgtttccgcaccgttgtccagtgtgggacgtccatccttttctgttcagataaacaacgtaattgagttttgataagtttgacacccaaagcatggtgtagaagtgtatatatagagtgtcatgcacgtagacaaatgacatcacatgtgaataccacgatgttacctctcttaactacactaatttctgatctaagtttggatattcaaaaaaaaaaaaaaaaaaaaaaaaaaaaaaaaaaaaaaaaaaaaaaaaaaaaaaaaaaaaaaaaaaaaaaaaaaaaaaaaaaaaaggggggca

SEQ ID NO: 257981 - DNA, 417 bp, Gossypium hirsutum
cttacttgtgggcggacgcgtggggttcagatgatgaggatgaggagacacctaagaaggttgagtcgagcaaaaagagaccggcagaagctgcaacacctgtttctgcaaagaaggctaaacctgcagcgacacctcagaaaacagatggtaagaagggtggtcacactgcaaccccacacccatcaaagcaagctgggaaaacttctggaaagagtccaaagtctggtggtcaattctcttgtggatcttgtagcaagtcctttggttccgagggtggtctagagtcccacaagaaggccaagcatggtggcaaatgagatgatattacatgctcttatgtgcatgtttaatttttgagagattatgcttttcttagtaaactggtagtttattgtctaaaaaaggcaattgagt

SEQ ID NO: 257982 - DNA, 202 bp, Gossypium hirsutum
ttcccatataactggcagagcagtgttcacccctggatctatgagtagattttaaattaagctgttgcagatcatggcatccttgtgtttgcttcttgttagtgaactttttttatgaactttttactgaattacctctagttactgtttaagatgtttgtttgatgccattatttttgctcactaaattaatcaagttctg

SEQ ID NO: 257983 - DNA, 382 bp, Gossypium hirsutum
ctcagcttcaattggttatcaaccgatctgccttacctcacaataggaccgatggtttcttatgattagcttgtcctttcattaccatcaatattatctgcaataagcttctgtagcaaacattgtatgaaatactacccctttcttctgaattctgaataatcacgacagaaagccaatatatcaggttagcctgttactgtaccttcaacttgatgttttctgtactcatcaatttgcagtgaagacttgatataggattctgtcagttccctgtactgctgttaatttcccttcctcccatcccttttttagtcgcttcagtttttctattacaatgtttatcttttgatattgggagtaaaaggatgctgtttttgcc

SEQ ID NO: 257984 - DNA, 109 bp, Gossypium hirsutum
cccacgtttcctttctgccatggtgtctctgagcttgaagaatcctcaggatatatggagccttgtagaaaattcaagagttttcctcgaggctttgagattatttttc

SEQ ID NO: 257985 - DNA, 403 bp, Gossypium hirsutum
cggtttcgtttgttaaaaaaaaagggctatgaactcagtgcaatggggatatgtccgtatcatcaccggcaccatttttggcggtatcgttggcttctacgttatgcaccgcgtcgaactcagctacaaggaaaagatgaaggagcgattgaggcaatatgagctcgaattgaaaagaaaagagaagctagatgaacttgaagattccatctagtctttcttttttccttgtttttttttaacagttaagcctccattttcctttttctttaagttgttttttagaatcagcatacaataagcaggatatatgtgaaatcatggtgattttggttgattagtgattggttctttattaagtgttgaattaaattgaaaaatactcaaaacagtacaaacgatt

SEQ ID NO: 257986 - DNA, 177 bp, Gossypium hirsutum
tcccatgcgtccgcccacgcgtccggtttaatcgaaggagctggccacttcgaaatggaaggccctgcttttgatgctgagatggtgaaatgtatccttgaatttattgcctctttgtaggacaagcaaccagttcttgtactagttgcttgatgaattttgcattgctttttcatt

SEQ ID NO: 257987 - DNA, 331 bp, Gossypium hirsutum
cttgcaaggcaccataccttgtatctcaaaggatggtagatatgtcatggagactccattcaaggtatggtttcttttgtgaatgtgcaagtcaataaaaaatcaagttctaattaaaaggtgatcaagtccttgaacagttctacttactgtataactgattcggattggatgttaacaaatactattataacattgcaacagcactatagggttgagaattcttgtaaagtaatgttgattgctgaaaggatagaggtacctgtctctaagttttaggatggaaaagttctgattctgttgcgtaaagcaacagtattgcttctacact

SEQ ID NO: 257988 - DNA, 263 bp, Gossypium hirsutum
ttgcgtttgtggcggagattatattgccggtggaactgctgctaatgttgctactgccaccaccgctgctgctactgctaccacaactaacgtatagttttttttttatttacgttttactgattttattcttttccttttcttcttttaatagctcttttatatatatgattatgaggtatatatctggtggttctctctgaatattggattgatatcccatgaaccaaatttagttgaaaatcgagttttcaatctcttgc

SEQ ID NO: 257989 - DNA, 185 bp, Gossypium hirsutum
cccatgcgttcgcccacgcgtccggcttaattgggttcatcttcttgtatgttttaaagtattacatgttggctctaagagctgggggatactggaagcagttgtaattatctatctatattatcccccaagaattcatactactccatgaatattttgaaagcaaaatatattatggttttgcc

SEQ ID NO: 257990 - DNA, 201 bp, Gossypium hirsutum
tttttattagggaactgtgtccttcattcaaacacaatgccaaaatatatgaacttattcatggcattaattttcgtttgtgtgttaaattgtcactttttttttcttataatttgttacaatttcatatacacagatgtagattaatgttaaaaataaattcaatggttcttgtttgaaaaaaaaaaaaaaaaaaaataa

SEQ ID NO: 257991 - DNA, 253 bp, Gossypium hirsutum
tgtcttatctggttggtaaaaaatcacaagatgctgctgttggcattcttgttcaaatgcttagaacagcaccgcctctccgacaagactcgagttgctattcgacacattcattaaggactgaatatgagggaggtgtcagtatcgcttctggattttttatgccgcgtaaaacggcagatgcgctcgaagagctcaacagctacagagaaatgaaggatctactactatcgaagagtggaactcgggttgt

SEQ ID NO: 257992 - DNA, 513 bp, Gossypium hirsutum
tcacatagtgattttgaaaattcccattctcctccgtaatggctgaagaatccggaacggcgtcgtcatcatctagctcacaaccaagatcctctcctaacacttcaaaaatatcccaggttcctcctggatactctggcctcccaacttttcaaaatggcgattttcagatgtttccggttatgtatcctgcatttgttccaggtttaacttcgttacaaaatcaggaacagatgaaccgtggagcaggcatttatgctgttcctgttctaccatttatgggacatgtttctgggattccatctaacaatctcattcctctcacctataacatacctactcggtcggtgacagaggcaggggcagcagctgaggatcaagggcaaggagcacagcaacctcaacatcaacagcagcaggtaggacctcagagacaagttgtcgtaagaagattccaaattgcatttcagctggatttgttgcttatacttaagctagcagctgtaatatttt

SEQ ID NO: 257993 - DNA, 151 bp, Gossypium hirsutum
gaacttacatattataggaactaaattgaaatagggatttatcttttggtggaatactaatctgaaataggtgaagatttgtttagatgtaaaaacaaacccagttgttgcgcccattttgcctttagattttatgttgcttttttctttc

SEQ ID NO: 257994 - DNA, 467 bp, Gossypium hirsutum
tttccattcgtccggttatttttgcctaagttgtttacattgattatgtatgcaaagaagaggctcgatttttgataaattgtagaacaaaatttaatgtttgaaagaacaaacatgcttgagggcaagcatgagctaagtagggggagttgataaacacattaatttacataattcttgtatctaatttggtttatttctgaattaatccctgcttaattggtgtttttatgatttaatcttgtcagggatgcaattggtcaaaaacgagcaaaaaggggccaaattgaaagacaaatcattgagttggggccaaatcataaagatgggaaggccaaagatttaacatcaattttgactttataaaaagttaaaaatagaatatattattctattttgttttattattttattaattttattttaatttattaatttaggattaaagctattttagtaactctatc

SEQ ID NO: 257995 - DNA, 400 bp, Gossypium hirsutum
ccctctcgtccgggaattcggagactcctctccgatgttcactgcactggcgacgattgccttgataaatctagtttgcttgattggattgatgaagaaagcaatcgtgaatgagggtatacctataatctatgagacaatgcttctacaatttgttctttgtgccattctggttctaatcaactggcccttgtaccaaggacttttctttaggaaggacaatggcaagatgccaaactatatagctatcaagtcaattgtattagctgtgtcatcttgtacatgttttacattattctcgacttaaaaaaaaaataatgttcattttggtttaattctctgtaactatcactccatgatttgaagaaataaaaggatacccttgttagccttcgggatt

SEQ ID NO: 257996 - DNA, 218 bp, Gossypium hirsutum
ccctttcgtttgcgatggcatccactcccagtccagacattcttgtgtaagctctgaacttctttatatctaaagaggttcgagatcaagatatcgcttatggacttcctggaataagcttacaagggcatgaaatagcatggtggcggatgaaggagaactggaactctatcataaacaagcatattggagggctcctcacacattctattcctgac

SEQ ID NO: 257997 - DNA, 318 bp, Gossypium hirsutum
cccattctttcgcccacgcgtccgcccacgcgtccgcccacgcgttttgcttgatgaaagccatagattatgaaaaaaagaaagcagcaaaaataacaggcctttgtaatgatatattgtcaaggatggatgcctgcaaggtctataattatgtctctgtctgtgtcttgtgtaatagaagctttgtttgtggtgaaaataatgtataagccatttggttgggagcaaattgtccttttctccaaaggatttttgctgctcattcatggtgacttggtttatggttttatctgttggtgttaaaatcttataaaaata

SEQ ID NO: 257998 - DNA, 328 bp, Gossypium hirsutum
cccatctttccgaggaatctggcttaaaggttgggcggggttttttttaattaagggtgaatttttatggcttggggcctaatggggaaaaccggaccatggtaccccatagaaaaccttgaccggattgggggctatggtggtccatttaacccaaggcatgggaattggtggttttgggggtcaaaattaagggttggggtatccgaatattaaatcccaggattatggaaggggttaatattaaattggggttttaaaaaaaaaaaaagaaaaaaaaaaaaaaaaaaactaaaaaaaaaaaaaaaaaaaaaggggggggcggttt

SEQ ID NO: 257999 - DNA, 465 bp, Gossypium hirsutum
ggagttggtatttcaattcatgctgggacatctaatggagtatttttgcgtccatgggatggtcctttcctttgctccacttgccaggagaagaaagaagccatggaagggaaaagaccatcaggaagtagacatggtagtgacagcgattagctagaccccccaaattactgcagcattttatgggcactaacaattgtttcagaggtggtcgtaaatgggaaagatatcacaatcatatactatagtaatttccttcaatttcttattgggggggtcatggagcattctggtccactttcaactgagggttcatttccatctatactcacaagccagaagaacaaagttcagatatgggtttagatttttgctttctgggttccaagtaagaagacttgtgtttaagtcgagtgaaaatggaaaaagaaaaaaaaaatttaaaaaaagagacaagatatgctt

SEQ ID NO: 258000 - DNA, 230 bp, Gossypium hirsutum
ttgtgcgtgggttatattatttcatattgtatgggggaattgtaaaacctatatgagctggaagaattaagtgactgctcacattagagaattaggagaaagatgggataagcaacatggaaatttattgattatttcatattttctttaaataggagggataaattctctatgtttttaacgaggaatgtgttcttatgtatatttaatacaattgaagaagtttattt

SEQ ID NO: 258001 - DNA, 260 bp, Gossypium hirsutum
gcgtttttcaccattgccgttgaatagaagaaactaaggcccatatctcccccatgccttcagattctttctttggatttctgagggatttatgatcaattgtctgggatttttcagtaaagggtattcttacttgctgcaattctgtactgtcagcttccaattttcacggtttggtagattattgtgaattttttctccagatgttgttcgaaaagcataaattgaattaggcgttgcggctgtgagaagggctgggt

SEQ ID NO: 258002 - DNA, 114 bp, Gossypium hirsutum
agtagatgaaggagtacaataagaaggaagccaaagtctatggcaatatgtttgcggcgggatgaataaaacagctcccaaagaacccgcaccaatgaccatagatagcaaagc

SEQ ID NO: 258003 - DNA, 428 bp, Gossypium hirsutum
agtaataacaaaaatactattgcctcacatgcgtgggaacttatgcaactatccagtcattttcactactattactatttatttttattaaacaacttttttaaaaatattttaattgaataatttttcatagaatgatattattaaggcattgtttatggacactaatagaatattattaatattatttaaaattttttatgtttaataacaatatactaataatacgtattttataaatataagcttaattagtattatatatatgaaacaatattttcatttattttgaatgttgaaaaaataatatttaattaaaaactatttttatattgtttaatgaagagcaaaattgggagaaatttgtaggttttataaatggaaaaacaaatgcccccaaaatgtttgaagggccatatatgatttta

SEQ ID NO: 258004 - DNA, 468 bp, Gossypium hirsutum
ggccgaagttctgtcaagatataccacgccaataccgaaggttatgttgctcaggtcggcaatatgctagtgatcaaactagggcatttcgattggaatccttcaaaggaaaatcagttggatgggagatggcaaaagttcattgataaaggagcagattatcaaatttggttaagacagtaattcaatgaaatcagcaaaaaggttagaagttatcctctgccacattatctctacttatagtaatagaagaatatctgcaatcgtacacacacaaaaataaaataaaataacacacccccatcagcgtcgactacaatatcagcttcagcaatggcaacataaaaccttgaacaaggatcgggaacggccgcatctctatcaagcagcatgggaattaacgttatggtttacagacgttatggtttaagtcaatgaatctgatatgctgatttcagccattcttat

SEQ ID NO: 258005 - DNA, 426 bp, Gossypium hirsutum
tcttttttaagagtataaggaagcttgatttcagggcgggtgtgtgtttccaccattgtgcaggttagtgatctcaaaaactcgcctggacctggaaaaaaggagcttagattggcaacaaaacaggctcttcaggttcttcaagataattatccagagtttgttgcaaaacaggtatgttctatgtctatccatatttaactatcctatatatataatgtgaaaatttgattgtatagtagattctctggagatgcattgatttgggtttcttgttctgttaggtgtttattaatgttccttggtggtatctggcattctatacaatgattagtccatttatgacccaaagaactaagagcaagtttgtcattgcactgccatctaaatctgctgaaacacttttcaaatacataccacctgagc

SEQ ID NO: 258006 - DNA, 423 bp, Gossypium hirsutum
tttttaccacagaatggatctaagttcaacccggtgccttcaagtgcaagtccagccacatctgccgctgctgcagcagcagccaccgccaccgccactgcaactgctgcagctaaaggcaaaggggttgctcccgttggatcttagcatggaatgagctgttatgtacaaccttgtgtccgaccatgtattgaaagatatataagaatgagtgactttgccatggaagtagcagttgagttgtggagaaatgcacggcttccccctccaccccaatttttcctgaacaccctttttgacaaatttcctcgtggtacagtggtaatgttccattgaattgaagagtatactctccttgggataaattagtaaaaagccttaataataaagtgctatattatcaccattttgctgctggagtat

SEQ ID NO: 258007 - DNA, 420 bp, Gossypium hirsutum
ttctaactctcatgttagggtacagtcatccgggggggtttatgatatactggcgagaatgtataggcaataggttgttttttgctggtgaagccacaactcggcaatatccagccaccatgcatggtgcctatttgagtgggttaagggaagcttcgcgtattctccgtgccacaagaggtcgccaaaactactttaggaggtctgtgcagcggaatgttggaccaagcagtgatcaattgggtgatctgttcaagatgcctgatctagtatttgggaagttctcttttgtgttcaatccattaacagaggaccctaaatcattggggattttgagaattacttttgataattgcacagatgatatgaggaaggtgctggaaaaaagctgtggcccccaatcgaatcaatcattgcagc

SEQ ID NO: 258008 - DNA, 225 bp, Gossypium hirsutum
cggatgtttgggctaagaatgacatgtttattagacgggccatcattatgcagtctgggtgaagttttaccagaaaagtagtggggtgagatgggtggtggcccagcatcttggtttattgttatgtatgtgtaatcggagtccaaataattttcttttatggaaatgaacgctgtttgagtgctttcgtggtaatataatacttggttttctgtttcggttatg

SEQ ID NO: 258009 - DNA, 314 bp, Gossypium hirsutum
gacctctggctgttgcttgctttgatatttcacagtttattcagcaccatcctgctggtagggtgatagtgaatgacctcaaggccaaggaacgggtgatgaagttgatgaaccacgagagtgcggaggttaccaagaatgccttactctgcatccagaggcttttcctcggcgccaaatacgccagctttttgcaggtatagtttcgtgttgttgtgtgcatggtcatgtctcattctacaatgcagctagtgaatatatcgtaagtaaattcggcttcggctttgttgggtgttatattttcatcggatata

SEQ ID NO: 258010 - DNA, 423 bp, Gossypium hirsutum
ccctttcttccggccagggtgacttgacttgtgtgggggagttacttggaagggggttgaatagatacacagacaattttctgtgattctgattgtatctattatgggtttatttttaccatttcctacatatttgcattttcttttttcagatttgaattccataaattggtaatgaagtcataaacaaacccattaaagtgtgagctacatgttagaatttgtcttctaataaaggagtagagatgaaatgatttttgatatataatagactattaaggttggtcaaaaataaaatccatttctcccatttccaattttgcctatatgacgaactcatatgacaattactttatcctactgctaatcatgtttatgaaatcacagaggaggatatagtcaaaatatttaatccaatttaca

SEQ ID NO: 258011 - DNA, 538 bp, Gossypium hirsutum
cttgctgagcctttgaagcagctttctgaaactcctgatacttttgaggattttgtttctgagaatctgaaagagtttcaagactggagtgaatactactcctgtgatgcaacgtatcgcaactggctcaaaattgaattagcgaatgcagaagtttctcccgacgaactttcggtagaggaaaaacaaagagcaataatggcagccaaagagacgttggatttatcttttttattgctactgagggaaagaaacccatggcttatttcttgggtggaacatattagtgaatcgatggaacctctatttcttgaattgcattctactgcaatgctccgcctcccttctggtgaatccatgtgtccagacgctactgtttgtgctgcattaatgagtgcactttactcttctgcaactgaggaagttgtctcagaaagacagttaacagtaaatgttgccatttcttcaaaagacagctacagcattgaggtaatgttgcgctgcttggcagtggagggtgatggaattggtccacaca

SEQ ID NO: 258012 - DNA, 461 bp, Gossypium hirsutum
gaacatattcaaggccaaccaggatggaaacctctcaccgtattactgctactacgaggaagcctctgatcaagctagtctagtctagtttagtgtagctttaagcagttcaaatcttcaagtgaatcacactaaatttaaactttcaatttcgtcaagctggtgggtttcatggggtagtgggaatggtgcagtaacaagagaggtgcccgctttgacaagtgtaccaagtagttaggcctaccttagagcagccttgtgtaggacaattgtacaaatagtgtgtgaaaattttgaaaatgatccaaaaggagcgaagcatgagtaagagtggctttcattttgaatcattcctcttccccttgttttaatatgcttggcagccgtgatttcaaggacagctctgctggttgagtgaaaggataggttagctgtaagcaaatagaagatagcagtgtggt

SEQ ID NO: 258013 - DNA, 406 bp, Gossypium hirsutum
taatttaaaaaaaaaacagtgagatctgctacgagcggattcttaaatggagtatcgcaaaatcaaagatgaggataatgatggaggaacagtaagtaatgacattgagaatctacgaggcatagggttttcgggggttgcttctgtaagtaatgttcctccaagggaacaggccaagtggaaacgcaagacagttgttacagttgcattgacttttcttacaagttcacaagcaatacttattgtctggtcaaagagagctaggaagtttgtgaataaaagtaaaagaacccttgttttgtgttggttttcagactcaaaggagtgtggtctcttaacggatgctttagccatttatagtaagctgtcttttgctgaatgcttaattttggtgctttacttcctg

SEQ ID NO: 258014 - DNA, 388 bp, Gossypium hirsutum
tttatgcgtccgagttgaagaaggtgctatcggggggaagttgttgtgcgctcatggtgatgctcgcttaggttatttcaattggtcaggaatccaatgcagttgtggaagctggattacccctgcctttcagctgcacaagtcccgagtcgatatcagcaccgtgtagtatcgttatccgccatagctctaaactgaatcactcgccggctcccggccagtgtttctaataagaactatataggattggaatttcccttgcacaaaaagtctatgagatgttcatatatggaccaacaattatgtaagagaaaaaaaaaaacaaaaaaaacaatgagttgttcaaaactttaaagtttgagggactgtctgaataatttgagagatt

SEQ ID NO: 258015 - DNA, 374 bp, Gossypium hirsutum
gcgtcgttcgcccttttttttttttttttttttaaaccaaaatatagagtacattgtttgattaaaattgaaaacatggttcatatttatccattgcaatgttcagatgttcaataacatgcaaaagatatatatatatagtctaatgacagcttcaagtttatctaagcaaatacatatatcacccaaaacttcccacagaaactcaaatttaagtactaacaagttcataaaacaagttaaacgaaagattacatcaagggaaaaagacaatcaagacaagtaactataccggtactcgtatttaatcgaactcacaaagcgataaccgcgtgtcgtttgtgcttgaggaatgtctgaaaatctttataacc

SEQ ID NO: 258016 - DNA, 397 bp, Gossypium hirsutum
ctgataattctctatcgattcagcctcggagattggaaataaatattaaactaagaagagttctttgtatactacatgtgccgtggaatcccatagtttgcactgctttttatgctattaactactaacctcaccgtccatctccgttaccatctataaaaaaaactgttctactactcttcctttgttaattcataagaggaaatgggtgaggaagttaagcaggaacaacaacctccagcagaggagaaaacagaagacaaggtggaggagaagcctgccgaagaaaataaggaagaaacgccaccaccgccaccggcttcaccacctacttttgtattgaatgtggacttgcattgtgttggatgtgcaaagaagattgaaaaaaccatcatga

SEQ ID NO: 258017 - DNA, 432 bp, Gossypium hirsutum
  unsure (1)..(432): unsure at all n locations
tgaaaggatccaagcatctttatccgccatggaggagaagaaaacaatcatctacatgggggatggactgggtgatttctgccccagtttgaagcttggagatggagactatatgttgccaaggaaagatttcccagtttgggacttggtttgcaaaaacaggagcctaataaaagctgaagtttgcgaatggagcaatggggaggagtttgagcatgctttactccacttcatcaccaagattaccattgacaaaagcaacactaatggcaacaatgctgctcagctatattcagattgcaaagtacagacaatgccaggctcttcccatcaagccttttcccaaaccctttatgttcctcattagaatgcaaaacttgctgaggttaaaaataaaacatagctgatgcccttggncttgctattctttta

SEQ ID NO: 258018 - DNA, 377 bp, Gossypium hirsutum
ctattatttttggaggacccccatgaaatacgtcgaatatgtattatgggaagaaactgtactttgaaaaggggaactgatgacgtggaatgttctctacccttagaaaagttgattgctgaagaagaggaggaagagatcgagatgcttttggagaactatcttcaaagatgtgaatcttgccatggtcaggctgaaaggcttcttgattctgcaaaagaaatggaagattctatttctgtcaacttgagctctcgaaggcttgaggtaagcaaagtggaactacttcttcaggttgggacattttgcgtggcagttggggctctagtagcaagtatattcggcatgaacttgaagtcctacctggaatatcatat

SEQ ID NO: 258019 - DNA, 467 bp, Gossypium hirsutum
ggattataggatccaacctttcttagagctaaccattgttttgcaatgtagaatgctgtaattcattctgcttgtgtttcaatttgttagttgttcatctactaatgagtttcttgctgtaacatatgcagggctatggataatcaggtatggttccaaatgtttccccttttcttaaattgaccagtgtaatggtatgctgtaatgtttggtttagtagaaaaaattgtcctagtactattgaggcagttaaaaattatgtagattctgtcacggtattgtcaaaactagaatgcaatggtctaatgccgttcttctgttttattaagctctgaaatacttgtttataattcatgtgccaatgtcaccgtggatactgaatggtaaaagtgaagttgattcatcagaacaggaaacttgagatccttaagagctctttgttgtctataacatgaagatctgactgc

SEQ ID NO: 258020 - DNA, 204 bp, Gossypium hirsutum
atgaagcaaactggggagaggacggctattacaaaatatgcaccgggcgcactgactgtggcgtgcactccatggtctcaagtgtggcggcatcgcatacaaagtctcagtcccatagcccacgacatgactgatgtaaggaacaggactattcccatccatcactatgtcttaactatggatctatgccatctgctaaaacgg

SEQ ID NO: 258021 - DNA, 438 bp, Gossypium hirsutum
aatctcacgaaagtgtacggcattctagttgaaataatttcttcctgggttgcttcctgtcacaaaaaatggggttctggacattggtagaaggattgctgctatttgccaatgcattagcaatactgaatgaagatagattccttggtccaagaagatggactttagcagaatttcaaggaggaagaaacactctcaaggggcagatagttgggctcatacatgcatgtcaattcctcagactaccacttatccttttcaatatcatcactattgtagtaaagttagtctctggttgagatcaacatgaagaataaattcatggcttgtgacatgaatgaattaatccatacatactctgatgatatgttaataagctgtttttgccacctgtgtgtgtacgatactcgaaatgacagaataagagaatggttcata

SEQ ID NO: 258022 - DNA, 418 bp, Gossypium hirsutum
ttggggttttttttccctttccaactctaactcatatctttgactgctcaacaaatacaggcagtttgtgctgctggaaatcgctttgttgccatcatgctcaagcaaattctaagcaaactcccacggaagtcgcaaaaatctgattctttagattcagctggacttgattcaggcaatcatacttcaaactcgagcaatggagttcaatgtacgaatattgggaatagtataacaagtcgactaagtgttgttaaacgggtgtcgtcagctgtttttcctgctagtatcatggctggagtggaggcagtggagccgaatctatcattcaaggatgtttcaaatccgcagaagcagaacttgtttatcagtaaattgaacctgtgttgtgaggtttccgattttagcgatcccaaaa

SEQ ID NO: 258023 - DNA, 448 bp, Gossypium hirsutum
ataatcttctctttcacttgtaacacgtcttgatctttgaacttctttccttgtttagtgatggaaggtgagttagttttacttggcggtggtggtggtggcggcggcggtggttcttctggggtttctacaaatgaatcagcagtgttgtctaacgtggaggttgtttctgaggcatgttcatatccagctgagagtgagttggagttaggtctggggctgagccttggtggtgctacagggaaaactaagcctgccactgccacttcttcatggggtgagtgtggtagaatcttgactgcaaaggacttcccttctgtggtttctcatagaaccaaaaatggcggaccttctgtttctgtttctgggaccaaaagagctgctgaatctgtctcccatgagggtggatcccctacttgtatcagtggaagcagtcaagttgtgggat

SEQ ID NO: 258024 - DNA, 255 bp, Gossypium hirsutum
ctttttcgtttgccgcagcctcccttgcaccatttcaaaccctttttcgaccggccacaacgacgacgacggcgccacgacggtgcgctaccaccggtgtactgaattagagttcctggactgtgcgagggcgacgttcgcgagatacggggctggtgagagttcgtgcacaaagacagttgctgcggcgccaaggctgggaaggaggctgctgctgctgcactgaggcgaaagggcttagatgggtatattggg

SEQ ID NO: 258025 - DNA, 281 bp, Gossypium hirsutum
atagaaacagagggttaaaaacaagtgcgactagaatggcatttatttgttgtaagttctcaaaatttcttttacatattaatttttgggagttgcaatgtaaataaaaagaattgggggttattatactaatggttttagagaatccatttgtatatttcatttggtgctgtaagttttgttctttgcctttctatggatgcaagcattgttgtaatgttttaaaattttcattcttctgctctccagtcgggtgagccctcgatcatcattttgggctt

SEQ ID NO: 258026 - DNA, 427 bp, Gossypium hirsutum
gcactacggaggctttatcatgtagggcttcatgctataaagaagttggggagtataagaaggctgtagctgactgttcaaaggtgttagagcacgatgagagcaatgtgtctgtcctcgtacagcgtgcactcttgtatgaaagcatggagaaatacaagcttggggccgaagatctgagaaccgttctgaagattgatcctggtaatagaattgcaagaagtactgtccatcgcttggctaaaatggcggactagaaggtctttatgattcatttgtttgtattagctttcttcacgtaggttgatacctttttgccctcatactatgaacagaattaagggggaataataacctttttccctggatacatgtgtctttcaatatgtctcgttgcggagggttttcgtggttcaatattatatct

SEQ ID NO: 258027 - DNA, 453 bp, Gossypium hirsutum
ctattatttcccgcttcttctagggttttacatataacaataattttctgaaactcttaccagaaacaagggtttgttatttattggcgggagctgaatccttaaaaataaatacaaataagagattgtttctttctattgagttctttaaaggaaagattcatggcgtattctcaagcacgagacttcatgttctgtaacttgtgtggtacgatgctgtctttggtttcacctaagattgctgaatgctctttgtgtagatctaaaactagtgctaaaggtattgtgggacgagaaatcggctacacactcactgttgaggatattcggagagaccttggcatctcacatgctgcggaagagatgacgacaaaagaatcagctgcgttgatcaagcagacttgtaaatcctgtggaaacgcaaagcttgagtacactacccgacaaatgaga

SEQ ID NO: 258028 - DNA, 238 bp, Gossypium hirsutum
cctttgctaccgcccacgcgtccgagaagataaaggaattgctccttctgctattaatgccagctttttttaatctcaaaagatgtttattttggttgggagataaaaaaatttgatttttggtatttgttatgttgggctgctgggtttattggaactcatcccaatgttacagagatgttcaagtctttgaaaaagataaaataaaaataaatcagctattatgaggtttttcaat

SEQ ID NO: 258029 - DNA, 537 bp, Gossypium hirsutum
aaataatttaacatatatattataatctctatgttacttaaagaataatttaaaagaataatttaaagaatatattgtctcaaatatttttactcatagatagatattgatatacagcaaaagaactaatgaaattgttatattgtgtatatatatttttaacatattttcgttaatttatttatgctgctagacgtgtataatataaaaatttcatgtaaaagtaaaaatgaataatatagatttaaatttgtaatcacaaactctcatgcaacttcatttttacatgtgtcaaacttcacaaagaacattgattgaaagtatctattcacaaagaatagcattaaggttcctttaaaatattgaccgagagtattctatagaatcaaatatgataatacaagactattttaatataatatatattaatagaaaattattaaacatataaagcttccctgcatcaatgactgaatgtattttagaagctggaaaatagaaagcaagaataccaatagacttgatatacttgaataa

SEQ ID NO: 258030 - DNA, 375 bp, Gossypium hirsutum
ttatattaacaggtttttcattcttcaagtctgtcaggacttgctgatttgcaaggattttttccaagtgggacagttttggctgcatgctcagattctctatcagttaattgtggaaggaacatttctgctgtgggcgcatttcctcgaactgtttttgttccatctgtttcaggccctgcctttcaggcttgtaggtatcatattgattgtgcacttgttgactccagccaaataccaccaactgtgagcaaatgtcagagtaatcctatggctgtttctagttctggagttgtaattggtggatttgttgattcattgaagttaaagcatgggcacctttcatcgtctacaagtagtgctgatatactttat

SEQ ID NO: 258031 - DNA, 512 bp, Gossypium hirsutum
attagtatataggcttctgcagctattcaaatatgttcctcgcgagcagttgaccatccctgatttcgtgtttcagcacgatatagaagtgaacggtggaaagggtcttattgtagaccctcgaacgaaatacatatatcatcgaccatagaacatttaaatacacagtttcagagttgatgaaagccagtaattcttggtttgatttcctcatcaccttgtatttgtaggcaggtagtgggttggttgtgtttggtttttcatgtagatatgtttctttttttttcgttttattttttgagcaatgatatgtttgttaataatatatatttcatggtgatgtgagcttttctatttgatttcaacatgttgcactacatcctgagaaagtggactctttcttggcatgttttaaagaggggaagggattgtcggcgttttgaatctgtcgattatggacatggtcgactttagacagatcagattgtaagtgttgagctttgaattctaat

SEQ ID NO: 258032 - DNA, 421 bp, Gossypium hirsutum
actccgttgccctttctctcctcctctatattttaagcgccgacaaccattactctctgtctttcagattttcttctttcctcagctcagacttgtcgttcctttccaaactcactccgcgtcaaccgagtcaagattcttttcccaactcaccattgtaaatactaatacgcttcttcctctctctctctctctctctcttttttcttgactgatattccaccttcgctctctttttttgagggccgagatctgatatttaaaactgccccaagcttattatttttttggtgaaattggaaattttttccagatccatggactcgtttttttagactcagtccgagttcagaccaaatcggtgatcgttgccgagttttggtgacagagaatatagttattaggatttttcatttaagtg

SEQ ID NO: 258033 - DNA, 504 bp, Gossypium hirsutum
  unsure (1)..(504): unsure at all n locations
ggaaanatcnatccacttgtttccctctttttgtttgtatccgtgtctctcgggaaggcttattttctctccacaataatggcggaatccaagagcaagtttgaatccataagggaatgggttgtcgatcacaagcttagaactgttggttgtttgtggcttagcgggattgggggttccattgcttacaactggtctcaacctcacatgaaacccagcgttaagatcattcacgctaggttgcatgcacaagcccttacattggctgcattagctggtgctgcagtagtcgaatactatgatcacaggagcaagccgaaaggcgatccatatgcgaagtaccttccacactcacacaaagagtaggtttgtcttgatagattaagcaacattctcatcacattcttttcaactgtttaccttatttacataaacataaatgcggngcttgcaagtggattgatattaagtttttatctgagaatttaaacaaaacacgtgttg

SEQ ID NO: 258034 - DNA, 479 bp, Gossypium hirsutum
  unsure (1)..(479): unsure at all n locations
gcggngtcnggcttggctgttgctacccatttcttccgtttggagccgtgactgaactctgaccagcttacgcggctccggaaaaaaagtgtaagcaacaagagactggcgcacgtggcagctaggcatgggcttaaccgcttcgtcaggaggaaagacactgctcctcttgacctcattgttaggaagtatgtaggggcagttaaacaaggagatgatcataaaaacttggcagttccaggtattttggctgatattgtcgaagctctagccggtgctgtttatttggatctcaattttgatctcaccaagctgtggacgatatttaaagatgtattagtgatagatgaaattaaggtgccaaaggattttaaatcttctgagattattggagcacaaaataagctgtatggattatgtggcaagagaaaatggggaaatccagtttacagcgaagtgaaagctgaactttgcgaata

SEQ ID NO: 258035 - DNA, 191 bp, Gossypium hirsutum
  unsure (1)..(191): unsure at all n locations
cngtacacaaactgaaggaggtcaaattctcttttctctgtgtgtaattcctttctgttttttctcctcactttggtttcatcttctcaaattaatggatgctgctaaatggtcacaggattttggtttggttaagcccatggaagagatgctttctaatacatgcacaaggggaccaatgttagagagaa

SEQ ID NO: 258036 - DNA, 386 bp, Gossypium hirsutum
tttcctttttctttaaaacacttaaactctccctctctgtcggcgccgctcagcagttcatcgcccccttcaaaggctctccgaaccatgcctttaactccgacgacaacagaggaagagcaatcggtccaaacgtgaggtacgccctctctcttttattgctattatctctttagtaaatgctcaatagaatctcaaaatgaaaaacaacaaaacaaaaaaaggtcgaactacgaacaaataataagagagaaaaaaaatgaacctagaaatcaccttttggtgttttttgtttttgtattctgattgccctcttttttacaggttacaatcggcccttttatagccaaatagggacaaagaaataaaacttttacagtttttat

SEQ ID NO: 258037 - DNA, 448 bp, Gossypium hirsutum
ctcatttcttcccaaacccttgaccgataacttatctttttacgacaaaggggttatcacttccaaaactgcctaagaaaaacaaactatctctgccgattgaagaaatcaagaaagatggcttgattcagctattttcagctgaaaatctggtgggagatgcttcatagcccttccctgtgcaagatcgtattcaatccaccaaaattttttaaaaagccagaataataggattcctatcatctttcttttatctttgtccatcgaaactcagttggtttgtttgtatatgtttgctgtttgttgattaggtttgaactttgaagggaagaaaagaaatggacccagtcacagctcatggccgccctgttcctcctcctttcctcacaagagagcttcatctaaatccgcaccatcaattcttgaatcaccgccaacaatataactc

SEQ ID NO: 258038 - DNA, 382 bp, Gossypium hirsutum
  unsure (1)..(382): unsure at all n locations
cccacgtgnacgcttgcacttccagatattagaggaagcagacctggtgacgaaagaaactttgaagatatttatgatgttgagaagttcatgaaaagcctcaatggggttgtcaaagtagtgaaagaactacccaatgaaatatcaattcgggatcttgctgctgtgaaggttcccaatagggtcaccgaagatcacattgtggaaaatgtacaaccaatttttaaatcaaagggaaacataaggcttgctacctacttccctactgtaaatatgagaaaaactacacaaaagagtagtgttgattcagtctcatgtttgggaatgtttggaactttagagttgcaagcagaggtcagtgaagttgttgattcaatgattg

SEQ ID NO: 258039 - DNA, 326 bp, Gossypium hirsutum
tttctacaccgtaccctcgccggaaacaagggggaaaagggtttttctttgaaattttgctgcttccacaccatgttggaatacgaatggggaaacccctcttcaatcatgttatcgggtgaagagaccgcccaagaacccgaccccaatcgtcagcttttccatcactatgccaccaccaccaccaccaccaccacccaccaccaaccttacaacgaaaccctcctttctcatcacaaccccactgttttttctcaccaaaacctcttccataaccctaaccaagctcaacccccacaacaccctgctactcttcattccttgta

SEQ ID NO: 258040 - DNA, 487 bp, Gossypium hirsutum
tccatgcgtccgcccacgcgtccgcgaaaggcaccggcaccctttctctcccaacatcaaacggaatcgccccttacattttccttccttcttttgttcctgaaggtaactgcaaaaaaaattggaggaccggccacacaagttcatcgttttcgagcaggaactagggcttcaagagattcgaaaataccagcttcatcagagaagtctcaagatttccttgatctccatcctttctggaattttggttttgatggcaaactggtggttaattatgcctgttctatggcatggggctaactcttgatgatggatcttcagagagatgagataaaaactgtcaactctgtaactgtttcctacaattctccattatgcatattcctcatagaaccatcttctataattcccccccccctttttctctgagaaactggtgatcctataacagatactaacttgcttctactcaagcaagggaatattg

SEQ ID NO: 258041 - DNA, 292 bp, Gossypium hirsutum
  unsure (1)..(292): unsure at all n locations
gaggtttgtgtgacctgtagaaataatggagcagcctgatggcattgatgatgacaaagaatctttaaaccctacttatgaaaatcacatatgaaaccttttatgtctcttttgtttttttgtttttaagctaattgatcattttgtaatttaaacaatacatacataccgtaggttaatttatagttcccctaagtttaaatcacaagttttaaggtacttggtcttgtaatatacttctttttaatcctttcgatatatgtgagtgattatcaataaaattatacccnnc

SEQ ID NO: 258042 - DNA, 502 bp, Gossypium hirsutum
cccactcgtccggaagggatcaagatttgatacgggatgctagtaaattgacattcttaaatgttaatgaatttaaattaagtcaacaagacctcatacaacattctaataaatttacaaactcaaaagcagctgggtgtagaaaagctgatttggaaagccagccgcaaatcaaatcaagtaaccaaggaagttctcatggctgcaacttaaaacttcctcttgccttacctttacctaaagctccatcagaatcttggttgaagcgcaccttgcctgctgtttcctcgagaaattcatcttcacggacggctcttggtacatgtaactatagtgaaactcaagcctacacagctctgtccagtgatctcaagtgggaaaacattgttaaatcttctaatgttcatcatggtcgtttgcggttttccgaggaacaacttcctcctataccagaagcttaaaagtattgggattcattacttttatggggttaaggatgcat

SEQ ID NO: 258043 - DNA, 340 bp, Gossypium hirsutum
gcttttgcaggtgaatattacattacatagactcactttgttgaccttggttcaaaagatagatacattcttttgctctgtatgtctagatacattcttttgctctgtatgtctatttttctggggggtttcctctgaaacacggttgagagagaaacaagtgaattcatttgaggttttggtccacaatgttggcttccattattttaatggtgaaaagccacccagaagtcattgttaggaggactttcctctttgagctgccatttgcatgctgttgtaaggtctaccccctcctttcatttggctggctgtgttagaaagacaaattctttcattt

SEQ ID NO: 258044 - DNA, 204 bp, Gossypium hirsutum
actatttctagcttgcgagacagcctacaccaaattgtttgagatgttcttgttagtcgttaagaccatgaatgaccgccgttttgtctcgacgtatgtaatcatttctccattttttggtgtctttcattttttacccatggttatttgtttggagaagaagaatttggcacttgaaacataattcgttgttaatgcttttgt

SEQ ID NO: 258045 - DNA, 101 bp, Gossypium hirsutum
ccacgcgtccggggaaattcggttttagttatgattgagacagccctaaggcgacagcaatataacttgttgaatgcattgttcatgctgctgaagtactg

SEQ ID NO: 258046 - DNA, 462 bp, Gossypium hirsutum
cccatgcgtacggaagacatgaagcttgttatgcagcggtccgactgaccggacgtcatggatcctctcttgcccagcgacagcgagggcaactcaccagctgtgtatctcgaggcccgctctccgacatggcagcgcgaagccgacccgtctccgcggtctccagacgagtgggagcacgtggcggcgcactactgccccgtgccggagcgcgagcaaccagccgcctcaggcacgcgcgaacccgatgaaggcgacgagccgcaccccgctgcgtacgacagcgcgtcggaaggcagtcaggtcgagcaggaggcttgctgcgatgacgacgcggacggcgtgcctgacaagccgcttgcgcgcgccgcgcctgtgtctgccgtccccgcctcggtggcggcggattcctcggaacaaccggtgcgcctgaacgtggagggtcaggtgttttacaccagc

SEQ ID NO: 258047 - DNA, 211 bp, Gossypium hirsutum
tctgagatattattttctaggaacaaagaatcaaaagtcaacatttcttatattttttgcatttcaagtatgaaccattcaacggagacaaattgagcatatttcattgtcaattgaagaccatgtattccagacttggttgtgtcatcacttcatttctatctttcatgaagtctttccattattggatgtgccttttttttttatttct

SEQ ID NO: 258048 - DNA, 359 bp, Gossypium hirsutum
tgagagtctagaatcagaaaagggggagcccaatccagacgtaaatgtcaaagggctgaatcagcatacatatgaagctggaaaagaatgcaagacacagattgcaagtgaaaaccaaagcagccatcttgcagatgggaaatctgttgccatggaagaggaagaagttattctcttgaagcctcttacaagacataattcagcaccaccctatgggaaaattcatagcgaaaaagaccctgcgtctccaaacgaaatggaggaaactgttccttccgatgaatgtttgcgccgtgctacgtccctactaatagcgcaaaaccaggccaattctgatgcttcagattttcaatctgaca

SEQ ID NO: 258049 - DNA, 227 bp, Gossypium hirsutum
agtctggcttcgattcgaaagtgggctcctgttgccattgtgttgggagttgtgttcctcctcttctgggtgaaagcaaagttatggtgattcaactgtgatccatagtgttaagaactcatcagaatttcttgggtttctctgttgctgagtaacctcttgtccacacccaagaccaaatattggagtgcattctggtttttattcatctcacaattcgcctcgta

SEQ ID NO: 258050 - DNA, 501 bp, Gossypium hirsutum
gtttttctttaatctactttcgctatggctaatagacgttcccaaactcacaagtttgggctttgaaaattactttgaatttcactgtttggcatatttagaactaagagattgtccattgctaaaaacattcatctctaaatgtgtacccggagatgaacctcaaattggccaacatgtacaagcaagtaacttggaggttcataactcatctctcctcaatgaaaaggttgttttccctagtttgaagaacttgtggattcagaattgtggttcgttagaagaaattattgagctacaaggactcattccagatgaatcacagtcaacatcagctgctcaatctattgtggctgaaacagtgacaaccaagtttgtatttcccaaactaataaaccttggattggataaggtgccaagattgaaaagtttctgctctaggatgcataccaccctgtggccttcattgaaacatatgagcgttattgaatgccccaaagt

SEQ ID NO: 258051 - DNA, 261 bp, Gossypium hirsutum
tcttctacgcgtccggcatgtcatagattcaatggcttgggatcaaccattacaatgttgtgtattttactctccaccagatgtaattcgtaacttactgaatgcaaatgcaaatggagttgtgacaccaagattggtggttgttttctcttcttaatcaaaaaaagaaaaagaaaaaaggagttgatttttatctatttgtattttggaaattattaattcctctttattatagctttgatatgaaatatgctttgaatt

SEQ ID NO: 258052 - DNA, 293 bp, Gossypium hirsutum
tcttctcgtccgcccacgcgtccgcgttccggttgggatgaatgccacgaagtgcgtgggcagcaaacttggaagctaagaaagtagcaaaggagttggtgaaactacaaaagccttcggaacctgattttactgctgaagacgcagattgatatgtaatccatgaagttatttttatatttgctgctacgtttgattagaagatctgaaaccactatacccaatacatagacattccagtcttggcacaaaaagcttacatggatatactcgctgggaacttgccacataaa

SEQ ID NO: 258053 - DNA, 397 bp, Gossypium hirsutum
ttgtatgtatatttagttgcatgcatcttccgccattaagggaagagtgtaaaataactttttaaaaaaataaaaaaaatacaaaatacaaaggtttcatagctgttcaaacaagagttccaaataacaaaatgaaacaaaacaattatgcgaggagaataaagcaagaataaatatcatcatataatattcgttaacctagttttttattaccaattttatctttatgaagcctcactcaaaaattgattttactcaataattaacccagtaaaattattggcctaaacttaatttacctattatattgtatagctccgaaattgaacctaaattattagaatcactttataaaaataacttcacttgccctcaatagaaactccctaattaaagc

SEQ ID NO: 258054 - DNA, 397 bp, Gossypium hirsutum
tttgagcttagatattcctccaattgttttgacagacttttgttttttttggcttcaaacttgtcaaaaaacaattcttggcttacttttggtaggtggtgttggcatatcaaacatgatcgggaaaatcgagcggcacgagtacatgggattcgagaacctgtgcaagtacgaaagctgatatctcaggttattttatctctcaattgatccacctccttaagtctcctgtaagttaggctagattgcgttttggggaagaaagaagatggtcaataattttccattctttacacaatccccatttttcactttccgttccgttttatatttatgagatacatttattgacaatattcagaaattgtctagatgaatggaattatagcttcctgtt

SEQ ID NO: 258055 - DNA, 260 bp, Gossypium hirsutum
gtttacttcaataatctatgctcatctttttttggttttggattctctttttttaagttcttacatttcacagagagggtcttgaaaggtatcaattttttcttcccctcttttgttttcctttttccctcgtttttcctccatccctccctgtgtaatattgttaggctctgtgctttcaagaggagtacgaataaaaataaaccttttttttttcttcttttccccaggtgaagtaatagcgcaaagtcccgcccaga

SEQ ID NO: 258056 - DNA, 307 bp, Gossypium hirsutum
cctttgtttttcgactcttgctgcttggacaaattcaagagatcaactttgctatcaaggtgattccagatcattttcaagtctcaactcctcccagtgaggattctcttcaaaacagacgttcacctgattcacaaccaagtactggaaattcttcgaggataggtcccgcagcagtttatggactcggcgaaaattgagaagggctgcattcacgttgaatctggtcaggttacgtgggttgccatggagtggtgctgatggtcaggaaaaggttcaattgactgctgcagagttggaatcacta

SEQ ID NO: 258057 - DNA, 363 bp, Gossypium hirsutum
ggattgttgagggtcaaaagcaggagaggatctctatccttcgatgtgagagcggtgaccaaaaggaaggcggatgatgatgatgaagaagctttagctttgcagttttattgatttctctctttgctgttaaaaccaaaaaaatctgaatagcggaaatagaattagattctgttgaattgcagtaaactctgcccatatggttatttttacagctttttgcattgaaaaacattgtcaagtagtacctcccttgattttatttgtctaggctttaggagtatgtatctagggaaacgtagatattagtacttcaatggtatgttatcagtgattaaaactatctttgaatatgccaacatg

SEQ ID NO: 258058 - DNA, 480 bp, Gossypium hirsutum
tctctcgtccggaaaattatggcgatgaaagaggggaaaaaacccagttttttgctgggttttgcattgttattgcttctattgatgatgatgataagctcacaatccatggcagatgctgagatgatgaaggtgaaacccacaaaagcaagaacaagaaaggtattggagatggagcaagattacccaggtgaagtgccaagcatcccaagtgattatgattacaatgatttctatagaaggcaaggtgatgttccaagcccaggaattggtcattgatatatatatatatatagatatatatatgtatatgtaaagggtactgccatgcatgattttcttctaattcatatatatggtttatttatagatttttgttttaatcatgtcacatcagtgaaacattagtgaaatttgaagtgatatatattatgtgtatgtatagggattattgtaattgaatatgcatgcttttatgat

SEQ ID NO: 258059 - DNA, 531 bp, Gossypium hirsutum
gtttcttttcaagtaccctttgggtgatccattggagatatctcaacgtcgatgcctgttaataatggccatgggtgttaaacctgaagttgggcatacctgtctcagacacatttctgtaccagacactaacactcaaatggaagtaagacacatttctgtatcagacactaacactcaaatcgaagtaatgtagggaacttccacaagcattgactttgaatgtgctgtcatatacattctgccacccttttttttttaatgcgatactattatatttgataatggagatgctttgagttctttatcattttattgttttagtttctctttagttataatttatgttggtacacttgttcgtcttattttaatgcatatgatattttttttctgtaaaatgcacgcaaagatgtttcttattagtattatttgaaatataagacatgtttatgccaaatattttgttatgtgatatatatggtcatggatctttcaatgggtgattactttagagctttacttatgttt

SEQ ID NO: 258060 - DNA, 396 bp, Gossypium hirsutum
gtccggcaacgttagcggtgaaggagcggtggttagcaaggagcgagggttgttcgatttcatggggaagaaagaagaggagaagcctcaagaggaggtgatcgtaaccgagtttgaaaaggttaatatcgaagagacaaaggcagaggaagaaggtgaggagaagaagaagcatggtctcctggagaagcttcaccgatcagatagcagcagctccagctcttcaagcgacgaggaagaaggtgaaggagaagagaagaagaagaagaaaaagaaggagaagaagggactggaagaaaagattgaagagaaattagaaggggaaaagaaagaagaggagaagcctcaagaggaggtgatcgtaaccgagtttgaaaaggttaatatcgaagagac

SEQ ID NO: 258061 - DNA, 485 bp, Gossypium hirsutum
tgttttttactgagcagatcagcccacaaaaaaggggggccaagcaactgagagcgtggggagaagaaacagatcatctcctcgaaaatggtggctcttatcaccattatggtaacatcaagcagtttgcagatgtgaattatccctttactgattcatcatgtcaactcttttccccactggaccttcaacagcacaagcaaaacacgggccctgattctgtaagctatgggcaggccagtgttccctatatgcatctcaataacagcggtccttcaaaccaaatttcaagatttccaactagtgccaaatctgaaaataacgggcatccttcgacaaacgagtcatcttgtgcatcgaatcaggcacagtccatagagagctctcggggtctttcatttgaggttcctgacattataacgaatgagaagatgggaaagccatttcatcaacaagatacaaaagccccagtcaacaggaatatc

SEQ ID NO: 258062 - DNA, 328 bp, Gossypium hirsutum
ttgttgctggaactggtttcttctatgtgaagaggaaaagtgctaagaaagtggctgagaaactcgagttccgcaagtacgatcctcgtgtaaatcgccatgttcttttcactgaacaaaaaatgaaataaaggttgaagctggtatgtagcagctattgaaatcaatgttactcctaggttctgtttctcgttgacaatatcaaattttgcaaaagctttgaataaattgacgtgtgtttctaaaaaaaaaaaaaaaaaaaaaaaaaaaaaaaaaaaaaaaaaaaaaaaaaaaaaaaaaataaaaaaaaaaaaaaaaaaaataaaaa

SEQ ID NO: 258063 - DNA, 368 bp, Gossypium hirsutum
ccttcttttccgcctgaaactagaattatggcacaggggctgaagccttcttctgatgcatctagtaggtctgtgttaaatagcacaggaaatataagatctcagggcaagtgttctgcagagaacaagatcaagtctcaggatgctcatgttgaaactttaaagatactggaagaagaaatggctgaattgactaccaaaggaagcagaactagctcaccaaatcgccgttttagtttcagcttaactcgtctgagtagaagtttcagttttaaggaaagttctgcagtcccacaaatgaaccccggttatgtttctgtcaagtctggcccagtgaggtctgattcttctggttttctggatgatat

SEQ ID NO: 258064 - DNA, 354 bp, Gossypium hirsutum
ccttcttgtccgcccacgcgtccgcagttcttcagaggattgcaacaatagcaagtggtggaaagaagggaatcccacatgagacgcgtaacacatttttagtagtcacagtgctaattataacagccacatacactgccactttgaaccctccaaagcagcctgataccatttcaaattcccagaatttccatctcacgtatgacatatctttaggttcaaccagcactggacccgtaccaagtcctccacccgctgaagaaaaaaaaatagaaaatatactagacgtgtccacaatgttttggttatacaacactttaaccttttgggcaacaactgttttaacagcgtatc

SEQ ID NO: 258065 - DNA, 252 bp, Gossypium hirsutum
ggttttgcggtgctttcggtttcggccggatctatgggggtatgcaatataagtatgggggtctcgggctacgtactacgttaaaaacgttacggattattggacatgagagagagagagagagagagagagagagagagagagagattattgtttattgatgtgtggttgtaatagatttatgtttcattttgtggggttattggaaactctttgagctttggaccatcctctaaaatttagtgctatagt

SEQ ID NO: 258066 - DNA, 397 bp, Gossypium hirsutum
cctacgcgtccgaatctttcccttttgctttcaagttgttcttcttcttcttctccccctcctcctctctccctccattctatcgaattctcaagcttccaatggaaacgttagcttcttcttctcttcgtacgaccctcggcggcggcgctggtggcggattactcaatttttgtggcggtggctccgtctctgttcttggcttccctcttcaacatctcaagattcaatcccttcccgattcgaagaaaaagcagggttttggggtcataaaagcttctgttgctaagacaggaagttgcacttgtcagaataggcactagaggaagcccattagcacttcgcgcaagctcacgagacacgtgacaagctcatggcttcccatccggaactagct

SEQ ID NO: 258067 - DNA, 426 bp, Gossypium hirsutum
ttttcgcgtccgcaacaaacaagacaaccacaaaggtttcaacatcagttacaacaaaaggtaaagtgaaacgcaagcctataactgctttctttggcacctgcatgtgttgtgcaactgtgacaaattaatcaaataaacaccattgaagaccctttttttttccttttgtttttgcttgggttaagttgggttggttttattattattattattattattattattattattatttaattgaagctttgaaaaatggagttttgtgagagatgtgaattgtaactatggttgtattttttttctcccttttttgggtttcttattgaatttgtataaaagatgggggtttgatgatgtaaaagtaaaacttgggcaatatttatttttgctgcctttgattgtaatatttgcttaatttatatg

SEQ ID NO: 258068 - DNA, 379 bp, Gossypium hirsutum
  unsure (1)..(379): unsure at all n locations
tctttgtctgtcggctcagaagccgacgaggtgcaggccgagcgccgccgtggccccgtcgctccggccaccgtacacggtggccagaaatcgcctcaggtacaagtgggcggtggcacagtggcggtgcttgcaggagatgtgactggggcggtgggatgggaccgatggcagaggcagcagcagtttggggggctagggtttattattttttgtgttaaggtttttttgggctgtaattgttttgggttgggctaggttatttgtttagtttgggtttgggggattttgggcccaaaattgggcttgtacacataccgaattgaataacttggtgacaggatgaaaattacattntatatatgaaataactaacttc

SEQ ID NO: 258069 - DNA, 403 bp, Gossypium hirsutum
ccctttcttccgagcaaccaaactctgaaatatgctgggccttattatataacattggggtcgattagtcctcttctcggtatcgctgccatggctgggttcgagcagccaataaaggagagagccaaggagctcaaggttttcttcaagaagggtgtgaagatcgtgggagaatcatgcaagaaaggttggtacaaagccaagcacatcaaaggctgattcttttgccttccatcatcttgcattctttgcgccttccatgtagagatctttgtcagtcatcttgatttggagggttttctataatttatcgaaggatcttatcctgtcttctgctgaggagttttacaagacgctagaagctctgtctaagaaagacgagcctaaagtcacctccggagat

SEQ ID NO: 258070 - DNA, 365 bp, Gossypium hirsutum
ttttaggacagctctggaagcaggacttaacccatgtcaaggacccacatctctcccagagaagattgacgaaaagacaaaagaagatctcaaggacatagctcggtcagaggcagacgtaagaaatttgaacaaaagggttaatgagctggggacacagcttaatcaccagcctgagcaaaagtctgtttccatgagtgactcatgcactcaacgtgaaccaaatcatcaaacaaaaatgaaggataagacaaagggtgctgaagctcctatgaggtcaagaagcaagaaggaaatgaaagtggacaaagcggaaggtgagaaagggaagaagcaagaatcatctatggcaaatagacatagga

SEQ ID NO: 258071 - DNA, 427 bp, Gossypium hirsutum
gttgccacacgtcctcttatcggtgatgtggtcactgctctctcgtatttagcaaatcaagcatacgatcctaatacaacagggaatggccatagaggctctggagaaaccgatgaaaaaagataccgagacgacagaggaggaagggtatcgaagaacgacgaaggaggagtatccggccgtaagggggatttagaagggtccgagaaagagaactcccctagagaaacagccaggatgttgaacagggatttggatagggaacgagctgtagccgaagccaagatgtggggcgagaattggcgagagaaaagacgacaaagcgcacaaggtagttccgatggttcaaacggctaacatcccgattttcttccatcaatgtttatccagatttctcacttgaaccagatgaaaaaaaaaaaacaca

SEQ ID NO: 258072 - DNA, 226 bp, Gossypium hirsutum
ttttatccagctaaattcctgaggaagctgggggaataagagatagcgtttggttcccagtcagccaccaattataccaaccttgcacaggtacatgctgctgagaatgcaaaaccctttgatgaaattgaatttgagaaagttcttcgcaagaagtttgcgaagagggatgaagagtatgactcaatgctgggcattgtccgtgaaactccaccagaactaattc

SEQ ID NO: 258073 - DNA, 245 bp, Gossypium hirsutum
tcttttcacgcgtccgcccacgcgtccgaggggatggaattcatctatgatgggaaaacatgtatagtttttttgtgtaattacttgtatggtatttattatctaatctgtgatttatcgagcttggatgttcatgccgtgaaacttatcagtggttagattctggtaatttgataaattagattaaattcatcgatgctttcctttggcacatagaaaaccggtttaccatcctcttcatttct

SEQ ID NO: 258074 - DNA, 338 bp, Gossypium hirsutum
ttcaagtaaagatatcatcttcaatcattgtgattttcccttctctcaattggctctgcccgaaaccctagaaattcaccctcccaatatcacaaaatcaaaagaacccccaattttctcaataaaaccctcccttttcccgagaaaatccttttcgatattaattaagaagggaattttaaagcccaatttcaggtttaaggaaattagaattttcttggggggcatatgtgggaaggttctattggaagcatcgaagccatcctcgtcgtcggcctcctccgttagcacgacaacgacttcgacgtccgtgacggagacagtgaatgggtctcacc

SEQ ID NO: 258075 - DNA, 289 bp, Gossypium hirsutum
ttttacgcgttcgcccacgcgtcctcccacgcgtgcgttttttcggaattgaggggtggggatagcagtttgaagcatgaagtggaggaaaataagctgacctcgcccagcaccaccaccaagtaagtacatttccaagtacatgtatcagcttatttcgacagtacgagtttcactaatatgttttgcatattttttttgttagaaagataagattttagtttttactttgttcaaagaattgtatttatgatcgtagaggtctgaattaatgactgacatgaaaaat

SEQ ID NO: 258076 - DNA, 390 bp, Gossypium hirsutum
tcttataatcatgtttgtgttgttataggtcttggtaaattgtttgattaagtaagaccatgattatgttatatacttgcattacaattgtaaggcaactaatgaattaattattaatcgtatttaaattgtaattaattgacacaatacttaatcagttcatgtttaatcttctaaggtagctgagggttaaattagcgacggtattaaacggtatattagccttgtataacttgcaagattattgtgattaaactgtttcaatgtaggaatatattgttacttcacttaatcttttacttgcttatttaaattgattaattatttgaattggttttgtaatatattcaagagattagttaatttagtaagtttgtatgtgctatagtt

SEQ ID NO: 258077 - DNA, 364 bp, Gossypium hirsutum
ttctttctagatcgcgacggacgcccttttgggggttttttaactaggaacggggtaacctacacctaccttactacgacttacaccaagctaaatggtggcattggacgatttgtactattataggaaaaattcatagatacatttaaattatctattactaacgtctgctttcactattttttaaacttttaaatcacttaaaaaattaaattcttacattatttaagaataattattaaaaaaaagtggggcaattaaatctttcaacataggggttagaagcccgtattcttttactatataaaattaattaataaatttttaattaaatacaaccttatatatattttataaggagcat

SEQ ID NO: 258078 - DNA, 392 bp, Gossypium hirsutum
tttaaggagtccgtgacaaggtggagatagggggatgactgttgaagacccaaggaatgcattgtggtgaaaaactgtgtattttttttatttattttctagaaatagaaccatggaaaccttggctaataattttattttaattacccatctccttatatatctgttttataattaatatttatattatgttatattataagtttgatatatatatgtatgagaagatccatagttgatcgattaaaaaataagaagtgtggtaatgagaaaatacatatgttctattattcatttacttctttaggttattcgattactgtgagaagtgtcataatgagaaggtgcatatctagcattggctctgacaagaaaatacttgatttttaaat

SEQ ID NO: 258079 - DNA, 348 bp, Gossypium hirsutum
tttggaggtggaggcggagaaagcagagcgggagcagtggcttggttggagaggcggatgcatcaccttaaagaagagacgacgatggttgaagctcggttagagaggatgtggcatgagcatgctgctttaaaagcacagttaaaagaattggggtatccgaagaagcataatagataaaattcttacatgtatagtctttttttacgaaggagtatttttcatagtaaatcatgaaaaatcagacatgcatttcatataattagtatatgtatgtagaagtctgtaattgaaatcatataaactgtttggttgataatgaatgaatgaaataggggttggaattca

SEQ ID NO: 258080 - DNA, 253 bp, Gossypium hirsutum
tttacgcgttcgaaggttatccctcttagggtgccccgtctgttaccaatgacttgtagtagaagatcttacatttcagttcgtagaagttgctttcttcatttactcatcagtcagcaagtataaaagagaaggctcgaacaaagactgcaaaaatgtcttgccaattgcaacaacatgttgagtgttgaatttgaagatgataggaaagtttcttaccacaagaaggttgtttttctttttttttgccggg

SEQ ID NO: 258081 - DNA, 285 bp, Gossypium hirsutum
ttaattttcaattaaggtttccatggttctggggctagaaaagtaaatgaggggcaaaaaaaaaatacatagtttttcgccataaggcattccttatgtcttcgaccgccatcactccatcttctcctcgtcatagtatcctttttggaaaaattacatttatatcttatgctcgttttttactcacaagaattctaaaaaataaaaataatcctacatagagattacagtctatgatctatttcttaagaaccacaaccttggaaaaaaaaataattatataac

SEQ ID NO: 258082 - DNA, 252 bp, Gossypium hirsutum
tttaaaagaagcaaaaggccaacaatgtgggggggaaagaagagataaaggtgctgcatcaaccaaaagccagcagggtttcgccattctcagtaatatcaaggagcagcagttttgacagtctcataagtgggtcatctagcagcggtgaagggagcaaaggaaccaatgatgcctatgtttttgatattcctagctattggtccgactttgcagctgatactaacctagaatttcctgacgctgaggcgt

SEQ ID NO: 258083 - DNA, 292 bp, Gossypium hirsutum
ttttaatctcaatctgtttcagtttacaactgtggggttcaaggttgtgttcggggtaaagcatgagcaagaagaaggagacttggaaaccaaaaacgaagagttttaaagcaagggtccatcggattaaactagatataggaaagataaaggaagatcaaagatgcataagagatgaacaaagggatatacgagaaaggtttgaagatgttaatcggcaatgcgatgcgctcagactggaaactgaagcgattgtgaagcaatcagctttgaatcggattcgacttggtat

SEQ ID NO: 258084 - DNA, 192 bp, Gossypium hirsutum
ttttgacgcgtgggcttttgagagcgtatgggggtgacacctatgaaataaccggcaaacaaattcaaatgtaagtacttacttttcatttcacttaaaattctcatatctaacacatacttgggcattatcatatgggatataattttttaaagatcaatttctgtaaatatgattatctaattgtcattt

SEQ ID NO: 258085 - DNA, 274 bp, Gossypium hirsutum
  unsure (1)..(274): unsure at all n locations
tcnagaacgatgttcttgcatccttatancgacctttgacagatggctaggatgcaaactatgtgcccttgattcaaagtgatgggaatgtgaggcatcttgctggaactaccagcaggaagagaacaaggaaagggaacaacaaacaaggctaaagtgctgctccttatatatatatatatgttcattttctaatttggtaagtcaaaatatatgatgggctttcttggatttgtgaatgttttaatggagtttacgggtttacagttcatgg

SEQ ID NO: 258086 - DNA, 386 bp, Gossypium hirsutum
ttttacggaccctgcgccagaactttagtggggtcgtctaaagattggaacttagccaaaaagtatccattttcaatatccatgagatggaatggcttggcagtgttccaaagactgctaatacgattgttaagagcctcatagccaatgtttcttcctagtaatttcaatattaccgtgagttccatctctttgactaaaatattttgaatccgttcagagaagtcaatggaaggaataccattaacaacagatctgtgaatgtctccttctaaaaactcaagatcttcatcaacatctagactagaagacccatcttaccaacgtctattcctccagaattggttcctaaaagtttatccttccaggatatctttaggctcgat

SEQ ID NO: 258087 - DNA, 318 bp, Gossypium hirsutum
tatatttgttgttgatggaaatgaaaatgagagtgatgttagggaattaaggttgaaatttaacagtatggatgatttcatcgatcattctatttgagttgctatagaattgaaaaccatgtgcagttcagatttagggaagtcattgatatcatagaacacaagtttatgatttgttgaactcggaatctgctatccacaatatcacttgcttttctccattttgttccagtaaaattttgggacttaattcaattactttcatttcttcatcttcttttctattttgcattaagtgtaatcttatatttatgaaaa

SEQ ID NO: 258088 - DNA, 332 bp, Gossypium hirsutum
tgctctctcgtccgcccacgcgtacggccattggtggtttaataggacttgtttgttcagggactgttttagcacaagaaaactcaattgggtgtttatgtaacttggtttctaatgattctaagttaaagcttttgattgttaaggaaaatgggattgattgtttgaagaatttcttggattcatctccaaatccaaaaagtcttgaagttgctattgaattcattaggcatttagcttcttttcctcctattgcagaagctttggttgctgatggtttcattgcccgtcttgtatctgctttgaactgtggggttttaaatgtaagaatt

SEQ ID NO: 258089 - DNA, 369 bp, Gossypium hirsutum
tgtccacgcgtacgcctaactttgtggatactgggttcacctacaactttccaaggccaacagcaccacctggtgcgcaaaggacatccttgaattagccgcgaatgaggtggttcatccctaaaggttcgtgctttgtattctacagctaccatatttgtggatgcagctgtcacaggtatttgaatgtcatatcatatttgttcaggcatacttgtctctgagtgatctgatcattatgtgttattgtgtttaatatatttaattatttatgacagattagatctatatgtatagagcgaaagaaagatggttgtagaatataggtgatttccatttcacagctaggcttagattgcctttcttttt

SEQ ID NO: 258090 - DNA, 383 bp, Gossypium hirsutum
tctcccacgcgtccgcccacgcgtccgataagtgccaacaatcttaattttacggacccagattccggccactggtccatcggaatctgatccttcaatttttatttttatttattgttttacctttttaccctttaccaattttcccgcttattattttacccaaacaagtataaccccgttttctttaaaaaaagactagtggaaaatacggggcccctgttttatgtatttatttatatatttgtagtagattatttggtggtgacgtggcatgctccaaataaggcgcaacaatgaacaccaaaacgatgcgtctccctccccgtcgggtgcccgattccatgcccaacaacaaacgaaaagagagagacggttttgac

SEQ ID NO: 258091 - DNA, 309 bp, Gossypium hirsutum
  unsure (1)..(309): unsure at all n locations
ctcacgcgtccgnccacgcgtacggttggggggcacctgctagacgttccttgttttaaaaaaaaaaaaaaccaaccctttaatcttcccttcatataattcccattatatatgcatacatatttacacatacacatacatatatatgtatgcatgtgagtaccttcatcttttcaattgtagggtacccttttaacgtaagagggcatgcaagcaagagttgcaccaaatcaaaactatattatgtatgcatgcatgtatgtatgtgtgggttcatgtttgagtgttttgaagtgtgatgggataata

SEQ ID NO: 258092 - DNA, 225 bp, Gossypium hirsutum
tttcccaaaaaaataccaaaagaaaattgggggtgatgtcaatagggtaatgtgttttttctctttttatacctaccttcactcctatatgatctggaattacagtggttaaactatttgtatgtatgtcttttaccctcctttatgaacccttttagcaaacatggtactaattgctggactaatttgtatttggcaataaactcgagtttatacattttgaat

SEQ ID NO: 258093 - DNA, 255 bp, Gossypium hirsutum
gaaaacaagcagaccaaaggtctccggggtcccccaaaagtctcattcggtccgccgctcaaccattgtttcaccaccttatcaatgggtgaaggcgcacaaaggcgccttaatgctctccggttggagcctagcctcaaaggccgttgattttagccccaaaatcccatcttcgactttgatgtcaacgaaggagatgaggatccctacggctcgtatgccaaggtactggtgcgtgtacggggatcgtgctgg

SEQ ID NO: 258094 - DNA, 208 bp, Gossypium hirsutum
gagaggaaagagatcacgatgaacgaggaggtgcccgacgagatgatgactttggaggatttcttggcgaaggccggtgcagtggaggaagcggcggccgttgcgtcagcggaggttaagttgcatccggatagattgagtggtggagtctacacgtttgatccggtgggagggggtgcgtttcaaattctggataagatggaggggt

SEQ ID NO: 258095 - DNA, 158 bp, Gossypium hirsutum
ttttctgctaatttcatgtacaatattgaagcggctgatattatttgcccttgaaattccaaaactatataatgacaacatttcttacaagtgtgcttatatatatatatatatatatggaaaaacagtctcttttcttgtacatctttttggtattt

SEQ ID NO: 258096 - DNA, 213 bp, Gossypium hirsutum
tgtgtcctgtcagtcttctccaatgcaagcatggggtgatgttaagaatgacctggtgtaaggaacttgatcatctgaagaatgcatttgaggctgagctataaaaacattcaagggacttttaatgcctgtttgaggtgctgatacctttccggcgcctttttggtctgattttaaaaagaaaagaaccgttatctttgcgacatttttctt

SEQ ID NO: 258097 - DNA, 383 bp, Gossypium hirsutum
gtattctgttaccaatgatgcaggcggagggtgtcacttgactatgggagcgggtctttcaagggttcttaggggtggtcctagctgtagtgccaatctacctattccatcccaaatcaactatccagttccaggagggtttactatatccggactaaatttaaatcttggaggaggctccacgcagcctgtgatgcgaccaatgcaaccttcccaacctccaccaatgctgcagcaccaagacgttacgccctctttgatgaacaccgctacttttggcgcggagggtggctatggtgcatagatcaccactcagaatgcaaatgggccgaccaacagatacttgagcatggaccattgcatggacttggataactattggc

SEQ ID NO: 258098 - DNA, 470 bp, Gossypium hirsutum
ttaatttgaaagttttcgtgatgatgaaaaacagaaaatgacttctgctttgggtgaactggagtctcaaagggatcaagcacgacttgctcatcaacaagctcaacgggagtgtcatcaaaaggtggaggaactcccttgttctattcgcttaatagtatgagcaatggtaaaaataccaagaaggctcttgaactagttgttggattgttgtttgccttatttattaaaaagaatgggtaaattagtccctatgcattagattaaagagcaaactagtcttttttgttaaaaatttcattctttaatgttaaaaactgatgtggctgacgaaataaccaaatagatacatgtctgaggtaagagatttgtttgtttttaatagtaaaaatgaatggaatttttaacagatggacaagtgtgctctttaatcttacatataaggattaattttaaaaggggcaaaatgc

SEQ ID NO: 258099 - DNA, 156 bp, Gossypium hirsutum
tttcattatatgtaattttactcactaaaacatatggtttcgtgataacagtacggataccgaggtcactccgacgtagggacgcactttccaagctctgcattcgaccggggtgatgcactctatagtgctggttccctacgatctgggttggat

SEQ ID NO: 258100 - DNA, 334 bp, Gossypium hirsutum
tgagaattatagggttcctggaatggtgaaccaggcctcagattggccactgctgtcaccaccagtcatgcccctaacaagcacaaaccaagatctttatcttagagaccaagattccatcaggaatatacttgtcaaactaggaggaagattctcggatgatcatccacaatcaagcaccatatccaccaccaccaatccaatgaattttcgatacccttttgatgtttatttttctcaagatcatcagctatacgaggattccatgaacatactttcatctgcatcttccattagtcccttaaacagtacttgttctcaaacaaacagtact

SEQ ID NO: 258101 - DNA, 111 bp, Gossypium hirsutum
ccctcacttgcttcaggacatgtattcagagtttgtggccaaactggtgtttatcaacgttccatgatggaacttggctctcaacatgatgattagtccttggctaacgca

SEQ ID NO: 258102 - DNA, 446 bp, Gossypium hirsutum
ttccacgcgtccggccttaagagttatttgggaaatgtgtgggcatcggaacggatacagaggtgtgggaaaagctttgcagagttcaacaggaaagagggcttttggcatggaatatgaatcagattggactaagaatagagtttcatcggcatttacagctcaagtcatccgttctgctacatcacttatgccttggagttgtaaaatccctataggtgatggatttcatgagtttctttaattagttgactagcatttatattgacgcattcttttgggaaaatatatttgtaccgcatacgagaaccatctagaaaaaaatgcctggttttgtgagagaaaagaagagaatcacagaacccaatatgtgtctcagctccccgcttatgcaagatcattcaaaaggcaatcaccgttcaccctctcaggctactgatgaaata

SEQ ID NO: 258103 - DNA, 375 bp, Gossypium hirsutum
ttccacgcgtccgcccacgcgtccgagatcgcgagcggccgcccttttttttttttcttaaatagatatgagaagagaaaaaaaaagagaatacacaagagaaaaatatatataaaatcaaaagagccacgaacaccttttagtttccaaactcttttgatttgcttgtatgcgctttgatacctaacatatgtgttacatacatactttttgtgagaaaaaaatcttttttacaatccgcgcctcccgtttcgttttgactccttcttgggtctatagtggattacactagtagaaaaatattgtgtttctttgtgtctaccactgtgcgtgtgttgtgtcgggtttctgctccttgtgtgtgttttcttttgc

SEQ ID NO: 258104 - DNA, 398 bp, Gossypium hirsutum
  unsure (1)..(398): unsure at all n locations
taaaaaggtcatctagagcctgagagaaagattggtggaggggtcaaagctttccaaatccgtaatcatccccagtggaagagtaaatgtttctttgtgattagggatgatgaaactatggatgattttagcttccgcaagtgtattgatcatatccttcccttgcctgaagatttgaagggaaagagcaattcaaacagggcatcgggtggcggtggcagttggagaggacgtggtgggaaaggaggcggacgaggccgtggaaaaggtggtaagtcaagaaactaaggtggtagtagtagttaaggcagtctgaattttggattaaactctttggtaggaccagaactgctnttgtttgattatatatctgaccctaaagttccaaattgaattgc

SEQ ID NO: 258105 - DNA, 386 bp, Gossypium hirsutum
tcagaactttatgtctttgcatcttctgattgtagtatgtattataagtgcatgggatgttatatttgaaattcaaatctatgttgcttggattcgagtgtgagtgttgaagatagggtatgtgaccgatactattatttagagtgtccttggtggatcttatctctatacccatgtttgcatatatgttggatacaagtaccaggacatggatacttaaaggaaaaatctgttcttgactcagtgaactggttagggttctcttatacaatctgtttcttgcttttttgtcactatcattcattattttgaagctgatttaagatatcatcaccttgtggatcaccacaggttttcatttttgtagctgctgagtatgaaacaag

SEQ ID NO: 258106 - DNA, 166 bp, Gossypium hirsutum
tgactagttctagatcgcgagcggccgctcgggatctagaactcgagttctttgtttaagaataaggatcttttaagatacgcctgatcacattaaataagccgatccccgtctcagtctttcgatcatatgaggctgattgaccttgtttgagcctagtgagttg

SEQ ID NO: 258107 - DNA, 267 bp, Gossypium hirsutum
tcctcacgcgtccgcccacgcgtccgcccacgcgtccgaagaaataaaaagaacacctttcgaaactttctcctttcgattctctgatatctcgtttgtattcgttgtgttcaatcaatctttgtttcttccccaaaaatcccccttgacaaattggtttcgattcggttttataactgattacagtagaaaaaaatcgctactatttctcagttgctgctgctatctttcgctgtttgttgtgctgttttcttgctgtttgcaggt

SEQ ID NO: 258108 - DNA, 278 bp, Gossypium hirsutum
tgacaccccattagttacagcagatgatgaagtaaaatcagtagtaaaatcaggtctttcccaagtttgttcattgtttgaaaacgagttgtcttcctttcttctcgttcccgacatcacagccgagaccgccgagactagaattttacagtgcctttcggatgtcgagtggatgtgcaacatactccccaaaatggatttaatgaaagactttgtttgtagttggggtggagatgtctagaaagattttggagatagttgaagacaagaaacttgat

SEQ ID NO: 258109 - DNA, 1146 bp, Zea mays
gaattcggctcgagctcgcgttcttcgtcgaggccacgcccggcaaggcgacgggcgccgccgccgctgctgacggcggcgacgacctgcacaacaccctccggctcacgcgcgacaacatcaaggccatcatcatggacgtgatgttcggcgggacggagacggtggcgtcggcgatcgagtgggccatggcggagatgatgcacagccccgacgacctgcgccgggtgcagcaggagctcgccgacgtcgtgggcctcgaccgcaacgtgagcgagtcggacctggacaggctccccttcctcaggtgcgtcatcaaggagacgctccggctgcacccgcccatcccgctgctcctccacgagaccgccgacgactgcgtcgtggccgggtactccgtgcccaggggctcccgcgtcatggtcaacgtctgggccatcggccgccaccgcgcctcgtggaaggacgccgacgcgttccgcccgtcgcggttcgcggcgcccgagggggaggccgcggggctcgacttcaagggcgggtgcttcgagttcctgccgttcgggtcgggccgccggtcctgccccgggatggcgctcggcctgtacgcgctggagctcgccgtcgcccagctcgcgcacgccttcaactggtcgctgcccgacggaatgaagccctcggagatggacatgggcgacatcttcggccttaccgcgccgcgcgccacgcggcttacgccgtgcctacgccccggctcaactgccccttgtactgacgccctgcacgtggcgcgcggggactgccattacgcatgcatgcgtttggactttggtgttcatccctggggtggggccgccgtgggggaagttaggagtttggtggctttctagctctgtcttcttgtattctgtttattataaattttcccaacccttccatgcctgatcgatgtgcggtaataattgttagaaaatgtgacattttgtatgtaatcaatctatggggtgcaattgttatctcgtcaaaggacacaccactcgacttgcaccccttcatgtatatatatacatacacgaacatcccctgcaataaagaaatcgctgtcactttctttcgaactccaaaaaaaaaaaaaaaaagggcggccgc

SEQ ID NO: 258110 - DNA, 1216 bp, Zea mays
  unsure (1)..(1216): unsure at all n locations
ttttaagttaaaatnagctagcattcacaacggcggccgccctttttttttttttttttgcaagaactaattaactttcaaaaacttagcacatctcaggcgcaatctgaagcagcagtcatatctgagatcagaatgagaaggtttcttccccctctcgataatgtacacgcatgggcatggcacgttcttcacttcagaccctcacacacagctctttacccggtaaaatcaaagacggcagcagcgcatgacttggcatcgctgccggctgtggcgtccgtccttacaggctaggcgtcctctcggcggcgccggagatgacggtgagcaggttgttgccgaaggggtcgctgaggtgcttggcgaggttctcgacggggccttcgccggtgacgtaggcctggatgaagaaggcgaacatggagaacatggccagccggccgttcttgatctccttcaccttgaggatggcggcctggtcggggtcgctggccaggcccagggggtcgaagggcccaccggggtgcagcttgtcctcgaggtccagtccgttggtgatccggtagtactcggcgccgccgacgaggatgacctccgcgatcacggccaccaccaggttgatggggatgctgttgccgaagtagttgagggtgttgccgtccaggagcagcgcgccggtcttgaaccagacagcctcagggccacagttagcgccgaacttgttgcaggcctctgggatgacagcgccagcggcaccgagcatggcccatctggcatggatcagctcgtaggcctggtacttggcgaagtcctctggcttcttgcccaggccaaaagggtcgtagccatagtctccagggacctctccggtgaggtactccggcacctccgaccggtccaacagcccatccggcaggtagatcctcctgtcaggaccataccacttggcgagctcgtcgctgatgtctggagaagaggacgataccgcagcgggcttgggcttctgggcaggcttcttgctgaaaagggagacaatcttctgagcccccgcggtgggcgctgcggtggcgtagcgggaggagcccgcgaagttgagctgggtgcccagaatcttggatggagctagcgccgccattgtcggagacccacaattcagagaaagatttgcagcaaaaggatgcccccacgtcgccacggtccgcggacgcgtggn

SEQ ID NO: 258111 - DNA, 544 bp, Zea mays
  unsure (1)..(544): unsure at all n locations
ttantttttttttttttttttttttttacgctgcagcagtgatatcacaatcagaatgaaaaggtgtgttccccctctcgataatttacacgcgtgggcattgcacattcttcagaccctcacatacagctttttatcccggtaaaatcaaagacggcatgcagcagcgcatgacttggcattgctcggcggcgtggcgtccgtccttacaggctaggcgtcctctcggcggcgccggagatgacggtgagcaggttgttgccgaaggggtcgctgaggtgcttggcgaggttctccacggggccttcgccggtgacgtaggcctggatgaagaaggcgaacatggagaacatggccagccggccgttcttgatctccttcaccttgaggatgacggcctggtcggggtcgctggccaagcccagggggtcgaaggggccaccggggtgcagcttgtcctcgaggtccagtccgttgatgatccggtagtactcgggccaagggttcgcggaaggcttggttcgacccgggaattccggaccgg

SEQ ID NO: 258112 - DNA, 584 bp, Zea mays
tttgtatatgtaccaactaaaatgtaaaacctttgttaaaataaaatgctactacttctgaagtatgacatgcaggaccttgaaccagacggcctcggggccgcagttagcgccgaacttgttgcacgcctctgggatgacagcgccagcggcaccgagcatggcccatctggcatggatcagctcgtaggcctggtacttggcgaagtcctctggcttcttgcccaggccaaaagggtcgtagccatagtctccagggacctctccggtgaggtactccggtacctccgagcggtccaagagcccgtccggcaggtagatcctcctgtcaggaccgtaccacttggcgagctcgtcgctgatgtctggagaagaggacgacaccgcagagggcttgggcttctgggcaggcttcttgctgaagagggagacgatcttctgagcccccgcggtgggcgctgcggtggcgtagcggaaggagccggcgaagttgagcttggtgcccagaatcttggatggagctatagccgccatcgctgtataaccccaccccctccacccacattttggcaccggatgacaaa

SEQ ID NO: 258113 - DNA, 265 bp, Zea mays
cgctgatgtccggagaagaggacgacaccgcagagggcttgggcttctgggcaggcttcttgctgaagagggagacgatcttctgagcccccgcggtgggcgctgccgtggcgtagcgggaggagccggcgaagttgagcttggtgcccagaatcttggatggagctagagccgccatcgccggagacccacaattcagagagacttgccgcgggaggcggtggctgatgggggcttgtggaggaaaaggcgagctagtttaaat

SEQ ID NO: 258114 - DNA, 2062 bp, Zea mays
gaattcccgggtcgacccacgcgtccgcccacgcgtccggacacacaaacacaagtcgtcgtaggcagcgagcgtctctcctctcccacgcatcgcgccaaggaagagagagagatcgccgctccccttctcggcgtcggtggtgcgggtgccctccctcctcgagcgagatctgtctggtcacagatctatctgacaaaatggtgaagatctgctgcatcggtgctggctatgtcggtggcccaaccatggccgtcattgccctcaagtgcccagacattgaggtcgtcgtcgttgacatctccaagccccgcattgaggcctggaacagtgacaccctgccaatctacgagcctggtctcgatgatgttgtgaagcagtgcaggggcaggaacctcttcttcagcactgatgttgagaagcacgtcgctgaggctgacattatctttgtctcggtgaacacccccaccaagacccgtgggcttggagctggcaaggctgccgacctcacctactgggagagcgctgcccgcatgattgcggatgtctccaagtctgacaagattgttgttgagaagtccactgtccctgtcaagaccgctgaggctattgagaagatcttgacccacaacagcaagggcatcaactaccagatcctttccaacccagagttccttgcggagggcactgccattgaggacctgttcaagcctgacagagtgcttatcggtggccgggagacccctgagggcaggaaggccgtccaggctctcaaggatgtgtacgctcactgggttcccgaggacaggatcctcaccaccaacctgtggtctgctgagctctccaagctcgctgccaacgcgttcctggcacagaggatctcctctgtgaacgccatctccgccctctgcgaggccaccggcgcgaatgtgactgaggtggcttacgccgtgggcaaggacacgaggattggccccaagttcctgaacgccagtgttgggttcggtgggtcttgcttccagaaggacatcctgaacctggtgtacatctgcgagtgcaatggcctgcccgaggtggccaactactggaagcaggtgatcaagatcaacgactaccagaagagccggttcgtgaaccgcgtcgtgtcgtccatgttcaacaccgttgccggcaagaagatcgccgtcctcggcttcgccttcaagaaggacaccggcgacaccagggagaccccggccatcgatgtctgcaagggcctgctgggtgacaaggcccagatcagcatctacgacccccaggtgacggaggaccagatccagcgggacctagccatgaacaagttcgactgggaccacccgatgcacctgcagccgacgagcccgacggccgtgaagcaggtgagctgcgtgtgggacgcgtacgaggccaccaagggcgcccacgggctgtgcatcctgaccgagtgggacgagttcaagaccctggactaccagaagatcttcgacaacatgcagaagcccgccttcgtcttcgacggccgcaacatcgtcgactccgagaagctgagggagatcggcttcatcgtctactccatcggcaagccgctcgacgcctggctcaaggacatgcccgcggtcgcctaatcccacccccctcacccatggattggattccgggaaggaagaggagagaagctggttgaccgttctttattacagtttgtttttgcaggctacgctaccgattttctcttgtgtcaggcataaaaaaaggttggacgggctgctagtattccctgctgtttggtgttttcgtatcggaggacgtctgtagatgtacaattcctcaggccccttgtgttcggcttgaggaagtttccgttgtaccctggacctgctatagccggttgattcttcaattgtattcctaaaagttactacacaaaaaaaaaaaaaaaaaaaaaaaaaaaaaaaaaaaaaaaaaaaaaaaaaaaaaaaaaaaaaaaaaaaaaaaaaaaaaaagggcggccgcaatgatcataaatccaagggcggggcccccg

SEQ ID NO: 258115 - DNA, 1742 bp, Zea mays
gaattcggctcgagactgaacagatcagatctggagaaactgcgagagccggctgaagttgacgtcgctcctgttcaggccatcacgtcaagcaaccggtcacagatctatctgacaaaatggtgaagatctgctgcatcggtgctggctatgtcggtggcccaaccatggccgtcattgccctcaagtgcccagacattgaggtcgtcgtcgttgacatctccaagccccgcattgaggcctggaacagtgacaccctgccaatctacgagcctggtctcgatgatgttgtgaagcagtgcaggggcaggaacctcttcttcagcactgatgttgagaagcacgtcgctgaggctgacattatctttgtctcggtgaacacccccaccaagacccgtgggcttggagctggcaaggctgccgacctcacctactgggagagcgctgcccgcatgattgcggatgtctccaagtctgacaagattgttgttgagaagtccactgtccctgtcaagaccgctgaggctattgagaagatcttgacccacaacagcaagggcatcaactaccagatcctcaccaccaacctgtggtctgctgagctctccaagctcgctgccaacgcgttcctggcacagaggatctcctctgtgaacgccatctccgccctctgcgaggccaccggcgcgaatgtgactgaggtggcttacgccgtgggcaaggacacgaggattggccccaagttcctgaacgccagtgttgggttcggtgggtcttgcttccagaaggacatcctgaacctggtgtacatctgcgagtgcaatggcctgcccgaggtggccaactactggaagcaggtgatcaagatcaacgactaccagaagagccggttcgtgaaccgcgtcgtgtcgtccatgttcaacaccgttgccggcaagaagatcgccgtcctcggcttcgccttcaagaaggacaccggcgacaccagggagaccccggccatcgatgtctgcaagggcctgctgggtgacaaggcccagatcagcatctacgacccccaggtgacggaggaccagatccagcgggacctagccatgaacaagttcgactgggaccacccgatgcacctgcagccgacgagcccgacggccgtgaagcaggtgagctgcgtgtgggacgcgtacgaggccaccaagggcgcccacgggctgtgcatcctgaccgagtgggacgagttcaagaccctggactaccagaagatcttcgacaacatgcagaagcccgccttcgtcttcgacggccgcaacatcgtcgactccgagaagctgagggagatcggcttcatcgtctactccatcggcaagccgctcgacgcctggctcaaggacatgcccgcggtcgcctaatcccacccccctcacccatggattggattccgggaaggaagaggagagaagctggttgaccgttctttattacagtttgtttttgcaggctacgctaccgattttctcttgtgtcaggcataaaaaaaggttggacgggctgctagtattccctgctgtttggtgttttcgtatcggaggacgtctgtagatgtacaattcctcaggccccttgtgttcggcttgaggaagtttccgttgtaccctggacctgctatagccggttgattcttcaattgtattcctaaaagttactacacaaaaaaaaaaaaaaagggcggccgcctgcatagtagc

SEQ ID NO: 258116 - DNA, 1660 bp, Zea mays
ttcctttattgcccagacattgatgttggcggaggggtcattttcatgaacgggaaggtggcttgaattcggctcgagctcccgatctacgagcccggcctcgatgatgttgtgaagcagtgcaggggcaggaacctcttcttcagcactgatgttgagaagcacgtcgctgaggctgacatcatcttcgtctcggtgaacacccccaccaagacccgtgggcttggagctggcaaggctgccgacctcacctactgggagagcgctgctcgtatgatcgccgatgtctccaagtctgacaagatcgttgtcgagaagtccaccgtccctgtcaagaccgctgaggctattgagaagatcttgacccacaacagcaagggcatcaactaccagatcctttccaacccggagttccttgcagagggcactgctattgaggacctgttcaagcctgacagagtgctcatcggtggccgggagacccccgagggcaggaaagccgtccaggctctcaaggatgtgtatgctcactgggttcccgaggacaggatcctcaccaccaacctgtggtccgctgagctctccaagcttgccgccaatgcgttcttggcacagaggatctcctctgtcaatgccatctccgctctctgcgaggcaaccggagccaatgtctctgaggtggcttacgccgtgggcaaggacacgagaattggccccaagttcctgaacgccagtgttgggttcggtggctcatgcttccagaaggacatcctgaacctggtgtacatctgcgagtgcaacggcctgcccgaggtggccaactactggaagcaggtgatcaagatcaacgactaccagaagagccggttcgtgaaccgcgtcgtggcctccatgttcaacaccgtcgccggcaagaagatcgccgtcctcggcttcgccttcaagaaagacaccggtgacaccagggagaccccggccattgacgtctgcaagggcctgctgggcgacaaggcccagatcagcatctacgacccccaggtgacggaggaccagatccagcgggacctggccatgaacaagttcgactgggaccacccgatgcacctgcaaccgacgagccccacggccattaagcaggtgagctgcgtgtgggacgcgtacgaggccaccaagggcgcccacggggtgtgcatcctgaccgagtgggacgagttcaagaccctggactaccagaagatcttcgacaacatgcagaagcccgccttcgtcttcgacggccgcaacatcgtcgacccggagaagctgagggagatcggcttcatcgtctactccatcggcaagccgctcgacgcctggcttaaggacatgcccgcggtcgcttaattcgtctgaggattcttaaaagttggacggcgctgctagtattccatgtttcgtgttttcatattggaggacgtctgtagatgtaaaaaatcctcgggcgcttgtgctcggcttgaggaaatatgcttgtacggttgtaccctggacccgctatagctggttggttcttcaagttgtgttcctatagaagccaaagttactacacgatcgatatgttctttttgcataataacaatacttgtctcacgtttaaaaaaaaaaaaaaagggcggccgcc

SEQ ID NO: 258117 - DNA, 717 bp, Zea mays
cccacgcgtccgctggccatgaacaagttcgactgggaccacccgatgcacctgcaaccgacgagccccacggccattaagcaggtgagctgcgtgtgggacgcgtacgaggccaccaagggcgcccacggggtgtgcatcctgaccgagtgggacgagttcaagaccctggactaccagaagatcttcgacaacatgcagaagcccgccttcgtcttcgacggccgcaacatcgtcgacccggagaagctgagggagatcggcttcatcgtctactccatcggcaagccgctcgacgcctggcttaaggacatgcccgcggtcgcttaattcgtctgaggtgctccattggattggatccggggaaggaagaggaactggttgaccattcttcattacagtttgttttttgcaggattcttaaaagttggacggcgctgctagtattccatgtttcgtgttttcatattggaggacgtctgtagatgtaaaaaatcctcgggcgcttgtgctcggcttgaggaaatatccttgtacggttgtaccctggacccgctatagctggttggttcttcaaattgtgttcctatagaagccaaagttactacacgatcgatatgttctttttgcataataacaatacttgtcgaaaaaatccaagacccagactgaaaggaaccccggatgatcaagataactattttttaattccaatct

SEQ ID NO: 258118 - DNA, 483 bp, Zea mays
  unsure (1)..(483): unsure at all n locations
cgagatgnacacacaacacaactcgtaggcagcgagcgtctctcctcttcctctcccacgcaccgcgccaaggaaggcagagagagatcgccgctcctcttctctccgtcggtggtgcggttgaccgccctcctcgagcgagatctcgctgcagtccctcgagatctggtcacagatctatccgacaagatggtgaagatctgctgcatcggtgctggctatgtcggtggcccaaccatggcggtcattgccctcaagtgcccagacattgaggttgtcgttgttgacatctccaagccccgcattgaggcatggaacagcgacaccctcccgatctacgagcccggcctcgatgatgttgtgaagcagtgcaggggcaggaacctcttcttcagcactgatgttgagaagcacgtcgctgaggctgacatcatcttcgtctcggtgaacacccccaccaagacccgtgggcttggagctggc

SEQ ID NO: 258119 - DNA, 470 bp, Zea mays
cccacgcgtccgcccacgcgtccgcccacgcgtccgcccacgcgtccgcgcacgcgtgggggctgctgagctctccaagctcgctcccaacgcgttcctggcacagaggatctcctctgtgaacgccatctccagccctctgcgacgccaccggcgcgaatgtgactgacgtggcttacgccgtgggcaaggacacgaggattggccccaagttcctgaacgccagtgtcgggttcggtgggtcttgcttccagaaggacatcctgaacctggtgtacatctgcgagtgcaatggcctgcccgacgtggccaactactgcaagcaggtgatcaagatcaaccactaccagaagagccggttcgtgaaccgcgtcgtgtcgtccatgttcaacaccgttgccggcaagaagatcgccgtcctcggcttcgccttcaagaaggacaccggcgacaccagggaagaccccggc

SEQ ID NO: 258120 - DNA, 495 bp, Zea mays
tcgtgggtcgatccacgcctctagagtatgtcgtactacatgcaaagacccgccttcgtcttctacggacgcaacatcggctacccggataagctgagggacatcggcttcatcgtctagtcgatctgcaagccgctcgacgcctggcttaaggacatgcgcgcggtcgcttatttcatccgagtttgtttttttgcaggattcttaaaaaaaggttggaccgtgctgctagtattccctcctgtttcgtgttttcgtatcggacgacgtctgtagatgtacaaattcctcaggccccttgtgttcggcttaaggaagtttccgttgtaccctggacctgctatagccggttgattcttcaattgtattcctaaaagttactacccagtcgatatgttccttttcttttttgcatagtagcaatacctgtcccacatcagtcccagtaaacatgcgctgctgttaaggaaatgcgtgcagggcattttctttgtt

SEQ ID NO: 258121 - DNA, 2650 bp, Zea mays
ggcggcggcgcgatcccgaagacatggacgccgacgtggcactgaacgacgaggcgaggcagccgctgtcgaggaaggtgtcgatcgcgtcgagcaaggtgaacccgtaccggatggtgatcgtggtgcgtctcgttgtgctcgccttcttcctccggtaccgtatcctgcaccccgtcccggacgccatcgggaattcccgggtcgacccacgcgtccggatctggttcgccatctcctggatcctcgaccagttccccaagtggttccccatcgaccgcgagacgtacctcgaccgcctctccctcaggtacgagagggaaggggagccgtcgctgctgtcggcggtggacctgttcgtgagcacggtggacccgctcaaggagccgccgctggtgaccgccaacaccgtgctctccatcctcgccgtagactaccccgtggacaaggtctcctgctacgtctccgacgacggcgcgtcgatgctgacgttcgagtcgctgtcggagacggccgagttcgcgcgcaagtgggtgcccttctgcaagaagttcggcatcgagccccgcgccccggagttctacttctcgctcaaggtcgactacctcaaggacaaggtgcagcccaccttcgtgcaggagcgccgcgccatgaagagagagtatgaggagttcaaggtccggatcaacgcgctggtggccaaggccatgaaggtgccggcagaggggtggatcatgaaggacggcacgccgtggcccgggaacaacacccgcgaccaccccggcatgatccaggtgttcctgggccacagcggcggccacgacaccgagggcaacgagctgccccgcctcgtgtacgtctcccgtgagaagcgcccgggattccagcaccacaagaaggccggcgccatgaacgctctgattcgcgtctccgccgtgctgaccaacgcgccattcatgctcaacttggactgtgatcactacatcaacaacagcaaggccatccgggaggccatgtgcttcctcatggaccctcaggtcggccggaaggtctgctacgttcagttcccgcagaggttcgacggcatcgacgtgcacgaccgatacgctaacaggaacaccgtcttcttcgacatcaacatgaaggggctggacggcatccaaggcccggtgtacgtcgggacagggtgcgtgttccggcgccaggcgctctacggctacaaccctcccaagggacccaagaggcccaagatggtgacctgcgactgctgcccgtgcttcggccgcaagaagcggaaacacgccaaggacgggctgccggagggcaccgctgatatgggagtagatagcgacaaggagatgctcatgtcccacatgaacttcgagaagcggttcgggcagtccgcggcgttcgtcacgtcgacgctgatggaggaaggcggcgtccctccttcgtcgagccccgccgcgctcctcaaggaggccatccatgtcatcagctgcggctacgaggacaagaccgactgggggctggagctggggtggatctacgggtcgatcacggaggacatcctgacggggttcaagatgcacgcccgaggctggcgctcgatctactgcatgccgaagcgggcggcgttcaaggggtcggcgccgatcaatctttcggaccgtctgaaccaggtgctccggtgggctctggggtccgtggagatcctcttcagccggcactgccccctgtggtacggctacggaggacggctcaagttcctggagagattcgcctacatcaacaccaccatctacccgctcacgtccctcccgctcctcatctactgcatcctgcctgccatctgcctgctcaccgggaagttcatcatcccagagatcagcaacttcgccagcatctggttcatctccctcttcatctcgatcttcgccacgggcatcctggagatgaggtggagcggggtgggcatcgacgagtggtggaggaacgagcagttctgggtcatcggcggcatctccgcgcacctcttcgccgtcttccagggcctgctcaaggtgctggccggcatcgacaccaacttcaccgtcacctccaaggccacggacgaggacggcgacttcgcggagctgtacatgttcaagtggacgacgctcctgatcccgcccaccacgatgctgatcatcaacctggtcggcgtcgtggccggcatctcctacgccatcaacagcgggtaccagtcgtgggggccgctcttcggcaagctcttcttcgccttctgggtcatcgtccacctctacccgttcctcaaggggctcatggggcgccagaaccggacgcccaccgttgttgtcatctggtccattctgctggcctccatcttctccctgctctgggtcaggatcgaccctttcatcgtcaggaccaagggcccggacgtcaggcagtgtggcatcaattgctgagctgtttattaaggttcaaaattctggagcttgtgcatagggagaaaaaaacaatttagaaattttgtaaggttgttgtgtctgtaatgttatggtacccagaattgtcggacgaggaattgaacaaaggacaaggtttgattgttaaaaaaaaaaaaaaaaaaaaagggcggccggcg

SEQ ID NO: 258122 - DNA, 1947 bp, Zea mays
gaattcccgggtcgacccacgcgtccgcccacgcgtccgtggattccagcatcacaagaaagctggtgccatgaatgctcttgttcgtgtctcagctgtgcttaccaatggacaatacatgttgaatcttgattgtgatcactacattaacaacagtaaggctctcagggaagctatgtgcttccttatggaccctaacctaggaaggagtgtctgctacgtccagtttccccagagattcgatggcattgacaggaatgatcgatatgccaacaggaacaccgtgtttttcgatattaacttgagaggtcttgatggcatccaaggaccagtttatgtcggaactggctgtgttttcaaccgaacagctctatatggttatgagcccccaattaagcagaagaagggtggtttcttgtcatcactatgtggcggtaggaagaaggcaagcaaatcaaagaagggctcggacaagaagaagtcgcagaagcatgtggacagttctgtgccagtattcaaccttgaagatatagaggagggagttgaaggcgctggatttgacgacgagaaatcacttcttatgtctcaaatgagcttggagaagagatttggccagtccgcagcttttgttgcctccactctgatggagtatggtggtgttcctcagtctgcaactccggagtctcttctgaaagaagctatccatgtcataagctgtggctatgaggacaagactgaatggggaactgagattgggtggatctatggttctgtgacagaagacattctcaccggattcaagatgcacgctcgaggctggcggtcgatctactgcatgcctaagcggccagctttcaagggatctgctcccatcaatctttcggaccgtctgaaccaggtgctccggtgggctcttgggtccgtggagatcctcttcagccggcactgccccctgtggtacggctacggagggcggctcaagttcctggagagattcgcgtacatcaacaccaccatctacccgctgacgtccatcccgcttctcatctactgcatcctgcccgccatctgcctgctcaccggaaagttcatcattccagagatcagcaacttcgccagcatctggttcatctccctcttcatctcgatcttcgccacgggcatcctggagatgaggtggagcggggtgggcatcgacgagtggtggaggaacgagcagttctgggtgatcgggggcatctccgcgcacctcttcgccgtgttccagggcctgctcaaggtgctggccggcatcgacaccaacttcaccgtcacctccaaggcctcggacgaggacggcgacttcgcggagctgtacatgttcaagtggacgacacttctgatcccgcccaccaccatcctgatcatcaacctggtcggcgttgttgccggcatctcctacgccatcaacagcgggtaccagtcgtggggtccgctcttcggcaagctcttcttcgccttctgggtgatcgttcacctgtacccgttcctcaagggtctcatgggtcggcagaaccgcaccccgaccatcgtggttgtctgggcgatcctgctggcgtccatcttctccttgctgtgggttcgcatcgaccccttcaccacccgcgtcactggcccggatacccagacgtgtggcatcaactgctagggaagtggaaggtttgtactttgtagaaacggaggaataccacgtgccatctgttgtctgttaagttatatatatataagcagcaagtggcgttatttacagctacgtacagaccagtggatattgtttaccacaaagttttacttgtgttaatatgcattcttttgttgatataatttatactttgtggagagttgctgacaaaaaaaaaaaaaaaaaaaaaaaaaaaaaaaaaaaaaaaaaaaaaaaagggcggccgc

SEQ ID NO: 258123 - DNA, 1839 bp, Zea mays
cccacgcgtccgcagggaagctatgtgcttccttatggatcctaacctaggaaggagtgtcggctatgttcagtttccccagaggttcgatggtattgataggaatgatcgatatgccaacaggaacaccgtgtttttcgatattaacttgaggaattcggctcgagtccaaggaccagtttatgtcggaactggctgtgttttcaaccgaacagctctatatggttatgagcccccaattaagcagaagaagggtggtttcttgtcatcactatgtggcggtaggaagaaggcaagcaaatcaaagaagggctcggacaagaagaagtcgcagaagcatgtggacagttctgtgccagtattcaaccttgaagatatagaggagggagttgaaggcgctggatttgacgacgagaaatcacttcttatgtctcaaatgagcctggagaagagatttggccagtccgcagcgtttgttgcctccactctgatggagtatggtggtgttcctcagtccgcaactccggagtctcttctgaaagaagctatccatgttataagctgtggctatgaggacaagactgaatggggaactgagatcgggtggatctacggttctgtgacagaagacattctcaccggattcaagatgcacgcgcgaggctggcggtcgatctactgcatgcccaagcggccagctttcaaggggtctgcccccatcaatctttcggaccgtctgaaccaggtgctccggtgggctcttgggtccgtggagatcctcttcagccggcactgccccctgtggtacggctacggagggcggctcaagttcctggagagattcgcgtacatcaacaccaccatctacccgctcacgtccatcccgcttctcatctactgcatcctgcccgccatctgtctgctcaccggaaagttcatcattccagagatcagcaacttcgccagcatctggttcatctccctcttcatctcgatcttcgccacgggcatcctggagatgaggtggagcggggtgggcatcgacgagtggtggaggaacgagcagttctgggtgatcgggggcatctccgcgcacctcttcgccgtgttccagggcctgctcaaggtgctggccggcatcgacaccaacttcaccgtcacctccaaggcctcggacgaggacggcgacttcgcggagctgtacatgttcaagtggacgacgctcctgatcccgcccaccaccatcctgatcatcaacctggtcggcgtcgtcgccggcatctcctacgccatcaacagcgggtaccagtcgtggggcccgctcttcggcaagctcttcttcgccttctgggtcatcgtccacctgtacccgttcctcaagggcctcatgggcaggcagaaccgcaccccgaccatcgtcgtcgtctgggccatcctgctggcgtccatcttctccttgctgtgggttcgcatcgaccccttcaccacccgcgtcactggcccggatacccagacgtgtggcatcaactgctagggaagtggaaggtttgtactttgtagaaacggaggaataccacgtgccatctgttgactgttaagttatatatataagcagcaggtggcgttatttacagctacgtacagaccaggggatattgtttaccacaaagttttgcttgtgttgatatgcattcttttgttgatataatttatactttgtggagagtggctgacagacgagttttgtatgctacgaaaaacaaagaaattagtttgcattctttcactttggtgcatctccatgagaaattaaaaaaaaaaaaaaaagggcggccgccg

SEQ ID NO: 258124 - DNA, 592 bp, Zea mays
cccgcccaccaccatcctgatcatcaacctggtcggcgttgttgccggcatctcctacgccatcaacagcgggtaccagtcgtggggtccgctcttcggcaagctcttcttcgccttctgggtgatcgttcacctgtacccgttcctcaagggtctcatgggtcggcagaaccgcaccccgaccatcgtggttgtctgggcgatcctgctggcgtcgatcttctccttgctgtgggttcgcatcgatccgttcaccacccgcgtcactggcccggatactcgaacgtgtggcatcaactgctagggaggtggaaggtttgtagaaacagagagataccacgaatgtgccgctgccacaaattgtctgttagtaagttatataggcaggtggcgttatttacagctacgtacacacaaggggatactccgtttatcactggtgtgcattcttttgttgatataagttactatatatacgtattgcttctactttgtggagagtggctgacaggaccagttttgtaatgttatgaacagcaaagaaataagttagtttccattccaaaaaaaaaaaaaaaaaaaggaaggccgc

SEQ ID NO: 258125 - DNA, 498 bp, Zea mays
tctttgcgttctgggtgattgtccacctgtaccccttcctcaagggcctcatggggaagcagaaccgcacgccgaccattgtcgttgtctgggctatcctccttgcgtcgatcttttccctgatgtgggttcgtatcgatccattcaccacccgggtcactggtcctgatatcgcgaaatgtggcatcaactgctaggatgagctgaagataattaaagagtggaactagacgcattgtgcatcgtaagttatcagtgggtggctctttttatagtatggtaggaacttggtcgggagacgttaattacatatgctatatgtacctccgctggtctttatccgtaagttaatatatatactgctttgagaattatgtatgggcaacaggttgtttacttgattttgtgtgtacatatttaaatgtctctgccaatatccaatgcattaaccatgaagtctccaaaaaaaaaaaaaaaaaaaaaaaaaaaaaaaaagaa

SEQ ID NO: 258126 - DNA, 548 bp, Zea mays
ttggtggccggcgacgaggccgacgccttcggggacctctacctcttcaagtggaccaccctgctggtgccccccaccacgctcatcatcatcaacatggtgggcatcgtggccggcgtgtccgacgccgtcaacaacggctacggctcctggggcccgctcttcggcaagctcttcttctccttctgggtcatcgtccacctctacccgttcctcaaggggctcatggggaggcagaaccggacgcccaccatcgtcgtgctctggtccatcctcctcgcctacatcttctcgctcgtctgggtcaggatcgacccgtttatcccgaaggccaagggccccatcctcaagccatgcggagtcgagtgctgagctcacctagctaccttcttggtgcatgtacggacgcccccgtgcgtttggacatacaggcacctttgggcccggctactcatgttcgactttttttttaattttgtacaagatttgtgatcgagtgactgagtgagacagagtgttgggtgtaagaactgtgatggaattcactc

SEQ ID NO: 258127 - DNA, 893 bp, Zea mays
ctttttacatttttccatcaccaacagaggaactgcgatttagcaagcgctgcgcaatgttgatgacctccatttttagattacttgttgtttctagacccgaagagtgtaggttctagtaattatttgtgcctagctctatattttttctttaaagaaaaaggaagaaaagcattagaatctttcacgctgaatttagaagaagctctatcatcaaacaattttttattgagaaatatttttccaaactttttcgagcagttctctaaaataaaccatggagctgagagttaaaaaaagcagcttcttctcatttagttgatgcatggaatcctatatgtgtcactgagtctactttaaagagttacagagaatcaatctctgatgatcaatgaatcaccatacacaaagaacacaagcaggaagagctcaaccaatctatctcttgctagctgctagggctattgtttccattttgcagactttgtgattcgtaaaattctttggttggtgcaaaatagaatttttctaaataattaaatatttatattgtcaaataaaagcaccagcaatggtacctccatgttcatgtttataattatctgtgattcttacatatttcaattactatgcttatttgttaaggttaagaagtattatcatgtgacctgccttttgtccacctgcactgcttgttcgtagatgtgcatgcttgtccctcttgcactgcttgtctgttacctgcagcaatctttgccaaacggacacagggaacctatgcccccacaggattgcacaacacgtgggataggtaatgcaggtattgcccccgtggctgtggctggcccgtgtgcaattactaggctgccaaatgagccctaaagccccagcat

SEQ ID NO: 258128 - DNA, 1799 bp, Zea mays
gaattcccgggtcgacccacgcgtccgctctctcccagatccgtctcccggcgtcagacgcgcatctccagcaatggcggacgagaagcttgccaagctgcgcgaagccaccgccggcctcacgcagatcagcgagaacgagaagtccggcttcctcagcctcgtcggccgctacctcagcggcgacgaggagcacatcgagtgggccaagatccacacgcccaccgacgaggtggtggtgccgtacgacaccctggagtccccgccagaaggcactgaggcgaccaagaagctgctcgacaagctcgccgtgctcaagctcaacggcggcctggggaccaccatgggatgcaccggacccaaatcggtcatcgaagtgcgcaacggatttactttcctcgacctgattgtcatccagatcgagtcactcaacaagaagtacggcagcaatgtgccgctgcttctgatgaactccttcaacacccatgacgacaccttgaaaattgttgagaaatacacgaattcgagcattgaaatccacacattcaaccagagccagtaccctcgtgtggtagctgacgagttcttgccatggccgtccaagggaaagactgataaggatggctggtaccctcctggccatggtgatatcttcccatcattgatgaacagtggaaagctcgatttactactctcacagggaaaagagtatgtgttcattgcaaactcggataacttgggtgctattgttgacatgaagatactgaaccatttgatccacaagcagaatgaatattgcatggaggtcaccccaaaaactttggctgatgtaaaaggtggcacactgatctcctacgaaggaagggttcagcttctggagattgcacaagtgcctgatgcacatgtgaatgagttcaaatcaattgagaaattcaagatattcaacaccaacaatctgtgggtgaacttgaaggccatcaaacgccttgttgaagctgatgcactcaagatggagatcattccgaatcctaaggaagtcgatggtgtgaaagttcttcagctggaaacagcagctggtgcagcaattaggttctttgaccatgccattggtatcaacgttccaaggtcccgcttcctaccagttaaggcgacatcagatttgcagctagtacagtctgatctatataccttggttgatggcttcgttacacgtaattcagccagaacaaatccatcaaatccctcaattgaacttggtcctgagttcaagaaggttgggagcttccttggtcgcttcaagtcgatacctagcattgttgagcttgacagcttgaaggtttccggtgatgtttggttcggttctggaattgtactgaaggggaaagtgaccatcactgcaaaacctggcgtcaagctagaaatcccagacggagcagtgattgggaataaggatatcagtggccctgaggacctttagataagaatcagcgaatcagcaaggaggctcacttcgccaagtggcggatcatttttcgtgtttttttcctgtatattcaaacaggttccatgatattatggagaatattaattgccagtataatccagaaattttacatgtattttactttgagggaaatgttttacacactccagttctgcttattgtccaaaaggaaatttctgtgtcttgaacagaaaaatatcttgccccagcaaaaaaaaaaaaaaaaaaaaaaaaaaaaaaaaaaaaaaaaaaaaaaaaaaaaaaaaaaaaaaaaaaaaaaaaaaaagggcggccg

SEQ ID NO: 258129 - DNA, 1132 bp, Zea mays
gtcttcttccctctcattcgtcttccacaaaccctataaccctagcaccgccgccaccatgtcctcgtctccatcttcaatgaaccgccgtcccccgggcccgctagcgttggggctggagtccttggcgaagaagaagacacatacagccggtgctcctcctctggatctggcggtcaactccatcacccgcagcttctatggcacctcccctagtccccctccatcgccgccttcacccaccgcttctatatcgccacctctctcattgtagaagaagacactgaggatctgggaacctatgccccacaggactgcacaacacgtgggataggtaatgcaggtattgcccccgctggctgtggctggccggtgtgcaattcaccaggctgccaaacgagccctaaaggccccagcatgggcgaccctctccagagtgattcttatcaatcttgcattggaaaaacacggagcctattattatcagggaagcatttgagccaaagtactatgtacatcaccatgcttttatgtgactatatatataaatataacagataaagttttattggaccagttctttgaccatgccattggtatcaacgttccaaggtcccgcttcctaccagttaaggcgacatcagatttgcagctagtacagtctgatctatataccttggttgatggcttcgttacacgtaattcagccagaacaaatccatcaaatccctcaattgaacttggtcctgagttcaagaaggttgggagcttccttggtcgcttcaagtccatacctagcattgttgagcttgacatcttgaaggtttccggtgatgtttggttcggttctggaattgtactgaaggggaaagtgaccatcactgcaaaacctggcgtcaagctagaaatcccagacggagcagtgattgggaataaggataattttggaaaaggaaagagaaaacaataccagatgccttacaacctgaattagggatgaaactgctaattgcacatggaagtcaccaagaacttgggtaaggtgattcaatgacaaatctaatgattaacatgtgcgatgtggttcacactgtaatgcatgcaactgatgtgcattaccaatgtcccaaga

SEQ ID NO: 258130 - DNA, 984 bp, Zea mays
cccacgcgtccgcccacgcgtccgcgcacgcgtccccactcccgggtctccagcattcctatcctctccccgcccgcccgtgccgccgccgcggcttcccttcctctcccgagccaagatgaatgttgaaaagctcaagaagatggcaggtgctgtgcgcaccggggggaagggtagcgtgcgcaggaagaagaaggcagtccacaagactacaaccacagatgacaaacggcttcaaagcaccttgaaaagaataggagtgaacagcattcctggtattgaagaggtcaacatctttaaggatgatgttgttattcagtttgtaaatcctaaagtgcaagcgtcaattggtgctaatacatgggtggtcagtggaactccacagacaaagaagctgcaagatctgcttccgtcgattatcaaccagcttggtcctgacaacctggacaatctgcggaggctcgcagagcaattccagaagcaggcctctggtgcttctggtgcagaggctggtgccagcgctggggctgttcaggacgatgatgatgacgttcctgagcttgtccctggagagacatttgaggaggccgcggaagagaaaaaggagtcctcatgattttgctacatgcctgctgttgttaaaccatgccattagaagggacctgttgagaactctgacctaccttatttgtgcctgtgggactggttatgtcatgatcgagaatttggtagggcgtgctggtgggattttacatgaagtatgcctcttttttttccatccatatctcccttgcttttgtgtggtaaaagtcttgttaatggtaaaggccacactttagaccaaatcaaggcaccgtgatgcatgaagatgaataccatatatcgattcaccttccatttatttgtctgggctgcacaaaatatattaccatttcatgctgtataaaatacactaaaaaaaaaaaaaaaaaaaagggcggccgc

SEQ ID NO: 258131 - DNA, 714 bp, Zea mays
gtcgacccacgcgtccgcccacgcgtccgcccacgcgtccgcccacgcgtccggaacaccattcctggtattgaagaggtcaacatctttaaggatgatgttgttattcagtttgtgaatcctaaagtgcaagcttcaattggtgctaatacatgggtggtcagtggaactccacagacaaagaagctgcaagatctgcttccgtccattatcaaccagctcggccctgacaacctagacaacctgcggaggcttgcggagcaattccagaagcaggcccctggtgcttcaggtgcagaggctggcgccagcgctggtgctgctcaggacgatgacgatgacgttcctgagctcgtccctggagagacatttgaggaggctgcggaagagaaaaaggagtcgtcatgattttgccacatgcccgcccttttgaagggcttataagtaaatccttgcgtagaagggacatgttgaactctgacctaccttatttgtgcctgcttacggttatgtcatgaacgagaatttggtagtccagcgctggtccccctttttcacccatatccccgtgcttgtgtggtaaaagtcttgttaatgttaaaggccacacttaaaccaaatcaaggtaccatgtctccggtaccatgcttcacgaagatttacccctaggtaccatgcttcacgaagatgaataccagatgtcagttcacctgc

SEQ ID NO: 258132 - DNA, 731 bp, Zea mays
gacttcgcagtgggcagtggcagccagccagtgagctagcctcccgagccctatctatccttttctcggcacctcgcgggtctcccgtccgccccgtcccgcattcgtatcctctcctcactctcgccgccgccgcttcccctgcgccccgagccaagatgaatgttgaaaagctcaagaagatggcaggtgctgtgcgcactggggggaagggtagcatgcgcaggaagaagaaggcagtccacaagactacgaccacagatgataaaaggcttcagagcaccctgaaaagaataggagtgaacaccattcctggtattgaagaggtcaacatctttaaggatgatgttgttattcagtttgtgaatcctaaagtgcaagcttcaattggtgctaatacatgggtggtcagtggaactccacagacaaagagtatgttctcatgacttgcattatctgcttaactagcttctgttaagatgctcttaatggcataatattattgatggcataatattattcattccgttgtgctggctttctacttaactaggtagtaatgatgtcctataatcctgtcacactggcagctggtgctttggttatgcatggcttttgtcaatttgaatttttaaggagaaaatttctcttgagctagatttgcacaacagcacaacagtattcttatgaagcattttcttatttgacagagctgcaagatctgtttcgtc

SEQ ID NO: 258133 - DNA, 343 bp, Zea mays
gcaggcacatgacacctagacaacctgcggaggcttgcggacaattccagaagcaggcccctggtgcttcaggtgcagaggctggcgccaggctggtgctgcttaggacgatgacgatgacgttcctgagctcgtccctggagagacatttgaggaggctgcggaagagaagaaggagtcatcatgattttgccacatgcccgcccttgtgaagggcttataagtaaagccttgcgtagaagggacctgttgagaactctgacctacattatgtgtgcctgcgtacggttatgtcatgaacgagtttggggtggccaaaaaaaaaatggagcttcatgtatgc

SEQ ID NO: 258134 - DNA, 1830 bp, Zea mays
tctctcgcccatgcgtccgcattcccctccaaacttaaagccctaaacccatcttgctcccccctcgtctccactgctctgctgctcctcgcgccgccgcagcgacgtaatggcttccgccgtggtgctccggaacgccggctcccggcgcctcttctgctaccctactctccgcgccgctgcgatatatgtaccttctgcgctacccgatgcgcccgcggcggcggcagcgccggcccagccgccaccgacggccgggaccctctgggcgaggtctatggccaccttcacgcgcacgaagccccatgtgaacgtcggcaccattgggcacgtcgatcacggcaaaaccactctcactgctgccattaccaaggtcctggccgaggcagggaaggccaaagccgttgctttcgacgagatcgacaaggctccggaggagaaagccagaggaatcaccattgcgacagctcacgtcgagtatgagacggctaaaaggcattatgctcacgttgattgtccaggtcacgcagattatgtcaagaacatgatcactggagctgctcaaatggatggtggtattcttgtcgtgtcagctcctgatggcccgatgccacaaactaaggagcatattcttcttgcccgtcaggttggtgtaccttcccttgtgtgcttcttaaacaaagttgatgctgttgatgatccagagcttctggaacttgtagagatggagcttcgggagctcctcagtttctacaagttccccggtgatgagattccgatcatccgtgggtctgcgttgtctgctttgcaagggaacaatgatgagataggaaagaatgcaattttgaaactaatggacgcagttgatgagtacatccctgatcctgtgaggcagcttgataagcctttcttgatgccgatagaagatgtgttttctattcagggtcgtggaactgttgttactgggcgtgttgaacagggaacaatcaaaactggcgaagatgttgagatcttgggtttggcacagactggtcccttgaagactacagttactggtgttgagatgttcaaaaagatactggaccatggagaggctggtgacaacgttggtcttcttctccgtggtcttaagcgtggtgatgttgagcgtggccaggtggtgtgcaaacctggtagtctgaagacatgcaaaaagttcgaggcggaaatatatgtcctgacaaaggatgaaggtggccggcacactgcctttgtcacaaattacagcaccccaattctacttcaggacagctgatgtcactggaagggttgagctgcttggggagatgaagatggttttgcccggtgacaatgtaactgcgaattttgagttgatatcacctgttcctcttgaacctgggcaaagatttgcgattagggaaggaggaagaacggtcggtgctggagtcgtctccaaagttcttagctgatcagtttccactttcttctccgtagcaattcagtgaacaaacgagtgttgatatgtccgaccgggttagaaacgagcgcaaagcaccgggttttcttttgcatttttcttggaatgcctgagcaaaggcagagctggcctggccagtggccaccattttattgttgaggcgtggtgctgtgtaacaccacggttagtttggttgacacgcaagttgggcataactttgattgaataatactagtctcatcataaacatattttctagcaattttgtcatgtcggtcttggaggcgctttgtcaagtccgcagaaaaaaaaatcctggttggactatatatgtctatgtatttgtgatgttt

SEQ ID NO: 258135 - DNA, 1903 bp, Zea mays
cggacgcgtggcgagacgcgtgggcggacgcgtgggcttgccgagtgcaatcgagatccgtgccagaccgtccatactacggtggcgtggatgtgacgtgccggcgcggcgcggcgcggcgccgataagaggtagagagaggaaaaaaaagaacaatcaattctccagaccctccccggcaaccgcgtccggccgtccgcttccgtttccttggataaccacgacgcccgcccgccccccggcaagcgaaagcgaagcgagccaacccagccatggagaaggcgatcgatcggcagcgggtcctcctggcgcacctcctcccctccccctccgccgcctcctcgcagcctcagcttgcggcgtcggcgtgcgcggccggggacagcgccgcctaccagaggtcctcctccttcggggacgatgtcgtcgtcgtcgctgcctacaggacgccgatatgcaaggccaagcgaggaggcttcaaggacacctacccagaggacctcctcactgttgttctcaaggctgttctggacaacactagaatcaatccagctgacatcggtgacatcgtcgttgggacggtgctcggccctggttcccagcgtgcaaacgagtgcaggatggctgcgttgtttgctggattccctgaaaccgtccctgttagaactgtcaaccgccagtgttcatctgggctacaggcagtagccgatgtcgcagctgctataaaggctggttactatgacatagggattggtgctggtttggaatccatgtccataaattccattgcttgggaaggacaagttaacccaaaaataagcgcattccagaaagcacaggattgtcttctgcccatgggaattacttctgaaaatgttgcccatcgatatggtgtaaccaggcaagagcaagatcaggccgccgctgagtctcataggagagctgctgcagccacggcctctggaaaattcaaggatgagatcgtcccggtcccaacaaagatcgttgatcctaaaactggagaggagaaggaagttgtgatatcagttgatgatgggattaggccagggaccacagcatctggattggcgaaactgaaaccagtttttaaaaaggatggaactacaactgcaggcaattccagtcaagtgagtgatggtgctggagctgttcttctcatgaaaagatctgtggctctgaagaaagggctgcccattcttggtattttcaggagctttgcagctgttggagtggatccagctgttatgggcgttggtcctgctgtggccattcctgctgctgtgaagtctgcaggccttgagattggcgacattgatctgtttgaactgaatgaggccttcgcctctcagtttgtctattgctgcaacaagttggggctggaccgttctaaagtaaatgtaaatggaggcgcgattgcccttggacaccctctgggtgcaacaggtgcccggtgtgtggctactcttctaaatgaaatgaagcgccggggcagagactgcagatttggtgttgtcaccatgtgtatcggatctggaatgggggcagcagctgtgttcgagcggggagacgcggtggatggactctccaacgtgagggacatgcaggcacataattttctgtctaaggatgcgaagtagaggcgcagaaaaaccatccatcctagagcagcataagcctgctgcatttgtaatatattcgaaatccgtattttttttcttcacaagcactactctatatacgatgaataaaagggcgacaatacagtgtcatcttgtagccacctaagatgcgaaagagaaaagaatgccggctgttcaatgttctgggcttgttctgttattgcttgtcgtctttcatactgaacaagcatggccttttgtgt

SEQ ID NO: 258136 - DNA, 2406 bp, Zea mays
ctttctatcctctgtgccctccaccaaaaccggcggcgacgtcgctctcctgcaccggtgcttggagctctccctccaccagcggcggtccacggacgctcggcgagctccaccggcgggcgctggtcagatccgcttggcagtcatgcacctggcacatcgggtagctcacgcctccggtggcagacccaccgccgcctggccctcccccagtgcccccggtgatccggaccgcacccgcttgctgttgtcgcgagcccgttcctgccccgccacagccgaagctcccagcgtcctcctgcaggccgagctgaaggttcagcgagccggtggagttcgacgacgaaactccgtcacgtcatacctctccgcctcccgtcttccagacgtctccaatcggggctcccagcatctcgtagaagaggagcagcacggcacggcggctgtggcgaggaaggctcctgtcccatcccaacccagttagcagccgcccaaggaggaggagatccaatcggcgtgcgggcgtccgcggtccatccatcgatccaattccaatctgcaggttatactcaaactgcacacagtagcatccttctggtgcagtaacataggatttggaacccagccctctgttctccaccaccgcttcgaagttgccgcaggtaatggtggtggcacggaacttcatggatatgggggctgctcttcctgcgggcaagcttgatatgctctatgactcagcctttatctgtgaggcagtactcaggtcacttcccccactggcaaagaagtatgcactgcagatgttgtatgtgctggcaccagtgaccgctgcagcaatggaagagtgggtgcttgatgaatatgctgccaagcataaggttgccattgataagcttctacagctcagggtctttgctgaagtgcgcgacagacgacgggacgtgagctacaagatgaatcagaagttccagggaaacatgcagaagtatttggttgatggtggaagtttaccaagggaacctttaccattaagtgtcactggtcgattgcccacaccagcagatctggaagcctatgctcttgatcaatgggtcgacccacgcgtccgattgatcaattcatctcaagtcgaaaaagggtcaagttttagctcctccatgatgaagacgtttcagcgtggtcttctgagttcaagggatggtgaagcttcaaagttgactgaaaatggcttccaatttcttctgatggaaacaaatgcacaactttggtacataatgagagaatacatttcatctgctgaggaacgtggagtggaccctacggagctgatatcatttctcttggaacttagctttcataaattgggagcggcttatagcttgaacactctgactgatgtccagaggattgccatcagggatcttgcagaattaggactagtcaaacagcagcagggtcgaaaggatagctggttcattcctacccaattggctactaatctctcagcaagcttgtcagattcgtcatctaacaaagagggatttgtggttgtggagacaaactttcgaatgtatgcatactctacttccaagttgcactgtgaaattctacgcctttttgcaagggtggagtatcaacttccaaacctcatcgtaggagctgttacaaaagaaagtatctatggtgcttttgaaaatggaataactgctgagcagataatttcatttcttaggcaaaatgctcaccctcgtgttgctgacaagatacccgctgtcccggagaatgtcacagatcagattaggttgtgggaaactgacctcaacagggttgagatgattccatcgcatttgtacgaagattttcctagcaaggaatggtttgaacaatgctgtgattatgcaagggataatgggtacttgctctgggaggaccccaagagaatgagactaattgtacgaggggagttccaccctgaaatgagggagttccttcgcaggcaaagatgaggaacgaccttgtacttgacggaccatgctatgcttctttgtagtgcatagaaacactgtatcgggtaatagttctcctttaaatatcaggaaagggtctagaaaagggctcagtttttgaattatttggtgacctgtgagctgtggaagcatatgaataatgtggtgttcaatggagcaaggcccaacatccttgatctgcttctaaaaaaaaaaaaaaaaaagggcggccgctggtgtatggctggtggccaggtcctgttggaactcttaggtaggtagtatggtgggatggagttggtatgctcttaatttgttgttatttggattgattctatataggacggagtgattttaaaaatgaaaaaaactcaaatgatgaaccattcccctctct

SEQ ID NO: 258137 - DNA, 1337 bp, Zea mays
gttgttcaggaggagtgctgaatttcttttgattgcagggggaaatgaacgaaccgatcaacaaccctcatttgattagtacttcattcaatctattattactgttactgagttcaggactcaggtagcagtcgatgccacattgttagattgcgatctgcaaaaacgctactgattcataaataaaatcgacccagcatgtacacacgcacagcttcaggctggtccaagcaaaaactgcattcatgtttttgcttgtacactgcaccgtactcatattggttttagcagtaagagcgtgcttatgggtgcaaaatgtcatagtgaaagatgttttattgcattgcatttagttaataacatgtcattcaaagttttgtggtaaaatttcttctgacctggatatggcgcggaaaatttgaacggtcctatgggagaattataccagaaaagagaagggtatgcgttactagtagcttcccccaaactgctggcgctatgatcaaaatgtgctttcccaatttagccactgcaggttgcctcataatttctagtttttcgatatctgacaatgccctgaccgccgcggaatgtcacgccaccggacaccgacatctactccattccgagggttcttgccccgatgccgtagaagtacgcgaggggcacgaagaaaaactttggccgttaccacgtgagcgagccaccagttgaccatttgcgcgattcaccggacaagacagagagggatgtcatgaaggtgattagtccagctatgtttggtagtgaagggcgatgtccagagagtaagaatgaggcgacacagtatggactcgatatgactgagcaataatatcttgagcattcgattccatggatagctgccaatgatgttgtacatttatattagacccctccagctaccttgtcgatgcatgaacaagaagacaggttagactttgttgaaaccctcttcactagtggaggtatcgaccatcactcgtcactgtaacccgatggtgatcggcgaccatgagcttccatgttattgtgttctgatacttgagacttttattatgactatgtataagatattgtctcttattagtactggatgatgagatgtgtcttattatgactatggatgagacttttgtgatgtaattgatgagactatggatgagacttttgtgatgtaattgatgagactatggatttaaaaaaaaataaaaaagaaagcaatacgaccctaatcctcttgttttacatggaaaatccacgcgattactgcttcccatgggtgcgtctcccgtgggtttcgacaatcgagcagcagc

SEQ ID NO: 258138 - DNA, 438 bp, Zea mays
cacaccccaattctacttcaggactgctgatgtcactggaaaggttgagttgcttggtgagacgaagatggttttgcccggtgacaatgtaaccgcgaatttcgagttgatatcgcctgttcctcttgaaactgggcaaagatttgcgatgagggaaggagggaggacagttggtgccggggttgtctccaaagttattagctgatgagtttccactttcttgcccgtagcaatttagtaaagaaatgaatgctgacatgtttcttggaatgcatgggcaaaaaggcagagctggctggtctggccgccattcattctggacagtaccttgtgctttcttgttgaggtggctcatcataaagcatattttgtagccacttttccgagttgatattagtgggttcttaccaaatttaccgcgaaaattgctggtcatgt

SEQ ID NO: 258139 - DNA, 395 bp, Zea mays
gtgaacaaacgagtgttgatatgtccgaccgggttagaaacgagcgcaaagccccgggttttcttttgcatttttcttggaatgcctgagcaaaggcagagctggcctggccagtggccaccattttattgttgaggcgtggtcctgtgtaacaccacggttagtttggttgacacgcaagttgggcataactttgattgaataatactagtctcatcataaacatattttctagcaattttgtcatgtcggtcttggaggcgctttgtcaagtccgcagaaaaaaaatgctggttggactatatatgtgtatgtatttgtgatgtttaccgtcgctagcttctgatctggtgatgcgaaatcctaatggcatggatattatctatttgttttcg

SEQ ID NO: 258140 - DNA, 1019 bp, Zea mays
gttgcgcagtgcaggcaggcaggccgagagaagagccggctccggttaatggcgttgggaagaccacaggtatggagtacccagagcgccctggacagccactctgtgagtactatgcaaagaatggcacatgcaaatttggatccaattgcaagtttgatcatcccagggaaagtggttttgtacctgtcgctttaaacaacagtggattccctctacgtctgggtgaaaaggaatgttcgtattacatgaaaactggacattgcaagtttggagctacatgtaaattccatcacccagaacttggtttccttacggagacgcctggcatgtacccaccagttcaaccaccacctatttccttcctcacatccatatccacatcattccaactggcaaatggggaggcctgctgttgtgccagggtcatttttaccaggcccgtatccaccaatgatgcttccacctacagttatgccaatgcagggatggaacccttatgttccacctatgaaccaagttacaccagctggaggacagcaagctgttccagtagggccatcttatggcttgtcgcaccagggagcctacctctgccagtgacttatggcagtcattatgcgcaattgtattcttcttctgggacttcaagcagcaacatacaagaatatgtgtttccagagcggcctgggcagcctgaatgtgaacattacatgaagacaggaacctgtaaatatggagcagcctgcaaatatcatcatcctcaatacttcagtggaccaaagtctaactgtatactgagccctctgggtcttcccctgcgtcctggttctcagcgatgtgcttactacgcacaccatggcttttgcaagtttgggccgacatgcaagtttgatcacccgatgggtactccaaactacagtcttccagcaccatcacttactgatgtgccagtcgctccatatcctcacactttctctgttactcctattgctccatatatgaagccccctgatcca

SEQ ID NO: 258141 - DNA, 1541 bp, Zea mays
tccacgcgtccgctttctcaactcgtctctctctatctcttgtagccgccagccgcccccgccgctcactccacgccacggccgcccctgccgcgcccggccaccccccggccccggccgcccttgccgcggacgcccctgtgtgagccgccgtcgcgcactcgccgctccgcccctacgcgcagtcgccacgggagctcgtatcgctcgatttcctctccggcggcagcaccctcacccctcatcaacccaacccgcaagaaaaacccgcagcagagaagaggagaggagtcgccgcgaccgagagctccagagcacgcccccggcacagcctccgacgatggatccgaagatgacagaggtgacccagatgttcgcccgcttcaaggcggcctacgcccgcaacgacctcaacacctgcgtcaccctcctctcgcagctcaaggtccatctcacccaattccccagccttccgcccttgtttcagcagacaccgaacattgtggaggagctcaaacttgcaagggacatttatgagcatgctgttgttttgagtgtgaaacttgaggaccaagatgcgtttgaacgcgatttctgccagctgaagccttattacgtggatacatgatctggtaaaaaaggcaagctaatggaagaaaagccaatagaatattagagatcacattatagaaagataggatgatgaaacaaataacatatgttgataacttgtacattgatagattaaagattaaaagtattgtgcataatagggatgacgcggatatttttttataatcatcaaaggatggcattgacagtttgcatgaaagggtagcaagttagtagggcatttagtggggaagatgtggacaccttgcatgaagagagagatatagaacatctagtggggattagctttatagagtatatagataaattcataagcttccactattgctcgacgtcccggtgccccccccaccagctccgttcattatccttggtcttcacctccacctgtacctacatttccatttaccgaacatcaggtatgcatattcatcatcatttacttgttgttagttatattatgatgtaactcaacaaatgttatttgtacatgtatattagacccctccaactaccttaccgacgcatgaacaagatggcgggttagactttgtcgaaaccctcttcactagtggaggtatcgaccatcactcttcactgtaacccgatggtgatcggcgaccgtgagcttccatgttattgcgttctgatacttgagacttttattatgactatgtatgagatattgtctcttattagtactggatgatgagatgtgtcttattatgactatggatgagacttttgtgatgtaattgatgagactatggatgagacttttgtgatgtaattgatgagactatggatttaaatattgttatatgattgggtgtgacacccctttatgttaaaatatgccccgccaaaaaaaaaaaaaaaaaaaaaaaaaaaaaaaaaaaaaaaataaa

SEQ ID NO: 258142 - DNA, 765 bp, Zea mays
ctccgcctccctgcctgcataccctgaccggaccccgatcccgccggcgtcgcgcggaatcgcggcggtcaaagcctatacgccaccccacctcacgtcgcgccgcgtcgccgcggtttccgcgtgctagtgctctcgggagctcggcgcatcagaggggcgggctagggttcgccaatcgccagcgtgggtgctgccgtcgggcgccggcggctgagtagtacgaggagagatggacggcgttcctgcgcaggctaaagcggctggacgcgtaccccaaggtgaacgaggacttctacaagcggacgctctccggcagagcatacgtgcacgtcgtcagcggcgccgtcatgctgcttctcttcatctccgagaccaggtcatatttttattcagcaacagagactaagttagttgtggacacatcaagaggagaaaggctacgagtaaattttgatattacttttctgagcattccttgcaccctcctcagcgttgatacaatggatattagtggagaacagcaccaggacattaggcatgacatcgaaaagatacgattagatgcacatggtaatgttattgaagcaagaaaaggaagcattggtggagcaaagatcgagagaccattgcaaaaacatggaggaaggctcgacaaaggtgaacaatattgtggtacgtgttatggtgctgaggagtcggatgagcaatgttgtaattcttgcggaagagtccgggaggcatataagaagaaagatgggctct

SEQ ID NO: 258143 - DNA, 748 bp, Zea mays
agaatttataaagaagttattattcagtctatctctacataacaagatggagagagggatgtagagatagactgaaaaataacgtcgggttatgcaattatgagttcattagatgtcattgatctaaattaatttctatccattatgaacttatttttaatgaaccatgctccttcttcgttgctcacaacagggtccatgtacttggcacatgatatacatatacgagatggacttaaaaattaacaaaggtcttcttttggtggtagataattttggttttcttatgattctctttatgaagtgggtgtggtacctctaaacaaatagatgatctgttgacttatggcagtcaggcattacatttttttgcatgaaatcgacatctgagaagtgataattttgttttgatcgcttctctattgcaagatttagatggctactatcctttgcaattgatcaagaatggtgagctattctaaggaagcttctgaacaatatacctgttgtcctggagtgtcacagatggcaaagatttgcgcttagagaaggaggaagaacggtcggtgctagagtcatctccaaagttcttagctgatcagtttccactttcttctctgtagtctggttgcaactgttgatggtgtatggaaatcttcttaagccaaactgttaaatacattgcacccgatcagaagggatgctctataatgcagcctgggtgtgatctccgtacatcgtgctccag

SEQ ID NO: 258144 - DNA, 662 bp, Zea mays
gaggattgccatcagggatcttgcagaattaggactagtcaaacagcagcagggtcgaaaggatagctggttcattcctacccaattggctactaatctctcagcaagcttgcccacccggccgaacccgagaaaatcgagtatactgaagccatcgagagcagctttcttgcaactcccatggccctataaggcagagagagatagagcaagcgagcggggagaagagattgagcattgctggtggccctgtgctttgagagaggagagaggacttgaggaataggcaggaggctttgtggtggagcaatggcgacagcggcctgggccgcatggctgctcatcctcacgtgcttcggcgcttggaccccgcggcaaatcttggttgctgcagccaccgacgcgaatgatgttactgccctcaacacgctgtttaccagcatgaattcgccgggacagctgcagggctggaaggtgagtggtggcgacccatgcggcgaatcgtggcagggcatcacttgctctgggtcctctgttactgcaattaaattgccgaacttgggcccctcgggaaatctggcctacaacatgaacaccatggattcattagttgagctagacatgagccacaacatctcggtggtggccaacagattccatac

SEQ ID NO: 258145 - DNA, 613 bp, Zea mays
ctcccgcgtccggccacgcgaacgctcgtcgtcacgccatccctctccacctctcgtcttccagacgcctccaatccgggctcccagcgtctcggaaaagaggagcagcacggcacggcggcgatggcgaggaacgctccaataatatgctaacccgttctacccagtccaattagcagcctcccaaggagaaggagatccaatcctgcgggcgggcgtccccgtatcccatccatcgatccgaatctcggaatctgcaggaccctgcggcgcggcttcttcgtggagaagaggttgctgccgaagccaccgccaggtagccatgtcgtcctccgtgctgagggctgcggccgacagggccattcgcaggcaggccctcacgctgacgaacgccgcggtgtccaggatccggcagctcctcagcctaaggcaacggccatacctgcggctgggtgtcaaagcgcgaggttgcaacggcctctcctacaccctcaactatgccgatgaaaaggggaagttcgatgagcttgtcgaggagaaaggagttaaagtactgatcgaccccaaggctatgatgcatgttataggcaccaagatggactatgttgatgat

SEQ ID NO: 258146 - DNA, 864 bp, Zea mays
gagtgacctggccctctgtatctcgcccctttgccttgggatttgttaattctctttctcgatgggacggggaagggatataactcagcggtagagtattaccttgaagtggtgaaagtcatcagtttgagccagtttttttaacactaatgtaaacacacaaggttgagattgacatcatctgttgcctttttttctgagttcctgtttgcactttttttagttattgtttgccccttcagttttcagtacatcttcacctgaagcttcccttggtgtgcaggggtctcagccatgtgcttactacgcacaccatggcttttggcaagtttgggcccacatgcaagtttgatcacccgatgggtactccaaactacagtcttccagcaccttcacttactggatgtgccagtcgctccatatcctcacactttcccttgttactcctgtgcctccatatctgccatcttctgatctgcgtccacaatacactcaagtcaaggattcctctgctaatccaccaccatcgcctggaactacttatggtcctgttgggtctatatcaaaggtttatgctccccacacgcttatccgatccccggcttctgcagctgctggcatgcaagcgtcctaatgagacacggttgagagcattagtcctctctgtcatgaagatagttcttgggcaatcttctcaggtttttctaccattggcggaatgaggtctcgattcttttttgctccagttcgacttcccggcaattgtgaataaaggctgcagctgacatagaaaagtctcaataaatgcaaagataggaattggcaagctcaatcactttgccatttttctgtccatctcggaaa

SEQ ID NO: 258147 - DNA, 560 bp, Zea mays
agaaaatcgaaaagctaagctcaacacatcatgaacttgataacaagcctcaaaacaagcatgcttatattgctgaagacaggttactgaattggaatgggaaaaaatctataaagcgctaaagactaagtggatcgagcgcgcgcgagggttgtcgtaaaatgtccaccgtcattaagagggctaatgaattcccagtcgattgtagctacatgcatggaggagtgcacacacatgcctatgttgtttgaattaatcaaattgcttgtttgttagtaattattaccgcctccaactaggctctgtacgtccacaagatcgtcagctatttcatgcaagcatccgcacaagtgtcctactgctatatgttattgtgttctgatacttgagacttttattatgactatgtatgagatattgtctcttattagtactggatgagatgtgtcttatttatgattatggatgagacttttgtgatgtaattgatgagactatgaatttaaatattgttatgtgattgtgtgtgagatgttttatgtgaaaatatgttgtgttat

SEQ ID NO: 258148 - DNA, 894 bp, Zea mays
cccacgcgtccgaatcaatctccgcctccctgcctgcttaccccgaccccgtcggcatctcggagaatcgcggcggtcaaagcccagcctaccccacctcgcgccgcgtcgccgcggtttccgcgggccagtgctctcgggagtcgggagctcagatcaggagggacgggctaggtagggttcgcgagcgagcgagggtgctgccgtcgagcgccggtgtccgagtagcaagaggagagatggacgcgttcctgcagaggctcaagcggttggacgcgtaccccaaggtgaacgaggacttctacaagcggacgctctccggcggcatcgtcacgctcgtcgccgccgtcgtcatgctgcttctcttcatctccgagaccaggtcatatttttattcagcaacagagactaagttagttgtggacacatcaagaagagaaaggctacgagtaaatgttagtactttttaaacgaaataaactgtctgtaggctattggctgatcttggtgtttcttggggaaaagagtacgagcactctcaataatgtaactcagcaaatgtcatttgtacatatatattagacacctccagctaccttgccaacgcaagaacgagaagacgagttagactttgtcaaaaccctcttcactagtggaggtatcgaccatcactcgtcactgtaacccgatggtgatcggcaaccatgagcttccatgttattgtgttctgatacttgagacgtttattatgattatgtatgagatattgtctcttattagtactggatgatgagatgtgtcttattatgactacggatgagacttttgtgatgtaattgatgagactatggatttaaaaattgttatgtgattgtgtgtgagatattttatgtg

SEQ ID NO: 258149 - DNA, 1028 bp, Zea mays
cccacgcgtccgcccacgcgtccgaccgcgcctccgcccgccgtccgccgccctaacactgccgacctgtcgactgccgtctgctcagccggccagccactatccgccgagcgcccgacggcccgagcaggcgagcagctccgcatcgcgcgacgtcccaagcaggtgagcaaccaggggcagtaaaggcgttcgcgcgacgtccaacagtgcacctgcgcgcgcgacgtctcgctgctttctccaactcctgttcggtatcgccgtttctcgcttggaggttgtcctgtagcggggacgaccgcccattccggcgcccgctcttctgctcctcctcgccttcctgtttactgctgcggggagttcttccgccgcgagccgggacaccgtcgccgccggccgcccgctgtccgacgcgcagagcctcgtgtccaagcgtggcaagttcaagctcggattcttccgtccagggtttggctcgagatggggaaggcaaagagcaagggccctaaattcgcggcggtgaagaagattatcaccaagaaaaccatcaataagtacaaggaggatgtgctgaaccacaagaagaaggacgtggacaaggagaaactcggccggaatgtgccgcaggtttcgtcggcgttgttcttcagctacaacacagcattggggccgccgtatcgggtgattgtggataccaacttcatcaattcctcgatacagaaataagctggatttggagaagggaatgatggattgcctttatgcaaaatgtaccccatgtatcacggactgtgttatggctgatcttgaaaagttggggcagaagcatcgagtggccttgagaattgccaaggaccctaggttccaaagatcagcatgcacacaacaagggaacctatgctgatgactgcattgcggagagggtcacttcagtaaaaatgctacaaagttgctatttggatggagatttgaaaaggatgacagaaaggttcctgggttcaatacagacaacacagacataggat

SEQ ID NO: 258150 - DNA, 1151 bp, Zea mays
ccggtccggaattcccgggcgacctcgtagcgaatcggaccggggggctagggttccggtgcgcctctgcaatcggacgcgaggctaggctgggcatggagggaaccgctgcggcccggaagaggtcccggccggagacggcgaacggggctgccgccgccgggaagcgctccaaagacacggagtcatttcaaactggtctatcaagcaaatcgaagccttgcaccaagtttttcagtacgattgggtgcccgtttggcgagggatgtcattttctgcactttgtccctggtggttacccggcagttgcaaaaatgctgaatctaagtagctctgctgtatctgcgccatcaagaactcatgtggatcatgccgctcttaccggtgcctctcatccagcttctacggtcaagacacgcatgtgcaccaagtacaacactacagaaggctgcaagttcggtgataagtgccatttcgctcatagcgaaagagagcttgcgaagccagcctacatgtctcaagaaggacctcctatgggtggtcgatatggacgagctgaacctatgcaaccagctgccatgggccctccagcaggaaactttggtgcctcggcgactgccaagatcagtgtggacgcctctctggccggtggcataatcggcaagggtggggtcaacactaagcagataagtagaattacaggcgtcaagctctccatccgcgaccacgagtctaaccccaacctaaagaacatcgagctggaaggcaattttgaccagatcaagcaagccagcgacttggtgcgtgatctcatcgcaaccatcagcgcaagcatgccagcgaaaaatccatctgctgccgcggcaccagcaggaggaggccgaggcggtggtccagggggcaagagcagcaactacaagacgaagctgtgcgagaacttcttgaagggtgcctgtacttttggtgaccggtgccacttcgcccatggcgagacggagcagcggagaggtgctgcatgagagtcgaggtgctctaggcaatgagatgccatgtgctccctccttttgctactgtgaattttcgccttgcagcgctaggcggttggactgttgtgttgtgttgcgacgtcaatggattaaactctagatttc

SEQ ID NO: 258151 - DNA, 1502 bp, Zea mays
gcatgagattaccatcatcggcaacgagtcacctgcaccattcatgacatttcagtccacatgcttcccatcagatattctaagggaggtaagtctacgcaatgcgtagcaatatcaatgtgcttttttggatacctttctgatggaaccaggtggccatcgtgcatccattgtacgtgattaaaccaagttttgtttgcagcaggctcttcaagtcaacaatccaagtcgtggttcgacctgtttgttgtcttgtacagcctcctgtggtttgaaacagctccctgctttattcattcctcagttgcatgatgtttggcttggttctgtgtaacttaaataatcacatcatgagaagcctttttctctttgctatagactatagtatgaatcttgtccttaacacagatataatattcagataatactcatctctgaaggatatctaccttttccaggttctgcaagcaggattctctgcaccaactcctatccaagctcagtcatggccaattgctatgaagggtagggatatagtagctgtggcaaagacaggttcaggaaaaacactgggctatctcctcccagggtttattcttctgaagcgcctgcatcataattcaagggaaggtccaacagtattagttttgtccccaaccagggaattggcaacacaaattcaagatgaagcaatcaagtttggcagatcttcaagaatatcttctacttgcttatatggaggtgctccaaaaggtcctcagctaagggagttggagcgtggtgccgatgcttgttgtcgcaactcctgggagattgaacgacattttggaaatgaataaagtgagcctgcaccaagtatcatatcttgtccttgatgaagctgaccgtatgcttgatatgggatttgagccacaaataaggaaaattgtgaaacaaataccaccgaaacggcaaactcttatgtatactgccacatggccaagagaggttagaaaaatagcgtctgatttactggctaacccagttcaagttaacattggaaacactgatcagctagttgcaaataagtcaattactcagcatgtggaagttatcccacatatggagaaatcaagacgacttgatcagatcttgcgctcacaagatcctggatcaaaaagcataatattttgctccaccaagaggatgtgtgatcagttggctagaaacctatcacggcagtatggtgcttctgctattcatggtgataaatcacaggctgagagggattctgtgttgaatgacttccgaagcggcaggtgtccagtactcgtagccactgatgtggccgctcgaggcttggacataaaggacatcaggatcgtggttaattatgatttcccaactggtgtggaggactatgtccatcgaattgggagaacaggtagggctggcgcaacaggatctgcctacacattctttggtgaccaggattcaaagtacgcttcagaacttgtgaagat

SEQ ID NO: 258152 - DNA, 638 bp, Zea mays
caaatcgggaccgggcggcatcctccgtctcgacctgacccccgcaccgccaaaccctagtccggcgaggcgaccttgcgacctccgttcctctgcgctccggctgagttgctgatttgggataatcatgttctctctgagtgaatgaacatgtctgggaatgatgataagccacatgctgctgcagacagaataaaggcagccacgttatcagtggctaagggattgagcagggctcaagctgaacgggctgcgactgctgctgcccgcaatgtgaatgcctatgggcagaaggaagagggaccaagccgctggcaggagaggaaggaagccaagagacagatgtatctgatgagtacagagaaggctgcgaagctgggcactgtgaagccaaaagcttcagaaacttcttctgttggcgcatatacccaatgccagaagtgtttccagcatggtcactggacatatgagtgcaaaaacgagcgggtgtacatatcacggccctcaagaacgcagcagcttaagaaccccaagcttaagaaaagcgtaccggtttcctatcaatttgagaatcctgatattataaaggagagggaagaggagcagaagatgatgaaagaaaagcagaagaaggagaa

SEQ ID NO: 258153 - DNA, 938 bp, Zea mays
  unsure (1)..(938): unsure at all n locations
ngtcgactccacgcccgtccggttcttcatccgcaagcaaagcattttcggccgccccaccgcagcagcagagaagaggccgccgccgcgaccaagagtcgatggatccgaagatgacagaggtgacccagatgttcgcccgcttcaaggcggcctacacccgcaacgacctcgacgcctgcgtcaccctcctctcacagctcaaggtccatctcaccaaattccccagccttccgccctcatttgagcagacacctaaagccgtggaggagctcaaacttgcaagggacatttatgagcatgctgttgttttgagtgtgaaacttgaggaccaagatgcatttgaacgtgatttctgtcagctaaagccttattacatggatacatgtggcataattcccccctcaccagaggagtacccaattttgggactcaatcttctgaggctgttggttcagaatagaattgctgagttccatactgagctggagcttttacctgtcaaggcacttgagcatccttgcatcaagcatgctgtagagcttgagcaatccttcatggagggtgcctacaaccgagtgttaagcgctcggcaagctgtgccacatgagacctatgtttacttcatggaccttctcgccaagacagttagagatgagatcgctgggtgcagcgaaaaggggtatgattccctatctgtaagtgatgcaaaacaaatgcttatgttcagttctgaccaagatctgcacgagtacatcacagaggagcacccggaatgggagtttaagaatggcgccgtcttcttccagaaggcaaaggaatcacagccctacaaggagatcccatccttgcagctcatcaaccagacgctcagctatgcgacggagctggagcgtattgtatgatttaatttcacagtaatccctggtggatgttta

SEQ ID NO: 258154 - DNA, 1193 bp, Zea mays
cgtccgcccacgcgtccgccgcctctccaaccaggcgccactcgccagggcctaggctggtcatggaaggaaacgccgcagccgggaagaggtcccggacggagacggcgaacggggctgccggcggcgggaagcgctccaaagtacgattgggtgcccgtttggtgagggatgtcgttttctgcactttgtccctggcggttacccggcagttgcaaaaatgctcaatctaggtagccctgctgtatctgcgccatcaagaactcatgtggatcacgccgctcttactggcgcctctcattcagcttcgtcaggcaagacacgcatgtgcaccaagtacaatactacagaaggctgcagatttggtgataagtgccactttgctcatagcgaaagagaacttgggaaaccagcgtacatgccttatggagaacctcctatgggcggtcgatttggaggccgacctgaacctgtgcagccagctgccatgggccctccagcaggaaactttggtgcctcggcgactgccaagatcagtgtggatgcgtctcttgccggtggcataattggtaagggcggggtcaacactaagcagataagcagagttacaggcgtcaagctctgtatccgcgaccacgagtctagccccaacctgaagaacattgagctggaaggcaattttgaccagatcaagcaagccggcgaaatggtgagggacctcatcgcgaccatcagcacgagcatgctggcgaaaaactcatctgctgccgtggctccatctggaggccaaggcggtggtctgggtggcaagagcaactacaagacgaagctatgcgagaacttcgtgaagggtgcttgtactttcggcgaacggtgccactttgcccatggcgagaacgagcagcggagaggtgctgtttgagagttgaggtgccaactctaggcatgacatgtcctgtgctctccatttgcttctctgaatttcctccttgtagcgttagacggttagactgtcgtattgcgatttcaatggattcaactgagttcagctttaagaaaacgttaatctgttgtgcccctgaatgttgtgacttgtcagtaagttagcagcccccacccaatcttgtttggccgctcaaaataaaaagaaagcaacctttggcacggtacaagacctactttaaagcgctttt

SEQ ID NO: 258155 - DNA, 590 bp, Zea mays
  unsure (1)..(590): unsure at all n locations
ctcgcagtcgcgttcgctgctcctcggtcctcagccctcacacgccgcccgcccgcgacgaagcccgcatagccgccgccgagcgccggagttgccacctaccgcgcgcccatctgccgccgatgctgcgcactcatctgctacccgaggcttggcggcggccactgccccaggaggcaggagcgcgacaccaaagtccgcgcatttccttccaccgagccgcaccaagatccgggatccaaggtggccaagttcgttgcggcggccctgaacttcgatggctgtcctcgtcacggaaagaagcttccggagcggccgggcgaggcggactgcacctactacctccgcactggcgcctgcggctacggggagcgctgccgctacaaccaccctccggatcggccggctccggttaatggcgttgggaagaccacaggtatggagtacccagagcgccctggacagccactctgngagtactatgcatagaatggacatgcaaatttggttccaatgcaagtttgatcatcccaggaaagtggatttggtcctgcgcttaaacaacaggggtttccttctaccctggtgaa

SEQ ID NO: 258156 - DNA, 666 bp, Zea mays
cggacgcgtgggtctctttgtcctttggtgcatgtgcaggcaaatgtcatggttgaacaaccccaatgatcagctatgagaagaaatgacacgtatctttcacacgcacataggagccatacgaagaacgtactaatgaaaagatcgatgaattatattgatatgatatgacgtgagtgttttgaaatgtttggtaggttctgtttatatggatttttgtatgtaagactgcattgttcttctgtatgaggctgcatatggtgaggcgatgtctagtcagcacggaccagactatgactggaggacctcacctattgatcctcaggctgtgtatgcaagtggtggaaaagctcatggaaggtacacaatgtttgctaacgtcatcgactcgagccaggtgagggttcagcgtggaggttcgtcgaggtctgctgctcgtagctcccgtcgctccactcagttatggtgatcggcgacagtgagcttccatgttattgtgttctgatacttgagacttttattatgactatgtatgagatattgtctcctattagtactggatgagatgtgtcttattatgactatggatgagacttttgtgatgtaattgatgagactatggatttaattattgttatgtgattgtgtgtgagatgtctttatgtg

SEQ ID NO: 258157 - DNA, 382 bp, Zea mays
cccacgcgtccgcccacgcgttcgcccacgcgttcgtccacgcgtgcgtcacctacacctgcgcgtacatctccacctaccgaacatgagacccctacagctaccttgccgacgcatgaacgagaagacgggttagactttgtcgaaaccctcttcgctagtggaggtatcgaacccgatggtgatcggcgatcgtgagcttccatgttatgtgttctaatacctgagacttttattatgactatgtatgagatattgtctcttattagtactggatgagatgtgccctattatgattatggattagactttttgtgatgtaattgatgaggactatggatttaaatattgttatgtgattgtgtgtaaaatgttttatgtg

SEQ ID NO: 258158 - DNA, 886 bp, Zea mays
cggacgcgtgcgtgcaaagatcctatatggcataacttggggcgatattttgacaagtatgcctctgaaaagttagcgacagataatacacctcatgatcattcaaaggagagtatggaagctattgtccagcaattgattaatttggcacaaaacacttctgctgacgaagagcttctttctgatcttgggactgatgttaaagacgaatgcaccaagtttggtctcggggataatgtcaaggtacacaatgtttgctcacctcatcgactcgagccagatgaggagggttccggcgtggaggttcgtcgaggtctgctgctcgtagctccccgtcgctccactcaagatccagcaggagtggagcaactacgagaagaacttacgcgacatcacgattccttgaagcaacaagctgtgctaacatgaatattatgctacacagattcagcaacaccacacactcataccacaactagcacaagccccagggatacacgtcccggtgcccccaccaccaccacctctcgttcattatccttggtcttcacctccaccaacacctacatctccacctaccgaacatcagacccctccagctaccttgccaacgcatgaacgagaagacgggttagactttgttgaaaccctcttcactagtggaggtatcgaccatcactcgtcactgtaacctgatggtgatcggcgaccgtgagctttcatgttattgtgttttgatacttgagacatttattatgactatgtatgtgatattgtctcttattagtactggatgagatgtgtcttattatgactatggatgagacttttatgatgtaattgatgagactatggatttaaatattgttatgtgattgtgtgtgag

SEQ ID NO: 258159 - DNA, 474 bp, Zea mays
caatctcgcagtcctttcttcctccgacctcctcagaccgcagcaaatcggacggtcggaccaggggatagggttccgccgcgcctctccaaccaggcgccactcgccagggcctaggctggtcatggaaggaaacgccgcagccgggaagaggtcccggacggagacggcgaacggggctgccggcggcgggaagcgctccaaagacatggagtcatttcaaactggtctatcaagcaaatcgaagccttgcaacaagtttttcagtacgattgggtgcccgtttggtgagggatgtcgttttctgcactttgtccctggcggttacccggcagttgcaaaaatgctcaatctaggtagccctgctgtatctgcgccatcaagaactcatgtggatcacgccgctcttactggcgcctctcattcagcttcgtcaggcaagacacgcatgtgcaccaagtacaatactacaga

SEQ ID NO: 258160 - DNA, 1139 bp, Zea mays
ttttcgcgtccgcccacgcgtccgcttttccctgccgagactgcgcgagaacctaacatctgctccgatctcgcagtcacgttcgcccttcgccgctcctcggtcctcggtcctcacacgccacccgcccgcaacgaagcccgcatagccgccgccaagcgccggagttgccacctaccgcacgcccatctcccgccgatgctacgcactcatttgctacccgaggcttggcggcggccactaccccaggaggcaggagcccgacaccaaagtccgcgcatttccttccaccgagccgcaccaagatccggtatccaaggtgacaaacttcggtgcggcggccctgaacttcgatggctgtcctcgtcgcggaattcatcctcagattcacaggtcagtccagcgagtgaacctagctcggggtatctgtatctgccagccatggaatctgcaggtgagcagctcggttagattcccaatcaacagctcgaatcgcctgctctcacatcctattgaatgaaactatgatatagaattggtttgcctagttattattttgaattaatttggaaagagctccactttgattcgatttgatcgtttcttcaactagtggcatattggtgtgcttcctacgtgattcaactagcggcatattggttcgatatgaatatggccatttacagtttttctagcgtttgctaatgaacgcttctaaaggtctcaataacagttcaatgctctatccaaatgaatttttaccagtgtatgtctctaatgcttcaatattttaattcaccggttaaactaaaaaacagtactgctaatggacttggaggtaatcactggaattctaaaaaaataagcttcttagacatgccattatcctaataccaaattggatttacgatgaaagcaacaatgacaaaacgtacttaagtaaatgcagaataaatcgtattttacatgactatgcatactgttgttttttagaccaaaactgccttgtttttctttcacataataaatgtacttttattgtccgaaccttgctgcccaattttttcagatttgacaaatattcagggaaggttgcctctgaaaagcaagggagctccaatgatagagtgtggtgctcc

SEQ ID NO: 258161 - DNA, 973 bp, Zea mays
  unsure (1)..(973): unsure at all n locations
cagtacggtcggaatccgggtcgaccacgcgccgccacgcgtccgccacggccgccacgcgtccgtctccttcgacatccgcggcacgaagactaggccacaaaatcgcggtagcaagcagcagacaggtggggaagatgtcgtcgctgcggaatgcgatcccgcggcgcgctcacaaggagcgcgcccagccggaggcgaggaagaagtttgggcttttggagaaacacaaggactatgtcgtccgggcgcgagcttaccacatcaaggaggcaaccatcgctaaactgaaggaaaaggcggcattcaggaatccggatgagttctattttaaaatgctcaacagtaggactggtggtggaattcatagacctaaccctgaagataataagtatactgaagaggaacttcatctgttgaaaaataaagatatgggatatatcctttagagcgttcaaagtgaaaaaggtttgtgacattttaaagtattcattagcaaataagtacaattcggtgtcttgtggctgaatgttttactatgttttaattgggatggatcacttcgtagaaaatcgaaaagctaagctcaacacttcatgaacttgataacaagcctcaaaacaagcatgcttattttgctgaagacaggtacagataatgagttcttttgcttaccattttggaactatctgctagttaagcttgtgccgacatttaggtggctcttttatttcagagaagaagcgaaagaaatacaatcaaggataggacaaagcagcaacatgactgatcctttgtttttactgtttatggagagtcatttttactgtttattagtctcaacatttatatntgtgtccatttaactaggaccaatatgggtggaatgggattatgatattaatatattatgcagntaggtagttgactggtatctcatgttggctaaacctttggttttccccaggaaaat

SEQ ID NO: 258162 - DNA, 540 bp, Zea mays
  unsure (1)..(540): unsure at all n locations
cgtataggccaccgcgacgcgaccgcgtactgggggcgagacgccagtgcaggcaggcaggcgaggcggactgcgcctactacctccgcacgggcgcctgcggctacggggagcgctgccgctacaaccacccccgcgatcggccggccccggttaatggagttggaaagaccgcagttacagtggagtacccagagcgtcctggacagcctctctgtgagtactatgcaaagaatggcacctgtaaatttggttccaattgcaagtttgatcatcccagggagggtggttttgtacctgtcacattgaacagcggtggattccccctgcgtctgggtgaaaaggaatgttcctattacatgaaaactggacattgcaagtttggagctacatgtaaattccatcacccagaacttggtttccttacggagacgcctggcatgtacccaccagttcaaccaccacctatttcctcctcgcatccatatccacatcttgccaattgcaaatggngaggcctcctgtgggccaggtcatttt

SEQ ID NO: 258163 - DNA, 938 bp, Zea mays
  unsure (1)..(938): unsure at all n locations
gccccaacagggaatcccccccngccatcttttcccggtgcgcagccaccgaccccactgtggacgtgcccgacccaatgcaccgacccacacccgctgcgactgtcagcatcaaatatggcgggagcgaagggcgacctccagagagtaagaacgaggcgacacactatggacttgatatgactgagcaacaacatcttgagcattcgattccatggattgctgccaatgatgcatgctcggcgtgcgttatgtccttactgggctccgactgaatttaacgcaaagtctgcgcgacacacttccaatcgtggaacccagtcgtatcccagggatggagcggatgatcacctgtcctctggcaaaaccgaatggaagctagcactggtgcagtgcctagtgatgttcaaatataccttaaggggcacagaggatcagatcctgcaaatccagatgtgttgtgcagccaaaaggcaacagatcgtgtgctgggtgtttggaaatgtttggtaggttctgtttatatggatttttgtatgtaagattacattagttctggtggtcgtatgaagctttcatcccagatgttctttgcatcgatagaccagagaagtgagcgagcagctggggagactgcatgtacatcacttgtagctattattgcagactggttccaagcaaatcagaatattatgcctatccagtcacagtttgacagccttatccgtgaaggatcactagagtggagaaacctttgtgagaacgagacatatagaaagcgttttcctgataagcactttgatcttgaaactgtccttcataccaaaattcacccgctgacagtttcccccagcaatcttttatttgatctgtcttattatgactatggatgagacttttgtgatataattgatgagactatggatttaaatattgtt

SEQ ID NO: 258164 - DNA, 848 bp, Zea mays
  unsure (1)..(848): unsure at all n locations
caggcccggaannnnagggtcgagccacgcgttcgattaggccagggaccacagcatctggattggcgaaactgaaaccagtttttaaaaaggatgggactacaactgcaggcaattccagtcaagtgagtgatggtgctggagctgttcttctcatgaaaagatctgtggctctgaagaaagggctgcccattcttggtgttttcaggagctttgcggctgttggagtggatccagctgttatgggcgttggtcctgccgtggccattcctgctgctgtgaagtctgcaggccttgagattggagacattgatttgtttgaactgaatgaggccttcgcctctcagtttgtctattgctgcaacaaagtggggctggaccgttccaatgttaatgttaatggaggcgcgattgcccttggacaccctctgggtgcaacaggtgcccggtgcgtggctactcttctaaatgaaatgaagcgtcggggcagagactgcagatttggtgttgtcaccatgtgtatcggatctggaatgagggcagtagctgtgttcgagctatgttcggcctggctggaggtatcgaccatcactcgtcactgtaacccgatggtgatcggcgaccgtaacccgatggtgatcggcgaccgtgagcttccatgttattgcgttctaatacttgagatttttattatgactatgtatgagatattgtctcttattagtactgcatgatgagatgtgtcttattatgactatggatgatgacttttgtgatgcaattgatgagactatggatgtgaattattgtgatgtgattgtgtgtgactatgaatttaagaaacaaaa

SEQ ID NO: 258165 - DNA, 557 bp, Zea mays
cccttgccagagttctggcgggattgggatcgtcctattcctgcggaggcatggaaagcccataactgcataccagatgagcactatgttcagacgttgcttgcacaaagtggtctagaagaagaacttacgcggcgatcagtaacacatagtgcatgggatctttcagcttctaaagatcgtgaaagacgcgggtggcatcctgtaacatataaagtctctgatgctactccaagacttataaaatctataaaggatattgataatatatattacgagaccgaaaatagaagggagtggtgtacaagtaatggaaagccagccccctgcttcctttttgccaggaagtttacacgtggagctggtctgaagcttcttgattcatcactgatagcttcaaagtgatgaatattagtgacagatgcaagtgccttttgattgtttcacctttcgagaatatttcagttcacacaaatgtaaaggctaccgtgaccgacgcatgagacaagaagaacgggttagactttgtcgaaaccctcttcactagtggaggtatc

SEQ ID NO: 258166 - DNA, 463 bp, Zea mays
gtcgcgttcgcgttcctgccccgccacagccgaagctcccagcgtcctcctgcaggccgagctgaaggttcagcgcgccggtggagttcgacgacgaaactccgtcacgatcatacctctccgcctcccgtcttccagacgtctccaatcagggctcccagcgtctcggagaagaggagcagcacggcacggcggctgtggcgaggaaggctcctgtcccatcccaacccagttagcagccgcccaaggaggaggagattcaatcggcgtgcgggcgtccgcggtccatccatcgatccaattccaatctgccggtgagcagctcgttgagattcccaatcaacagctcgaatcgcctgctctcccatcctattgaatgaaactatggtctctgcgtcacggcttgttcgtggaggagaggtcgagaatttactaagtcaacatcttgttttaggtcattact

SEQ ID NO: 258167 - DNA, 902 bp, Zea mays
tcaacccacgcttccgcaaacacccaacattgtggaggcgccgtttgttttaaaagacatttgggaccatacaaaaataatgagtgtgaaacttgaggaccaagatgcgtttgaacgcgatttctgccagctgaagccttattacatggatacatgtggcataattcccgcctcgccagaggagtacccaattttgggactcaatcttctgaggctgttggttcagaatagaattgccgaattccacactgagctggagcttttacctgccaaggcactcgagcatccttgcatcaagcatgctgtagagcttgagcaatccttcatggagggtgcctacaaccgagtgttaagcgctcggcaagctgtgccacatgagacctacgtttacttcatcgaccttctcgccaaaacagttagagatgagatcgctgggtgcagcgaaaaggggtatgattctctatctgtgagtgatgcaaagcaaatgcttatgttcagttctgaccaagatctgcacgagtacatcactgaggagcacccggaatgggagattaagaacggtgctgtcttcttccagaaggcgaaggaatcacagccctgcaaggagatcccatccttgcagcttatcaaccagacgctcagctacgccagggagctggagcgtattgtatgatttaaaccaatccctggtggttctttccccccctgtggccgcttggcatggcttgtactgtcctttgcatttgggatgatctttgatcgcagctctcatctgactgaaacatcatgtgaatctctgaagggctcagtctctccggcattggtctgttaactccatttgtatttccccccattaactgcattgcttgaaaaatgccggcattcacccctgctgtgaactt

SEQ ID NO: 258168 - DNA, 513 bp, Zea mays
cccacgcgtccgccctcatcattgccgacctgccgtccgctcagccggccaggcggccagccgctgtcccgcctgtccgccgagcgcccgacgacccgagcaggcgagcagctccgcgccgcgcgacgtcccgagcagctcctgttcggtatccctgtttctcgcttggcggctgcctgaggcggccagcagccatggcgactcgcgccggacgaccgcccactccggcgcccgctcttctgctcctcctcaccttcctgtttctgttgcggggagttcttccgtcgcgagccggggacaccgtcgccgccggccgcccgctgtccgatgcgcagagcctcgtgtccaagcgtggcaagttcaagctcgaattcttccgtccaggtactgtcgcccctaattaaggtacacaatgtttgctaacgtcatcgactcgagccaggggagggttcagcgtggaggttcgtcgaggtctgctgctcgtagctcccgtcgctccactcaagatccaac

SEQ ID NO: 258169 - DNA, 535 bp, Zea mays
caggtttccggatgagttctattttaaaatgagcaacagttggactgttggtggaattcatagacctaagcctgaagataataagtatactgaagaggaacttcttctgttgaaaaataaagatatgggatatatccttcagagcgttcaaagtgaaaaaaagaaaatcgaaaagctaagctcaacactccatgaacttgataacaagcctcaaaacacgcatgtttatttcgctgaagacagagaagaagcgaaagaaatacaatcaaggataggacaaagcagcaacatgcctgatcttgacaacatcccttctcgtataaagaagaaaatagcctcttcgtacagggagttagaagagaggaagcagcggcttcaaaagcttgagatattgtatgcagacatggccttgcaacaagaattgaacaaacctggacgcaagaggagactgaaactccatgaagatgaagagacggacaatcaaacatcacggcctgtttataagtggcgagcacagaggaaacgatgagatgat

SEQ ID NO: 258170 - DNA, 877 bp, Zea mays
cccacgcgtccgcccacgcgtccgcccacgcgtccgcggacgcgtgggcttgttatgaaggtaccccatgtatcacggactgtgttatggctgagcttgaaaagctggggcagaagtatcgtgtggccttgagaattgccaaggaccctaggttccaaagattagcatgcacacacaagggaacctatgctgatgactgcattgtggagagggtcactcagcacaaatgctacatagttgctacttgtgatagagatttgaaaaggaggataagaaaggttcctggtgttccaatcatgtacatcacaagacataggtattcgatagaacggctccctgaggccacaattggtggagcaccaagaatctgatcggtgcagacatgagatgttctgggatgtaatactatggcggtacttgtccatctgaccaagtcactatttcatgtttcagtccacgacaaggactaggataagaacgctgctttctaggttgagcttactgtaactactaagaaatttttattatgtaccaaccttatcatttctacaatgttgcgggatgtctgaagtaattctttgttaaaagatcgggtatcctgctcccttttgcttctcaatcttgtgcgctacaagcccataatcccatttgagtggctcttcctgaacctcttatagaggatgaacataggagtccctcataatgtgaaacagaggcgacaacaatctgcaacagtcgttggatatttaggccttgtatttttacagtgttaaaacccccacccaaagtttagaacatgacatcaaacaagtatattgaaagagcagtgataaagtttagcacctattaaaaaaaaaaaaaaaaaaaaaggccggcc

SEQ ID NO: 258171 - DNA, 502 bp, Zea mays
ccagtgcaggcaggcaggcagaagaggagtcgccaggaagcaaccgcgagggagctgcaagcgagcacagcagcagcgcagaaaaaaaattctggaataatttttcttccctttggctccgtgaggttccggtgctcgctcgctcgcctgagcttcgatcgagcccggtcggcgaggcaggcgcccgatcgccgctctccgggagcttccggggggccgtcggatggagccgtacgcggcggcgaagagcggcggggccgacgccggcaccggcaccggactggaagactcgatgcggaggctggggctcggcgacgacggggaagcaggggaggagaagcttccggagcggccgggcgaggcggactgcgcctactacctccgcacgggcgcctgcggctacggggagcgctgccgctacaaccacccccgcgatcggccggccccggttaatggagttggaaagaccgcagttacagtggagtacccagagcgttctgga

SEQ ID NO: 258172 - DNA, 703 bp, Zea mays
tcggtcggccgccaccgccctgcttcatcgaggcccaagacccaatgtccgtttttgataaagaaaccaaacagcaacctagcagtcttccttcacttctctgcttccgacctcgtagcgaatcagatcggggggctagggttccggtgcgcctctacaaccggacacgaggctaggctgggcatggagggaatcgtgacggcccgaaagaggtcccggccagagacggcgaacggggctgccgccgccgggaagcgctccaaagccacggagtcatttcaaactggtctatcaagcaaatcgaagccttgcaccaagtttttcaggttataatcttaacctacccgaaataacatcagaatggtaacctgtatcttttttttcactcttcttacagcaaatcaattatctggaagtttcatttttatatgccaaaggtatatggaatacttgaatagtaacactaaaccgtgatatataagcttctctgtttcaatatatctcagtagatcaacttgctttttcccctctggttacttaagatgttagatgagtacgatacatatgtaacatatcaacgttcaatccactcttgctttggtgcatttagtatagacaggttacaaggtggtgtttggatcaaatggaaattctttttcagtgttcgaagaaattgttaaagtagattcaaatttcattttat

SEQ ID NO: 258173 - DNA, 487 bp, Zea mays
acacacgcgaccagtggaattcgacgacgaaactccgtcacgtcattcctctgcgcctcccgtctggccgtcttccagacgtctccaatcggagctcccagcgtctcggagaagaggagcagcacggcacggcggctgtggcgaggaaggctcctgtcctgtcccatcccaacccagcagccgtccaaggaggaggagatccaatcggcgtgcaggcgtccaccgtccatccatcgatccaattccaatctgcaggcctctgcgtcgcggcttgttcgtggaggagaggttgctgtggaacccgccgccagttagccatgtcgtcctccgtgctgagggctgcggccgacagggctattcgcaggcaggccctcacgctgacggacgccgcggcgtccaggatccggcagctcctcagcctcaggcagcggccattcctgcggctcggcgtcaaagcgcgtggttgcaacggcctctcgtacacgct

SEQ ID NO: 258174 - DNA, 828 bp, Zea mays
gcagcagctcgtgcatatatctagctaagccaattgcgcaccaccgcgcgcgccaccccaagatccccgtgccttttcagagcatctctccgtcgccgtgacaatgaagcagcagcgaggcgaccttgcgacctccgttcctctgcgctccggctgagttgctgatttgggataatcatgttctctctgagtgaatgaacatgtctgggaatgatgataagccacatgctgctgcaaacagaataaaggcagccacgttatcagtgactaagggattgagcagggctcaagctgaatgggctgcgactgctgctacccgcaatgtgaatgcctatgggcagaaggaagagggacgaagccgctggcaggagaggaagaaagccaagagtcagatgtatctgatgagtacagagaaggttgcgaagctgggcactgtgaagcaaaaagcttcagaaacttcttctgttggcgcatatacccaatgccagaagtgtttccagcatggtcactggacatatgagtgcaaaaagagcgggtgtacatatcacggccctcaagaacgtagcagcttaagaaccccaagctgaagaaatgcgtacctgtttcttatcgatttgagaatcctgatggtgatcggcgatcgtgagcttccatgttatgtgttgtgatacttgagacttttattatgactatatatgagatattggctattattatgactggatgagatgtgtcttattatgactatggatgagacttttgtgatgtaattgatgagactatgaatttcaatattgttatgtgattgtgtgtgagatgttttatgtg

SEQ ID NO: 258175 - DNA, 565 bp, Zea mays
agaagtgctcatatggaggtgctccaaaaggccctcagctaagagagctggagcgtggtgctgacattcttgtcgcaactcctgggagattaaatgacattttggaaatgaatagagtgagcctgcaccaagtatcatatctggtccttgatgaagctgaccgtatgctcagcaaatatcattagtacaagtatattagacccctccagctaccttaccgacgcatgaacgagaagacgggttagactttgtcgaagccctcttcgccagtggaggtatcgaccatcactcgtcactgtaacccgatggtgatcggcgaccgtgagcttccatgtgcttgtgttctgatacttgagactgtttattatgactatgtataagatactgtctcttattagtattggatgacgagatgtgtcttattatgactatggatgagacttttgagatgtcattgatgagactatggatttaaatattgttatgtgattgggtgtgaaaaataatgagaagcaaaaaaactgaaagacaagaaaaaaagaccctacaacggactgggatcatg

SEQ ID NO: 258176 - DNA, 1161 bp, Zea mays
  unsure (1)..(1161): unsure at all n locations
tanatcttccccggcaaccgcgtccgggcggccgctttcctttccttgggtagaccacccatcggctcgagccgcccgccggcaagcgaaagctaagcgagccaacccagccatggagaaggcgatctatcggtaacgggtcctcctggcgcaccttctcccctcctcctctaccatctcctcgcagcctcagcttgcgtgcctacaggacgccaatatgcatggccaagcgaggaggcttcaaggacacctacccagaggacctcctcactgttgttctcatggttcccttcccttcaaggtcaaccaccagtgttcatctgggctacaggaagtagccgatgtcgcagctgctataaaggctggttactatgacatagggattggtgctgctttgcaatccatgtccataaattccattgcgggggaaggacatgttaacccaaaaataagcgcattccagaaagcacaggattgtcttctgcccatgggaattacttctaaaaatgttgcccatcgatatggtgtaactaggcaagagcaagatcaggccgctgctgagtctcataggagagctggtgcagccacggcctctagaaaattcaaggatgagatcgtccccatgccaacaaagatcgttgatcctaaaactggagaggagaacgaagttgtgatattagttgatgatgggattaggccatctacttacctgctatattttttctgagcaaagtcggttaaacttgtgattctttgtatgttcaggtgcccggtgcgtggctactcttctaaatgaaatgaactgccggggcagagactgcagaatttggtgttgtcaccatgtggatcggatctggaatgggggcagcagctgtgttcgagctgtgttcggcccggctggaggtatcgaccatcactcgtcactgtaacccgatggtgatcggtgatcgtgagcttccatgttattgcattctgatacttgagacttttattatgactatgtatgagatattgtctcttattaggactcggatgatgagatgtgtcttattatgaccatggatgagacctttgtgatgtaattgatgagacttttgtgatgtaattgatgagactatggatttaaatattgttatgtgattgtgtgtgaaatgttttatg

SEQ ID NO: 258177 - DNA, 413 bp, Zea mays
tcgactccacgccgtttcttttctccaacacctcgtcgcttcttttctggcaactctaagatgtggggggcggcggccgccctagcttcatcgaggcaccaagactccgatctctgggtttgataaagaaaccaaacaacaacctagcagtcttccttcacttctctgcttccgacctcgtagcgaatcagatcggggggctagggttccggtgcgcctctacaactggacgcgaggctaggctgggcatggagggaatcgtcacggcctgaaagaggtcccggccggagacgacgaacggggttgcagccgccgggaagtcgctacaaagtggtggacgcctctctggccggttgcataatcgacaagggtggggtcaacactaagcagagttacaggcgtcaagctatcca

SEQ ID NO: 258178 - DNA, 516 bp, Zea mays
agacacaataggaggataccgacggcgcatgaatccagggagaggcttcgcaattcagatatcttcaagaggaaacttgatgatcccaacgatgagaagcaaaagaagtcagattggaactgaggctcaaaaggctctttttctcctgcattttcctgaaactacaaaaaatggtatttggggtggggtgaggggtgcatttgtagggagcccacaggtgaaactgaaatggagatgtggctgtctgcggtttcaaatgggtctgaatcgtcagacttctcttctggttccacacagtagatcttaggtatagctagatttttacattttagtgcgcacaaataacttgtcagccacagctaatgggacatatcacatatggcgactttgaggcttgtgaagccccgttgtgtactcgtacgaatgatatcattttgcagtctacaaatggcgagacggagcagcggagaggtgctgcatgagaatcgaggtgctctaggcaatgagatgccatgt

SEQ ID NO: 258179 - DNA, 451 bp, Zea mays
gctacgcatcttgttttatttgttctaaaccatatattttacgtggcagcacaaatgctacatagttgctacttgtgatagagatttgaaaaggaggataagaaaggtatgtttggtgtttagtgctcatagctcaggacatgcttctaatatcgcaaaagctttttcatgcatgcttgtaccatgggcatttccccaatcttgcaggttcctggtgttccaatcatgtacatcacaagacataggtattcgatagaacggctccctgaggccacaattggtggaggtatgtgatatcttcatgtgcagacatgagatgttctgggatgtaatactatggcggtacttgtccatctgaccaagtcactatttcatgtttcagtccacgacaaggactaagataagaacgctgctttctaggttgagcttactgtaactactaagaaatttt

SEQ ID NO: 258180 - DNA, 419 bp, Zea mays
ctcggagccacattatgcatctggagtgaacctttcacaaagtgctccttccactaatcaagtttctcaggctgccagtggaaaccaaatgtcgacagaagcatatcgtgctaagcatgagattaccatcatcggcaacgagtcacctgcaccattcatgacatttcagtccacatgcttcccatcagatattctaagggaggttctgcaagcaggattctctgcaccaactcctatccaagctcagtcatggccaattgctatgaagggtagggatatagtagctgtggcaaagacaggttcaggcaaaacactgggctatctcctcccagggtttcatactcctgagagcgcctgagatcatcaattcacaagggaaggctccaacagtattagttttatccccaaacagggaattg

SEQ ID NO: 258181 - DNA, 284 bp, Zea mays
aaccgccaccgtttcttgatctcccatcttcatcttcttcgtagcgtcggcgctccatcttctgttccctcccttagtcgcgctcagcacgcgggtgacggcggcagcggcgacgctcatgatcgggctctcagcgacgagcttcattatcgcactctgtgccaggtgggggttcagcgtggaggttcatcgaggtctgctgctcgtagctctcgtcgctccactcaagatccagcagaagtggagcaactgcgagaagaacttaggcgacatcaagattactt

SEQ ID NO: 258182 - DNA, 263 bp, Zea mays
tccaagcgtggcaagttcaagctcgaattcttccgtccaggtacacaatgtttgctaacgtcatcgactcgagccaggtgagggttcagcgtggaggttcgtcgaggtctgccactcgtagctctcgtcgctccactcaagatccagcagaagtggagcaactgcgagaagaacttaggcgaaaccctctttgctagtggaggtatcgaccatcactcgtcaatgtaacccgatgctgatcggcgaccgtgagcttccatgtt

SEQ ID NO: 258183 - DNA, 315 bp, Zea mays
gaacaagaagaaacatgcagacacatggtatttatctgtgtagaaaccttatcaatcttttttcgactgtataataactattttctgtaggataactacaatgcaaacttctaacgcatgagaaaatgtaattgatattttatgcctacagacacggagtcatttcaaactggtctatcaagcaaatcgaagccttgcaccaagtttttctggctagtagtcttaacctacccgaaataacatcagaacggtaacctgtatcttttttcactcttcttacaacaaatcaattatctggaagtttcattttatatg

SEQ ID NO: 258184 - DNA, 903 bp, Zea mays
gaattcggctcgaggccggcaggtgcgcttctccaagcgccgctcggggctcttcaagaaggccttcgagctctccctgctctgcgacgccgaggtcgccctcatcgtcttctcccccgccggcaagctctacgagtacgcctccaccagcatagaggatacatataaccgctatcagcaattttctggagaaggaaggaatataaatgacgatcgaaatagaaacgataacaaggatgaagcttcttcagatttgcagttgatgctgagcaagattgcgacctggtctccccagagcaatgctgacgaatcagatgtagatgagctggagaagctggaaaatcttctgagaaatgctttgaaggatacgagatccaggaagattcagatgttggcgaaacaaaacagcggagctagtacaagcggccagaaaagtccggagcaaggaacggcgtgagcacggatctgtccagcgtccacctacctgggattgctcttgcttccccttgccgatggatgcttgtactgattatgaccttgtgggttgcgagaccctgtgctagctttgggcctgccaacctgcagtgtccctggaggggacggagctagtgtatgtagtttgatgttccctttgtgtgttgtgatatgcagcctacctaatggccagagcttggtgctgcaaatcctgcagctgatctggttgcgtttcatgcttgacagtatatacagcatactactgtgttttaattccttacaaacacttgctcagatgaaacaactgggctaggaaaatctatcgagcaaaatgatggtattgcataatagttcttgggtgttcactaggtttgtgaaaaaaaaaaaaaaaaaaaaaaaaaaaaaaaaaaaaaaaaaaagggcggccgc

SEQ ID NO: 258185 - DNA, 468 bp, Zea mays
tccctcgcgtccgcccacgcgtccgcccacgcgtccactttcactctatcatcacctaccaggctactagcataacaagtcgccaatccctcccccgagagagtcagaaatggcatcacctcatagttgctttcgcggctggcagagcacgagccacgtcgcacttgcgctggtgtccgtgctgatcctgagctcggcacgtctctccgcgggcggcaggagcctgctggagctgtacaagccgccggccagcgcgatcctgacgtaccacaacggcgccgtgctgcagggccgcatcccggtgtccataatctggtacggccgcttcacgccagcgcagaaggccgtggtcaccgacttcctcgggtccctcaccaccgccgccgtctcgccgctggcaccgtccccgtccgtgtcgcagtggtggagcaccatcgaccagctgtacctctccaaggcgcggggcat

SEQ ID NO: 258186 - DNA, 1272 bp, Zea mays
ctcatagtcataaaccactcctgcactctcactcgattcacctctaccagcaactcgccacttcctccctgagaaattaaactgagaaatggcaccgcctcacagtcacagaagcttccgcggctggcagaacgcgagccacgtcgcgcttgtgctggtgtccgtgctgttcctgagcaaggcacgtccctccgcgggcgccaggagcctgctggagctgtacaagccgccggccagcgcgctcctcacgtaccacaacggcgccgtgctgcagggccgcatcccggtgaccatcctctggtacggccgcttcgcgccggcgcagaaggccgtggtcaccgacttcctccagtcgctcaccaccaccgccacctcgccgacggcgccgccgtccccgtccgtgtcgcagtggtggggcaccatcgaccagctgtacctgtccaaggcgcggagcggcggcggcagcgacgacggcagcgcgcaggtggcgctcgtggggcaggccgccgacgaagggtgctcgctggggaagcgcctcgcgctgtcccagctcccgcagctggcgggcgcgggccgggccggcggccgagggcggggtcgcgctggtgctcaccgcgcaggacgtggccgtggacgggttctgcacgagccgctgcggcctgcacggctccgacgccggggccggggccgcctacgtctgggtcggcaacgccgaaacgcagtgccccgggcagtgcgcgtggccgttccaccagccgctgtacgggccccaggcgccggcgctcgtgccgccgagcggcgacgtcggcatggatggcatggtggtcaacatcgccagcatggtcgccggcgcggtcaccaacccgttccgcgacgggttctaccagggcgacaaggacgcgccgctagaggccgccaccgcctgcacgggggtctacggcagcggcgcctaccccggtttcgcaggcaacctggcggtggacggcaccacgggggcgagctacaatgccaatggtgccaacgggaggaagtacctgcttcccgctctgttcgaccctgcaacctctacgtgttcgactttggtttaacgcccaaggaaacagtcctgtcaactgtgtagtaacgctgtgtatatagtatgagtttgataaggagtgtactgtggttagtgttgatatctgcatcataatacaatataaaaaaacatatgtgtgtggtgcatgagggagcaaattactcatataaatcatgctacgaaacttctaagtaaga

SEQ ID NO: 258187 - DNA, 634 bp, Zea mays
tgtgaacggcacttgcacatgggtaagccgatcctaagggacgggggaaacccggcagatagcgcgatcacgcgcgtcacccgaaagggaatcgggttaagatttcccgagccgggacgtggcgcctgttgccgtcccaaaccgccgccacgttccaggccacaagctaccctctgttcggcgcgctgagcggtctggacgagagcaccatcgcctcgctgcccaagacgcagagggagcccctctccttcttcgggagcgacttcgtgaccccgaagcaggagaaccagacgctgcgccccttcttcgacgagtggcccaagtcgagggactcgtggccggagctgaacgaggacaacagcctcggcttctcggccacccagctctccatctccattcccatggcgacctccgacttctccaacaccagctccagatcgccgggtggaataccgtcgagatgaacgagtaccgtgcatgtggatcccagcgtcttagggttgacgactcttcggtgctggcctcgtcgtatcatgctcctaaattttcgaacgatatatgccttatgtaacgctatttctctcattgttacaacaccctttacccgtttggaattgtgttgaagtggatggtc

SEQ ID NO: 258188 - DNA, 415 bp, Zea mays
agcatggtcgccggcgcggtgaccaacccgtccgcgacgggttctaccagggcgacaaggacgcgccgctggaggccgccactgcctgcacaggggtctacggcagcggcgcctaccccggtttcgcaggtaacctggcggtggaccccgcgacgggggcgagctacaatgccaatggcgcgaatgggaggaagtacctgcttccggctctgttcgaccctgctacctctacgtgttcgactttggtgtagtaaacaatcctgtcgggattgtgtagcaaccctgtgtatatagtatagtatgaggattaaggagtgtactgtgctaagtgttgataactggatcataacacgacataaaaaaaaaaaagttaccgtccccttttaaaaaactttttacttgttggaccggggga

SEQ ID NO: 258189 - DNA, 694 bp, Zea mays
cggacgcgtgggcggcaacggcggcggcgggttaggtgctggtgctggtggtggcacgggcggcctggggcccacctctcagctgcacatggacagtgccgctgcctacgcgactgctgccggtggagggagcaaagatctcaggtactctgcatacggggtgaaatctctgtcggacgagcacagcacgctcttgtcgggcggcatggatccgtcgatgatggacaactcgtggcgcctgctgccatcccaaaccaacacattccaagccacaagctaccctctggtcggcgcgctgagcgggctggacgagagcaccatcgcctcgctgcccaagacccagagggagcccctctccttcttcgggagcgacttcgtgaccgccgtcaagcaggagaaccagacgctgcgccccttcttcgacgagtggcccaagtcgagggactcgtggccggagctgaacgaggacaacagcctcggctcctcggccacccagctctccatctccatccccatggcgccctccgacttcaacaccagctccagatcgccgaatggaataccgtcaagatgaacctgagtaaccatgcggaccccaacatctcagagctgacgactctttgctgctggcctggcctcatcgtaccttgaggcgtcaaggaatacttcattaccactagtatcatgctcctgg

SEQ ID NO: 258190 - DNA, 826 bp, Zea mays
cggacgcgtgggcggacgcgtgggtttggccgccccccacaaggccactcacccaaaaaatctccactcctcgaccgcaccgagcagaggatcacatggcatccgccgtttcgcttctcctctcgcccccgcgcctgctccaccgcgacggcacatcccgcctcctcagcatcccgcaccggcgggtcctcctcgccgcccccaacaacgcgacccctcgtcggctcctggcccccgcgccgcgcgccttcaacaacaacgacaacagcggggccgtggaggcgcccgaccgcctcgtggccgcggtcgcctacctatacccgttcctcgacggcgcgcaccacgggcgcttccttctcacgcagttccccttcttcggcgcgctgctccgcccgctggcccccgcggctcggctcttccactcatcgccgctcacgcccttcctcctcttcctcacgctctacttcgccgttgtgcggaaccagcaggcgttctcccgcttcgtccgcttcaacgcgatgcaggccgtcgtgctcgacggtgctgctcatcgttcccgacgtgctcgcgcagtcgttcgcgccctccggtggggttgggttcgagatcttccagagcatggagagcacggtcttcctcgtcctgctcgtcgccttggtgtacggcgggggcgcctgcctgctcgggaagacgccacgtctgcgccattgtcgcagatgcagcggagcgccaggtgatgtgactacaattcgtttcctgcggaccatgttgatggaaagggaatctgatgatatgcagaaaacatcccaatggttcgttggcgctt

SEQ ID NO: 258191 - DNA, 513 bp, Zea mays
gcaaaaccataatcgcgagcccgggcggagcggccggggtttcattattggtggttgggttaatattcaaatgagaactttgaaggccgaagaggagaaaggttccatgtgaacggcacttgcacatgggtaagccgatcctaagggacgggggaaacccggcagatagcgcgatcacgcgcgtcacccgaaagggaatcgggttaagatttcccgagccgggacgtggcggcagacggcgacgttaggaagtccggagacgccggcgggggcctcgggaagagttatcttttctgcttaacggcccgccaaccctggaatcggttcagccggaggtagggtccagcggccggaagagcaccgcacatcgcgcggtgtccggtgcgcccccggcggcccttgaaaatccggaggaccgaattccgtccacgtccggtagtactcataaccgccacctatatatatacttgtgttttagatagccactaaggaccagcaaaccggacgcgtggg

SEQ ID NO: 258192 - DNA, 498 bp, Zea mays
gagattttggactacgattcgtgcaaaacactgaaaaagaaaaggccatcgaaaacgccgccgccgcctctgatgctttccgccgtgcgatgtggtgcccttcgccggtggcgcccgccgccgcacctcctcccacgcatcctttcctcctcctttggtacatctcccgcgcgaccacaggtgggggcgctgctggagctcccggaggtggagaaggtactgcgcgacgtacgagcgggtggcgtgcgcgtattccccgtcggcgagagcggtctgcacggcggggcctgcgccgactacatggtcgtcgccacaggccgctccgattggcacgtccgtaacatcgcgcatgcgctcctctacaagataaagcaaaagcagaagggctctgatagaatattgatgccaagtgtagaacgtcagcaagccgggaaaatgagctgtcattgattctggaagcataatcatccatgcacttgaagaatgggcaagatagta

SEQ ID NO: 258193 - DNA, 282 bp, Zea mays
cgcccgggcccccgggaccgcgtacgtctgggtcggcaactccgccacgcagtgccccgggcagtgcgcgtcgccgttccaccggcctctgtacggtccccagacgccggcgctcgtgccgccgagcggcgacgtcggcgcggacggcatggtgatcaacatcgccagcatggtcgccggcgcggtgaccaacccgttccgcgacgggttctaccagggcgacaaggacgcgccgctggaggccgacactgcctgcacaggggtctacggcagcggcgccta

SEQ ID NO: 258194 - DNA, 1277 bp, Zea mays
ccatcctctcctgtgggcgctccctctccccggcccccaaatcaccgcgcctccctcgccacgcctcacagggccggttgcgtaggagaaaggagaaaggaaggaggggaggcggtcgtcgggcgagatgagcgactccttctgccccgactgcaagaagcatacggaggtggcgttcgaccactcggcgggggacatggtgtgcaccgagtgcggcctcgtcctcgaggcgcactccgtcgacgagacctccgagtggcgcaccttcgcgaacgagtccaacgacaacgaccccgtccgtgtcggcggccccaccaacccgctcctcaccgacggcggcctctccaccgtcatcgccaagcccaacggcgcccagggcgacttcctctcctcctccctcggcaggtggcagaaccgcggctccaaccccgaccgatccctcatcctcgccttccgcaccatagccaacatggctgacaggctaggtcttgtggctactattaaggaccgagcaaatgaaatcttcaagaaaattgaagatctcaagtctattaggggaagaaatcaagatgccatattagccgcatgtctatatattgcttgtagacaagaagatcgccctagaactgtgaaagaaatatgttcggttgctaatggggccacgaagaaagaaattggcagagccaaagaatttatagtgaaacaactggaagttgagatggggcaatctatggagatgggaaccattcatgctggagattttctgaggcgtttctgttcaactcttggaatgaccaatcaagctgttaacgcagccaaggaggcagttcagcgctcagaggagcttgatataaggaggagcccaatctcaattgcagccgccgtcatttacatgataacccaactctcagaggacaagaagccacttaaagatatatccttggctactggtgtggcagaaggcaccatcagaaattcgtacaaggatctgtatccctacgcctcaaggctcatcccgaatacctacgccaaggaagaagacctgaagaatctctgcacaccttaggaagctttactttttttcccttctgttatataaatcggaattagatttgtcaaagaggagtgagtgaagttgttcctggttgtgaccgactgtactgagcaatgtgtcgtcgccggcgcgcttaactttgtggatggaccaatgagaacagaagttatcatcatcagatcgaatttcttttcagagcaaaaaaaaaaaaaaagggcggccg

SEQ ID NO: 258195 - DNA, 430 bp, Zea mays
gccacttaaagatatatccttggctactggtgtagcagaaggcaccatcagaaattcgtagagggatctgtatccttatgcctcaaggctcatcccgaatacctacgccaaggaagaagacctgaagaatctctgcacaccttaggaggcttacttttttccccctttctgttactacataattcggaattagatttgtcaaagaggagtgagtgaagttgttcctcgttgtgactgtaccgggcaaggtgtcgtccccgccgtgcttaactttatgatggaatttcttttcagagcacctaccacctgaagatttgtgggatacgtatactcacttcggaaagaatgtagatagcaagcagttggacaagcacaagattttaatttaaaacatgattttgttctccaaaaaagaaagagatgggggtgg

SEQ ID NO: 258196 - DNA, 317 bp, Zea mays
gcctcgtccgcttctctctcacccttccttcccctcctctcctgtggatgctccctccctctccggctctccgcctctcccccgccccccaagcccaaatcaccgcgcctcgccccacagcaccggttgcgtgggaggagggagggaggaaggaaggaggggaggcggctgtcgggcgagatgagcgactcctactgccccgactgcaagaagcatacggaggtggcgttcgaccattcggcgggggacacggtgtgcaccgagtgcggcctcgtcctcgaggcgcactccgtcgacgagacctccgagtggcgtac

SEQ ID NO: 258197 - DNA, 492 bp, Zea mays
gaattcggctcgagcggctcgagcggctcgaggaccgtatgcggtcacattttctgccagccgtgcatcaaggctgccattaaggcccagaagaagtgccctacctgccggaggaagctcactccaagacagcaacaccgggtgtacctcccatcgccttagtagcccagtgcagagtcattttgctacaagttctgccgtgccgggggctgtatgttggaggcaactgggggggggggggggggagcatagaggtcctgtttggttcgttcatttagtgtcataatcagttaacagggtaatctattaccattgctttatgtttggttagactatactgtaaacgattgcagtgggatgcaataccagccaatacaaaattattgccgctgctttttgactgttagccaactccgatccgtctttttggatcccacgttgcaaccaaacatacaccggtaaccgttcacagcaaaggatagcaggtgttat

SEQ ID NO: 258198 - DNA, 669 bp, Zea mays
ctatgacgtcgcatgcacgcgtacgtaagctcggattcggctcgagcagaagaaggccggcgccatgaacgcgctgacccggtgctccgcggtgctgtccaactcgcccttcatcctcaacctggactgcgaccactacatcaacaactcgcaggcgctgcgcgcgggcatctgcttcatgctcggccgcgacagcgacacggtggccttcgtgcagttcccgcagcgcttcgagggcgtggaccccacggacctgtacgccaaccacaaccgcatcttcttcgacggcacgctcagggcgctggacggcatgcagggccccatctacgtgggcacgggctgcctgttccgccgcatcacgctctacggcttcgacccgccgcggatcaacgtgggcgggccgtgcttcccgtcgctgggcggcatgttcgccaaggccaagtacgagaagcccgggctggagctcaccaccaaggccgccgtggccaagggcaagcacggcttcctgcccatgcccaagaagtcgtacggcaagtcggacgcgctcgcggacaccatcccgatggcgtcgcacccgtcgccgttcgcggccgccgactagtgagctcgtcgacccgggaattaattccggaccggtacctgcaggcgtaccagctttccctatagtga

SEQ ID NO: 258199 - DNA, 2819 bp, Zea mays
cccacgcgtccgcccacgcgtccgcccacgcgtccgcccacgcgccgcccacgcgtccgcacctatcatcgccgctgcgccgtctcctccgctcccgtcgtccggaaagatggcgtcccacattgttggataccctcgcatgggccccaagagggagctcaagtttgcacttgagtctttctgggatgggaagagcaccgctgaggatctggagaaggttgctaccgacctcagggccagtatctggaagcagatggctgatgctgggatcaagtacatccccagcaacactttctcgtactatgaccaggtccttgacaccactgccatgctcggcgctgtccccgaacgttactcatggactggaggagagattggatttgacacctacttctccatggccaggggcaacgccactgttcctgctatggagatgaccaagtggtttgacaccaactaccactttattgtccctgaattgggcccaaacaccaagttctcctatgcttctcacaaggctgttaacgaatataaggaggctaaggcgctcggtgttgataccgtgccagtacttgttggaccagtctcgtacctgttgctctcaaagcctgccaagggtgtggagaagggattccctcttctttcccttcttagcagcatcctcccagtctacaaggaggtcattgctgagttgaaggcagctggggcttcatggattcagtttgatgagcccactcttgtcctcgaccttgattctgacaaattggctgcattctctgctgcatacgcagaacttgaatctgtactttctggattgaatgtgcttgttgagacttactttgctgatgttcctgctgagtcctacaagaccctaacatctctgagcagtgtgactgcttatggttttgatcttgtccgtggaacccaaactcttgggcttgtcacgagtgctggtttccctgctggaaagtacctctttgctggtgttgtggatggacgcaacatctgggctgatgatcttgctacatctctcagcactctccagtctcttgaggctgttgttgggaaggacaagcttgtcgtatcaacttcctgctcgctcatgcacaccgctgtggatcttgtgaacgagactaagcttgacagcgagattaagtcttggcttgcttttgctgcccagaaggttgttgaggttgatgctcttgctaaggcattggctggtcaaaaggatgaggcttacttcgcagcaaatgctgctgctcaggcctcgaggaaatcctcaccccgtgtgaccaatgaagaagtccagaaggctgctgctgctctcaagggctctgaccaccgccgtgcgaccaacgttagtgctagattggatgcccagcagaagaagcttaacctccccatccttcccaccactacaatcggttcgttcccacaaaccgttgagctcaggagggtccgccgtgagtacaaggcaaaaaagatctctgaggaggaatacgtcactgccatcaaggaggaaatcaacaaggtcgttaagctccaagaagagcttgacattgatgtgcttgtgcatggcgagcctgagagaaacgatatggttgagtacttcggtgagcagctctccggttttgcgttcactgccaatggctgggtgcagtcttatgggtcaaggtgcgtcaagcctccgatcatctacggtgacgtgagccgccccaaccccatgaccgttttctggtcgaagacggcacagagcatgacgtctcgcccaatgaaggggatgctgactggcccagtcacaatcctcaactggtccttcgtccggaatgaccagccgaggtttgagacttgctaccagatcgctcttgcgatcaagaaggaagtcgaggatcttgaggctggtggtattcaggttatccaaatcgacgaggctgcactgagagaagggctgccgctccgcaaggctgagcatgcattctacttggactgggctgtccactccttcagaatcaccaactgcgagatccaggacaccacccagatccacacccacatgtgctactccaacttcaacgacatcatccactcgatcatcgacatggacgcggacgtgatcaccatcgagaactcgcggtccgacgagaagctgctctccgtgttccgcgagggtgtcaagtacggcgcgggcatcggccccggtgtctacgacatccactcccccaggatcccgtcggctgaggagatcgccgaccgcatcgacaagatgctggcggtgctggacaccaacatcctctgggtgaaccccgactgcggcctcaagacccgcaagtacacggaggtcaagcccgccctgaccaacatggtctccgccgctaagctcatccgcacccagctcgccagcgccaagtgagcaccttttttttgcctttttcgtttccgaggagggcgtcgtcgatgccaatttgtttccaataaacagggctgtgcccgccgttctgttgtactccgtctgtggttaggttagtagttttcttgatctcgcccccacgcggtacctgttttactactctctgtttggtggtttctgaggaagttgcccgtgtacttgtatcgtaaaaaccgagtgggacatctgcatcgtttcatctgccaccactcccccgaggtgtgctgtttcacggctcaaagaaagatgtcgtatcggcaagctaaatgctccactgtgtgcaactatatacacttgcattgccaggttttttcttcttccagttggttgcaatcagatggtttgtggtagatcagcagggtactctgttttg

SEQ ID NO: 258200 - DNA, 901 bp, Zea mays
tcgctgacgcgtgcgggaaccaccagcctaagtttgagacatgctaccaactagcgattgcaatcaaaaaggaggttgaagatcttgaggctgatggtattcaggtgatccaaatcgatgaggcagctctaatggagggtctggcactacgcaagtcacatcatgcattctacctggactgtactgtccactctttcaagatcaccaactgccgatttccagacaccacacagatccacacccacatgtgctactccaacttcaacgacatcatacactccatcatcgacatggatgccgatctgatcactatcgagaactcccggtctgacaagaagctactgtccgtcttccgcgagggtgcgaagtacggagctggaatcggtccaggtgtctacgacatccactcgcccaggatcccctccaccgaggagatcgcggaccgcgtcaacaagatgctcgccgtgctcgacaccaacatcctctgggtgaaccctgactgcggtctcaagacacgcaagtacacggaggtgaagcctgccctgaccaacatggtctccgccaccaagctcatccgcacccagctcggcagcgcgaaatgagtcagatttggtagatccatggtttgttgaacacaaaagccagcagggtcatttgtttcgaataatttgggtccttactcctgttccatggcgttaggttagcctcattggtgttggtggggtacggcgttacgtgtccgtgttctaagtttggagtgtgtgtttctcttttttgttggggtttgtgtgctttggttatataaacagaaatggagtacgcagtcttcgaatcgcaaaaaaaaaaaaaaaaaaaaaaaaaaaaaaaaaaaaagggcggcagctcgcgatctagaactagt

SEQ ID NO: 258201 - DNA, 574 bp, Zea mays
  unsure (1)..(574): unsure at all n locations
cccacgcgtccgatcatcaccagttcaccacccacctcccactcccagttcaccccgtcgtcctcggcgccaccactcctcgtcccccggcgctactcccccgctccacggtccaaggaaagatggcgtcccatattgttggataccctcgcatgggccccaagagggagctcaagtttgccttggagtctttctgggatgggaagagcagcgccgaggatttggagaaagttgccactgacctgaggtctagcatctggaagcaaatgtcagaagctgggatcaagtacattcccagcaataccttctcgtactacgaccaggttcttgataccacggccatgcttggcgctgtcccagagcgctactcttggactggaggcgagattggcttgagcacctacttctctatggccaggggaaatgccactgtccctgccatggagatgaccaagtggtttgatacaaactaccacttttatgtccctgaaccttggtccaagccccaagttcacatacgcttctcacagggctgnttctgagtacaaggaggcataggcgctcggcattgata

SEQ ID NO: 258202 - DNA, 332 bp, Zea mays
cgcttgccgtagcggtccgttattctagggtgcccccacgcgtcccaatttgtttccaataaacagggctgtgcccgccgttctgttgtactccgtctgtggttaggttagtagttttcttgatctcgcccccacgcggtacctgttttactactctctgtttggtggtttctgaggaagttgcccgtgtacttgtatcgtaaaaaccgagtgggacatctgcatcgtttcatctgccaccactcccccgaggtgtgctgtttcacggctcaaagaaagatgtcgtatcggcaccctcaaaaaaaaaaaaaacaaaaaaaaaaaaaaaaaaa

SEQ ID NO: 258203 - DNA, 566 bp, Zea mays
cctgagacagtcagacgtcccgtgctcgtcgtcaccacccacatctcagttcaccccggcgtcgtcctcttcccccggcgctactctcccgctccacgttccaaaggaaagatggcgtcccatattgttggataccctcgcatgggccccaagagagagctcaagtttgccttggagtctttctgggatgggaagagcagcgccgatgatttagagaaagttgcctctgacctcaggtctagcatctggaagcaaatgtcagaagctgggatcaagtacattcccagcaacaccttctcgtactatgaccaggtccttgataccacggccatgcttggtgctgtcccagagcgctactcttggactggaggcgagattggcttgagcacctatttctcaatggccaggggaaatgccactgtccctgctatggagatgaccaagtggtttgatacaaactaccactttattgtccctgaacttggcccaagcaccaagttcacatacgcttctcacaaggctgtttctgagtacaaggaggcaaaagcgctcggtattgatactgt

SEQ ID NO: 258204 - DNA, 670 bp, Zea mays
  unsure (1)..(670): unsure at all n locations
gtctacaaggaggtcattgctgagttgaangctcggggggtgctgctaagaagggaaagaagagggaatcccttcttagcagcatcctcccagtctacgaggaggtcattgctgagttgaaggcagctggggcttcatggattcagtttgatgagcccactcttgtccgcgaccttgattctgacaaattggctgcattctctgctgcatacgctgaacttgagtcggctctctctggattgaatgtgcttgtcgagacttactttgctgacgttcctgcttgagtctacaagaccctcacatcaattgtgtggggtgactgcttacggtttcgatctggtcccgtggagccaagacccttgatcttattcaggagcagcttcccctcggggaagtacctcttccctggtggtgggggtgggacccaacatttgggctgatgatcttgctgcatctcttagcaactcttcactctcttgaggccgttgctggcaaggacaaacttgtggtgtcaaccctcctgctcactgatgcacaccgccgttgaccttgtaaatgagactaagctggatgatgagattaactcatggcttgcattcgctgcccaaaaggttgtcgaggttaatgcccttgccaaggctttggcaggccaaaaggatgaggtctactt

SEQ ID NO: 258205 - DNA, 341 bp, Zea mays
ggttgccctggcggtactagtctagaattcccgggccctcacctatcatcgccgctgcgccgtctcctccgctcccgtcgtccggaaagatggcgtcccacattgttggctaccctcgcatgggccccaagagggagctcaagtttgcacttgagtctttctgggatgggaagagcaccgctgaggatctggagaaggttgctaccgacctcagggccagtatctggaagcagatggctgatgctgggatcaagtacatccccagcaacactttctcgtactatgaccaggggcaacgccactgttcctgctatggagatgaccaagtggtttgacaccaa

SEQ ID NO: 258206 - DNA, 1913 bp, Zea mays
gaattcccgggtcgacccacgcgtccgcccacgcgtccgcggacgcgtgggcggacgcgtgggcggcagacggcacacacaccacaccacacctcctcgcttccactccgctcgtctgacatctcgtcccgtcctttcgtttcgaagcctcgcgagccccgacgatggccaccgccgcggtgtcggtcgacgagaagctcgacaagcttcgcgccgaggtcgccaagctcgaccagatcagcgagaacgagaagtccgggttcatcagcctcgtgtcacgctacctcagtggggaggcggagcagatcgagtggagcaagatccagacccctacggatgaggtggtggtgccctacgataccgtcgcgtcgcctcccgaagatctcgaggagacgaagaagctgctggataagctcgttgtgctcaagcttaacggagggctcgggacgaccatgggctgcactgggcccaagtctgtcattgaagtccgcaatgggttcacattccttgaccttattgtgattcaaattgagtccctgaacaagaagtatggatgcaatgtccctttacttctgatgaactctttcaacacccatgatgacacacagaagattgttgagaagtattccaactccaacatcgaaattcatactttcaatcagagccagtatcctcgcattgttaccgaggacttcttgccacttcccagcaaagggaaatctgggaaggatggctggtatcctcctggtcatggtgatgtgtttccctctttgaataacagcggaaaacttgacatcttattggctcagggcaaggagtatgtctttgttgcaaactcagacaacttgggtgctatagtcgacatcaagatcctaaaccatctgatcaataaccagaacgagtactgcatggaggttactccaaagacgctggctgacgttaagggtggcactctcatctcttacgaaggaagagttcagcttttggagattgcccaagtacccgatgagcatgtgaatgaatttaaatcaatcgagaagtttaagatattcaacactaacaacttgtgggtgaaccttaaagctatcaagagactcgtagaggctgaggcacttaagatggaaattattccaaaccccaaggaagttgatggtgtgaaagtccttcaactcgaaaccgcagctggtgcagctattcggttcttcgacaaagcgattggaattaatgttccccgctcaaggtttctcccagtgaaggctacatctgatctgttgcttgtgcagtctgatctttacaccttggttgatggctttgtcatccgcaacccatccagagcgaatccagctaacccttcaattgagcttggacctgagttcaagaaggttgccaatttccttgctcggttcaagtccatccccagcatagttgagcttgacagcttgaaggtttctggtgatgtctggtttggctctggaattacactcaagggcaaggtgacaattatcgccaagcctggagtgaagttggagattccagatggagacgtacttgagaacaaggatgtcaatggccctgaggatctttaagcaatgtttgtcatcaccagtttttcccaaggacatgtcacaggaactgccaagcctaatcactcctactgagctctatattttgtaattttcatgtgcattccgattccgctgtgagggtcatgtgagcccgctagagaataattgtaatcttctttgctgcgtctgtacttctgtttttgtgcgccaggacgtatatttttactgaaatgatactccgaagagcacgtatggtgtcttaccgggaggactcattgccgccaaaaaaaaaaaaaaaaaaaaaaaaaaaaaaaaaaaaaaaaaaaaaaaaaaaaaaagggcggccgc

SEQ ID NO: 258207 - DNA, 1844 bp, Zea mays
gcaggaccgggtccgaattcggctcgagcggcagacggcacacacaccacaccacacctcctcgcttccactccgctcgtctgacatctcgtcccgtcctttcgtttcgaagcctcgcgagccccgacgatggccaccgccgcggtgtcggtcgacgagaagctcgacaagcttcgcgccgaggtcgccaagctcgaccagatcagcgagaacgagaagtccgggttcatcagcctcgtgtcacgctacctcagtggggaagcggagcagatcgagtggagcaagatccagacccctacggatgaggtggtggtgccctacgataccgtcgcgtcgcctcccgaagatctcgaggagacgaagaagctgctggataagctcgttgtgctcaagcttaacggagggctcgggacgaccatgggctgcactgggcccaagtctgtcattgaagtccgcaatgggttcacattccttgaccttattgtgattcaaattgagtccctgaacaagaagtatggatgcaatgtccctttacttctgatgaactctttcaacacccatgatgacacacagaagattgttgagaagtattccaactccaacatcgaaattcatactttcaatcagagccagtatcctcgcattgttaccgaggacttcttgccacttcccagcaaagggaaatctgggaaggatggctggtatcctcctggtcatggtgatgtgtttccctctttgaataacagcggaaaacttgacatcttattggctcagggcaaagagtatgtctttgttgcaaactcagacaacttgggtgctatagtcgacatcaagatcctaaaccatctgatcaataaccagaacgagtactgcatggaggttactccaaagacgctggctgacgttaagggtggcactctcatctcttacgaaggaagagttcagcttttggagattgcccaagtacccgatgagcatgtgaatgaatttaaatcaatcgagaagtttaagatattcaacactaacaacttgtgggtgaaccttaaagctatcaagagactcgtagaggctgaggcacttaagatggaaattattccaaaccccaaggaagttgatggtgtgaaagtccttcaactcgaaaccgcagctggtgcagctattcggttcttcgacaaagcgattggaattaatgttccccgctcaaggtttctcccagtgaaggctacatctgatctgttgcttgtgcagtctgatctttacaccttggttgatggctttgtcatccgcaacccatccagagcgaatccagctaacccttcaattgagcttggacctgagttcaagaaggttgccaatttccttgctcggttcaagtccatccccagcatagttgagcttgacagcttgaaggtttctggtgatgtctggtttggctctggaattacactcaagggcaaggtgacaattatcgccaagcctggagtgaagttggagattccagatggagacgtacttgagaacaaggatgtcaatggccctgaggatctttaagcaatgtttgtcatcaccagtttttcccaaggacatgtcacaggaactgccaagcctagtcactcctactgagctctatattttgtaattttcatgtgcattccgattccgctgtgagggtcatgtgagcccgctagagaataattgtaatcttctttgctgcgtctgtacttctgtttttgtgcgccaggacgtatatttttactgaaatgatactccgaagagcacgtatggtgtcttaaaaaaaaaaaaaaaaaaaaaaaaaaaaaaaaaagggcggccgcgcggccgca

SEQ ID NO: 258208 - DNA, 1232 bp, Zea mays
ctcgcattgttaccgaggacttcttgccgcttgaattcccgggtcgacccacgcgtccgggctggtatcctccaggccatggtgatgtgttcccctctttgaataacagtggaaaactcgacatcttattggctcagggcaaggagtatgtcttcgttgctaactcagacaacttgggtgctatagtcgacatcaagatcctgaaccatctgatcaataaccagaatgaatactgcatggaggttactccaaaaacattggctgatgttaaaggcggtactctcatctcttacgaaggaagagttcagcttttggagattgcccaagtacctgatgagcatgtgaatgagtttaaatcaatcgagaagtttaagatattcaacactaacaacttgtgggtgaaccttaaagctgtcaagagactagtagaggctgaggcacttaagatggaaattattccaaaccccaaggaagttgatggtgtgaaagtccttcaacttgaaactgcagctggtgcagctattcgtttctttgacaaagcgattggaattaatgttccccgctcaagatttctcccggtgaaggctacatctgatttattgcttgtgcagtctgatctttacaccttggttgatggctttgtcatccgcaatccatccagagcgaatccagctaacccttcgattgagcttggacctgagttcaagaaggttgccaatttccttgctcggttcaagtccatccccagcatcgtcgagcttgacagcttgaaggtttctggtgatgtctggtttggttctggaattacgctcaagggcaaggtgacaatcaccgccaagtctggagtgaagttggaggttccagatggagctgtatttgaaaacaaggatgtcaatggccctgaggatctttaagctatgcttgccgtcaccagtttttcccaaggatttgtcaataggagcagccaacccaaatcactcccactgagctctaccttttgtaattctcgtgccattccgctcccgctgtgagggtcctgtgagcccgctagagaatatgactgtaatcttctttggtgcgtctgcccttctgtttttgtgcgccagggacgtatattttgctgaaatgatactaccaaaaaaaaaaaaaaaaaaaaaaaaaaaaaaaaaaaaaaaaaaaaaaaaaaaaaaaaaaaaaaaaaaaaaaaaaaaaaaaaaaaaaagggcggccgc

SEQ ID NO: 258209 - DNA, 819 bp, Zea mays
gggaagctggtcgcctgaggtgccgcgccgcggtttccgggtcgcccacgacctccgcctttccttgaaaccgtagctggtgcagctattcggttcttcgacaatgcgattggaatcaatgttccccgctcaaggtttctcccagtgaaggctacatctgatctgttgcttgtgcagtctgatctttacaccttggttgatggctttgtcatccgcaacccatccagagcgaatccagctaacccttcaattgagcttggacctgagttcaagaaggttgccaatttccttggtcggttcaagtccatccccagcatagttgagcttgacagcttgaaggtttctggtgatgtctggtttggctctggaattacactcaagggcaaggtgacaattatcgccaagcctggagtgaagttggagattccagatggagacgtacttgagaacaaggatgtcaatggccctgaggatctttaagcaatgtttatcatcaccagtttttcccaaggacatgtcacaggaactgccaagcctaatcactcctactgagctctatattttgtaattttcatgtgcattccgattccgctgtgagggtcatgtgagcccgctagagaataattgtaatcttctttgctgcgtctgtacttctgtttttgtgcgccaggacgtatatttttactgaaatgatactccgtaatatattataatacttgttttatattatttttattgtttttattatattattatgttttttttatgtttttataatttattttttttttatattatttttttataatttttttattt

SEQ ID NO: 258210 - DNA, 1120 bp, Zea mays
aacacgctctcgatccgctcggttggtcgtcgtgtcgactggttcgtctccatccgcctctcgtccccttctgctccatcgaaggtccctcgcgatctcgcctcgagtagctagtgcctcgcgcgccgggggcgactgcgcgcgcggtcagtcagtcttcggcgtgcggggcgcgcgcgagatctcctcagaggtaggggagaaaatcggtgagggtcggcgggcctgatgggcggggcggtctccggtggcgcggcggttggggatgcggcgggggcggcaacttacccggtggttctcaacgtgtacgacctgacgccggtcaacaactacctccactggggcgggcttggcatcttccactctgccgtcgaagttcatggatcggagtacagttttggagcacatgatcacccatcgagtggagtttttgaggtggaaccaaagagctgcccagggttcatatacagatgtacggttttcataggccacacaactctgaatcccttggaatttcgagaattcattcagaggatggcctcagaataccatggagatacctaccacctcatttccaagaactgtaaccactttacagatgatcttagcaccagattaacaggaaaatcaattcctggttgggtcaatcgacttgcaaggctaggcgccttttgcaactgccttctaccagaaggcttgcggcttgagtcaactgaaacaaagcatcttggagactgtcgtttctcagatggttccaataccaccagcaacgataactctgacgaagatgaattggaagataaacacctgcttccgactacttctgttggtgaagacacaattgtaaaagaaattcacagatgaatttctggtgaagccttgcagtgatttctctatgtattctaaaatgtaatgggtttcaatactcattgtgcagcttgtcgttcattatgtatattgtcattgtattttaaaatgtcatgtgctctttctgttgtgctctgaaattttgtgtacatttggtgggtagtctgtatttatggttgagttcatttcacttggtgaatgattgaataggtggatcaatcagagacaataaaaattcttatgtagaagcact

SEQ ID NO: 258211 - DNA, 717 bp, Zea mays
gttgcgggggcggcaacttacccggtggttctcaacgtgtacgacctgacgccggtcaacaactaccttgactggggcaagctcagcctcagcatagttgagcttgacagcttgaaggtttctggtgatgtctggtttggctctggaattacactcaagggcaaggtgacaattatcgccaagcctgcagtgatgatggagattccagatggagacgtacttgagaacaaggatgtcaatggccctgaggatctttaagctatgcttgccgtcaccagtttttcccaaggatttgtcaataggagcagccaacccaaatcactcccactgagctctaccttttgtaattctcgtgccattccgctcccgctgtgagggtcctgtgagcccgctagagaatatgactgtaatcttctttggtgcgtctgcccttctgtttttgtgcgccagggacgtatattttgctgaaatgatactaccatagctttgcgtgccggaggtgctatgtggtgtttctgtgcgtttggttgcaatgataggacgggatgagatgagaccctcaaattaggttgtttggttctgggtcaaagattgagccaagaatatcctagtattgtttcatgttgtcctttaaaattggagggacgagagaggaccccatgggacatttatgtcctacctgtcccgcagctaaaaaaaaaaaaaaaaataaaagaa

SEQ ID NO: 258212 - DNA, 489 bp, Zea mays
cttttctcttccctgaagattgttgagaagtattccaactccaacatcgaaattcatactttcaatcagagccagtatcctcgcattgttaccgaggacttcttgccacttcccagcaaagggaaatctgggaaggatggctggtatcctcctggtcatggcgatgtgtttccctctttgaataacagcggaaaacttgacatcttattggctcagggcaaggagtatgtctctgttgcaaactcagacaacttgggtgctatagtcgacatcagtatccaaataggatgatcaaatttgcatacctgttttaatacttactattgccgtgtgctttgaattgaaaattgtatccttaatcagcacagagatcctaaaccatctgatcaataaccagaacgagtactgcatggaggttacttcaaagacgctggctgacgttaagggtggcactctcatctcttacgaaggaagagttcagcttttgga

SEQ ID NO: 258213 - DNA, 822 bp, Zea mays
gtcgacccacgcgtccgaaatcagagaaaatatattaatcatcattcgtatgagtggaaaatatattttctctgatttgtgccgcaaatccatccgctctctcaaattctagtatacagtacaccgacatacataacatgacaacatgacccgtcacccgtcgctgcgaataccggagcgtctccaagatggtgctgcaaaacgacattgacttactcaatccaccggcagagcttgagaagctaaagcacaagaagaagcggctagtccagtcccccaactccttcttcatggatgtcaagtgccagggctgtttcagcataaccactgtgttcagccactcccagactgtggttgtgtgcccaggctgccaaactgttctgtgccaacctaccggtgggaaggccaggctcaccgaggggtgctccttccgtcgcaagggcgattaggtcctgcttctcttaacgtgagaagagataaatttggtgttttgcaactttctcaggatatgtactgtgctcggtgaggattttgttaattattatggctgttagcgtggcctgacaatgcttgtgtaaacctgcactttgtttgagcgtagtgagacagctaatatggtgcaaggcaaatgaaatcaactggtggcgttatttgtcagggtttaactgaaaaaaaaaaaaaaaaaaaaaaaaaaaaaaaaaaaaaaaaaaaaaaaaaaaaaaaaaaaaaaagggcggccgcccttgttagtaaaaaaaaaaaaaaaaaaaaaaaaaaaaaaaaaaaaaaaaaaaaaaaaaaaaaaaaaaagggcggccgccc

SEQ ID NO: 258214 - DNA, 759 bp, Zea mays
cccttttctaattttgtgtggcgaggtgttgcaaatcgtgccgaaaagagacccaacgaatgtaccatttgaatttagtttttttgaaaaatgttgatttggtttggaagagagtattagaaactggattcagtatcaaaaactacataaaaaatagttgcaacaaagcacgttgagctagattctgcagggtatgtataattcatcaaccaagttgtgttcaagtagagctaaaatctgaaaacataaatgaattttgatattgtgtttattaacttgtattaatattaatatctgctcttatgcctgtttggagactgactcttcatctacttttttcgtttttcttctccctttgtgtccaggatgtcaagtgccagggctgtttcagcataaccactgtgttcagccactcccagactgtggttgtgtgcccaggctgccaaactgttctgtgccaacctaccggtgggaaggccaggctcaccgaggggtgctccttccgtcgcaagggcgattaggtcctgcttctcttaacgtgagaagagataaatttggtgttttgcaactttctcaggatatgtactcggtgaggattttgttaattattatggctgttagcgtggcctgacaatgcttgtgtaaacctgcactttgtttgagcgtagtgccagctaatatggtgctgcttggcttttgctgagggagtggctatgcaaatgaaatcaactggtggcgttaaaaaaaaaaaaagggcgg

SEQ ID NO: 258215 - DNA, 493 bp, Zea mays
  unsure (1)..(493): unsure at all n locations
tccggaattcccgggtggacccacgcgtccgcctttgccccttttgctcgcctttgccccttctgtctcccttcgtccgtagcagaccaggaacgcccaaggcgctagcgtctccaagatggtgctgcaaaacgacattgacttactcaatccaccggcagagcttgagaagctaaagcacaagaagaagcggctagtccagtcccccaactccttcttcatggatgtcaagtgccagggctgtttcagcataaccactgtgttcagccactcccagactgtggttgtgtgcccaggctgccaaactgttctgtgccaacctaccggtgggaaggccaggctcaccgaggggtgctccttccgtcgcaagggcgattaggtcctgcttctcttaacgtgagaagagataaatttggtgttttgcactttctcaggatatgtactcngtgaggatttggttaataatattgctggtagcgttgcctgacaatgc

SEQ ID NO: 258216 - DNA, 2280 bp, Zea mays
gaattcccgggtcgacccacgcgtccgatattttctaatcaagataaaactggagcagaatttgctagatgcttactctggagatggatggaatgggcaaagccgagagaaaataaagccagagaaggaactgcaacgtgccaggaaacaaatcataaaatgcaaaattgctatacgtgatatcatccgccaacttgatttgtatacttctactgggagtgttgatgacccactaatgcctacagatcagtccaccaatcccgaacataccatgtgctcaacatgcaagtctcatgaatcatttcccagcaataaaattatcttctgcaaagggccctgcaaaagggcatgtcatgagaaatgtttggaacctcccttaaacaaaagcgtacttccaacaagtagccatgggtggctttgcaaattctgtttgtgcaaggtgaggattttagaaactattaatgcacatctagggacgagttttacagtgaagtgccactttgaagatatattcaaggaaactactgaactaatagactctgaggatgcactagatgaagattggctttctgagtattcaggtgatgaggactatgatcctgatgaaaatgaggccagtggcgactgtatggacagcggggagaagattatgtctgatgattccaatggttcaggaagccccctttattctccaaatgacgatattcctgacttcatatcagcagacttaaatgttgtggaagggttttgtcataccaatttagatttaggcattgatgccgttgaagatgattttgcacagatcctcacctaccaaaggccaagaagagatgttgattatagaaggcttaacgaggaaatgtttgggaaaataaccgggaatgaagaacagagcgaggacgaagattggggccatgaaaggagaaagaaaaggacgcattcaggtgttgctggggataattctgttggtttcttgaacgttatatctgatgaaaagagccagaagaaggggagaaaacttttcaggattcctcctgcagctgttgaggtacttcgcagagcttttgctgaaaatgagcttccaccccgggatgttaaagaaaatctctcaagagaattgggaatttcttttgaaaagattgataaatggttcaaaaatacacggtgtgctgctctcagagatcggaaggctgaaggaaacagtcataatacagctcccagcaaaagctcaaaaaataaaggaaaagctggaatctcaggcaagactggaaggaatggtcatgttactggtccctgcaataatttgagaacaaatgaagaaaaaacaggtatatcggggaagtttgattcaggagacaactcttgtttggttcccttctctgaagtcatcaatgtgcctacgcgattgccacacaactttgagatgaggaagatggaatcaactagaagtcctgcgaggctacacaataaaggagggtgcctgtctgcaacaatccaaattaaggagagtacattgttacccacaggcaagccttgttggcagtcagaaatgagccatccaacaactaatgaagtgagcacttcagcgcaagctactacttggatcgacgcgggggcgtgtgccgaggagcaagaacctactccttgggtggacatcggggcctcagactaccagcctttcctggatgtgatcgacgacatgtgcggacttgagtggaggctgcagagactgaaggagaacatgctctcatctagcatagacggccaaaccgccgccagtgagagtgacaaaagaaaccagaccgtggtgctcgtgccaactgccgagctcaaggaaaaactgccgcatgacggtttattcgggcattattgcccataggtcttatatacatagcggataaactgtacagagaaccaagaagaagaagaaaacaaaagggaaacagcaaacagacaggtgcccgcttacataccggtccatactgtcaggcactactctcctttcttgggcctcgacacgactaatactgtgctagtccagaacagatgagccatagccattacctgtgtgcctcccaggttcagttcatatgttgtatgtattaatgtatatcagaagagtcgtgcttagtagtagcaagaacctagtcctgatccagaccgtgaatctggatcatcttgtcctgtggttgtaccgtgcagaacagacagatgtcggctagtcgtttggttctgaagtaagaaactataagcatgcgtgattttggcccgttgcgtgac

SEQ ID NO: 258217 - DNA, 1372 bp, Zea mays
ggcttcagaataagaagcccaagaggggcggcgcgaattcccgggtcgacccacgcgtccgagacgatgaggacttcgaggccgacttcgaggactttgaagccgactccggtgattcggatttggagctcggggaaggggctgacgacgacgtcatcgagatcaagcccttcgccgccaagagtactttctccagagatggcttaagcaccatgactactgctggttatgatgcccctgcagcaaggttggccaaaaggaagaggaagaatcaatacaggggtatccgccagcgcccttggggtaagtgggctgctgagatcagagatccccagaagggcgttcgtgtttggcttggtactttcaatagtcccgaggaagctgcaagagcttatgatgctgaagcgcgcaggattcgtggcaagaaggccaaggttaactttcctgatgcaccagcagttggtcagaagtgccgttctagttcagcttctgctaaagcactcaagtcatgtgttgaacagaagccaattgtcaaaacagatatgaacatccttgccaacacaaatgcacccttctaccaatctgttaactacgcatccaacaatccatttgttccagcaatgaactctactgtttcttttgaggatcctatcatgaatctgcactctgaccagggaagtaactcccttggctgctcagacttgggctgggagaatgatactaagacaccagacatcacatccattgctcccattcccactattgctgaaggcgatgagtctgtatttgtcaactccaattcaaacagctcgatggtgcctcctgtcctggagaacaatgctgttgatctcactgatgggctgacagatttggaatcctatatgaggtttcttatggatggcggtgcaagtgattcaattgatagccttctgaaccttgatggatcacaggatcttggtagcaatatggacctctggaccttcgatgacatgcccatcgctggcgatttcttctgaggaatttgaagcttggccataggactatgtacatagggactagggaataaagactgggagattgggaagcacctgcttggcaccttggggtagcatatgctcgtgtctagctcagatgcagaagtcgcattctgaaactctttggttatcgacctgttccctattttaactatctctgtatgagagccatttatgagactgaaccattttaccattttgttttcccccttctttcgttgttacagtatatggtttaacattatgatttatggatatgtggccaaacatgccttttataaaaaaaaaaaaaaaaaaaaaaaaaaaaaaaagggcggccgcaaaaaaagggcggccgc

SEQ ID NO: 258218 - DNA, 489 bp, Zea mays
ttgggcccacgccccgtccgcgctctccaaagttgcgtcctccatttcgctctcgcaagtcgccaagccaccgatttgtttacaggcgccggagctcccgacgacgactgagccatgtgcggcggcgcgatccttgccgagctccgcgagccggcgccgcgccggctcacggagcgggacatctggcagcagaagaagaagcccaagaggggcggcgccggcgggaggcgctcgttcgcggcggaagacgatgaggacttcgaggccgacttcgaggactttgaagccgactccggtgattcggatttggagctcggggaaggggctgacgacgacgtcatcgagatcaagcccttcgccgccaagagtactttctccagagatggcttaagcaccatgactactgctggttatgatgcccctgcagcaaggctggccaaaaggaagagggagaatcaatacaggggtattcgccagcgcccttggggt

SEQ ID NO: 258219 - DNA, 888 bp, Zea mays
acgcccacgcgtccgcccacgcgtccgggcaatatgccatttgttccagcaatgaactctactgcttctgttgatgatcttatcatgaatctgcactctgaccagggaagtaactcctttggctgctcagacttgggctgggagaatgataccaagacaccagacatcacttccattgctcccatttccactattgcggaaggcgacgagtctgcatttgtcgacagcaattcaaacagctcatttgtgcttcctgccctggagaacagtgctgttgatctcactgatgggctgacagatttagaatcctatatgaggtttcttctggatggtggtccaagtgattcagttgatagccttctgaaccttgatggatcgcaggatgttggtagcgacatggacctctggagcttcgacgacatgcccatcgtcggcgatttcttttgaggattttgaagcttggtcataggagtatgtacatagggactaggggaataaagaccgggggagattgggaagcacctgcttggcaccttgggggtagcatttgctcgtgtctagctcagagatgcagaagttgcattctgaaactacttggttatcgacctggtccctattttagctatctctttatgagagccatttatgagactgaaccattttggtttcctttcttttcggtggtacaatatatggcttaacattatgatttatggatatgtgccaaatatggtgctcaacagtggtcaaacatgccttttagatgctcatgtttctcgtattgttgtgtaccttgtgatatttcattcgttgaaattgagttaccctggttgtctgctgaaacggttcttgtcctagaaaaagtacaacagatttaatcttattggc

SEQ ID NO: 258220 - DNA, 488 bp, Zea mays
ctcgtccactaaccacctaggtccgggacctgcgacgaagagcttatgatgctgaagcgcgcaggattcgtggcaagaaggccaaggttaactttcctgatgcaccagaagttggtcagaagcgccgttctggctcagcttccgctaaagcatccaagtcaagttttggacagaagcctattgtcaaagtaactatgaacagccttgccaacacaaatgcatccttcttccaatctgttagctacccctccaattcatttgttcagcatggcaatataccatttgttccagcaatgaactctactggttctgttgaggatcctatcatgaatctgcactctgaccagggaagtaactcctttggctgctcagacttgggctgggagaatgataccaagacaccagacatcacttccattgctcccatttccactatcgcggaaggcgacgagtctgcatttgtcgacagcaattcaaacagctcattt

SEQ ID NO: 258221 - DNA, 3349 bp, Zea mays
gaattcccgggtcgacccacgcgtccgcccacgcgtccggccgagtccatgctcagggcgcagatgagctacggccgcggcggcgacgcgcaccccggcttcagccccgtccccaacgtgccgctcctcaccaacggccagatggttgatgacatcccgccggagcagcacgcgctcgtgccgtcctacatgagcggcggcggcggcgggggcaagaggatccacccgctccctttcgcagatcccaaccttccagtgcaaccgagatccatggacccgtccaaggatctggccgcctacggatatggcagcgtggcctggaaggagagaatggagggctggaagcagaagcaggagcgcctgcagcatgtcaggagcgagggtggcggtgattgggatggcgacgatgcagatctgccactaatggatgaagctaggcagccattgtccagaaaagtccctatatcatcaagccgaattaatccctacaggatgattatcgttatccggttggtggttttgggtttcttcttccactaccgagtgatgcatccggcgaaagatgcatttgcattgtggctcatatctgtaatctgtgaaatctggtttgcgatgtcctggattcttgatcagttcccaaagtggcttccaatcgagagagagacttacctggaccgtttgtcactaaggtttgacaaggaaggtcaaccctctcagcttgctccaatcgacttctttgtcagtacggttgatcccacaaaggaacctcccttggtcacagcgaacactgtcctttccatcctttctgtggattatccggttgagaaggtctcctgctatgtttctgatgatggtgctgcaatgcttacgtttgaagcattgtctgaaacatctgaatttgcaaagaaatgggttcctttcagcaaaaagtttaatatcgagcctcgtgctcctgagtggtacttccaacagaagatagactacctgaaagacaaggttgctgcttcatttgttagggagaggagggcgatgaagagagaatacgaggaattcaaggtaaggatcaatgccttggttgcaaaagcccaaaaggttcctgaggaaggatggacaatgcaagatggaagcccctggcctggaaacaacgtacgcgatcatcctggaatgattcaggtattccttggccaaagtggcggtcgtgatgtggaaggaaatgagttgcctcgcctggtttatgtctcgagagaaaagaggccaggttataaccatcacaagaaggctggtgccatgaatgcactggtccgtgtctctgctgtcttatcaaatgctgcatacctattgaacttggactgtgatcactacatcaacaatagcaaggccataaaagaggctatgtgtttcatgatggatcctttggtggggaagaaagtgtgctatgtacagttccctcagaggtttgatggtattgacaaaaatgatcgatacgctaacaggaacgttgtcttttttgacatcaacatgaaaggtttggacggtattcaaggacccatttatgtgggtactggatgtgttttcagacggcaggcactgtatggttatgatgctcctaaaacgaagaagccaccatcaagaacttgcaactgctggcccaagtggtgcctctcttgctgctgcagcaggaacaagaataaaaagaagactacaaaaccaaagacggagaagaagaaaagattatttttcaagaaagcagaaaacccatctcctgcatatgctttgggtgaaattgatgaaggtgctccaggtgctgatatcgagaaggccggaatcgtaaatcaacagaaactagagaagaaatttgggcagtcttctgtttttgtcgcatcaacacttcttgagaacggagggaccctgaagagcgcaagtccagcttctcttctgaaggaagctatacatgttatcagctgcggctacgaagacaagaccgactggggaaaagagattggctggatttacggatcgatcacagaggatatcttgactggatttaagatgcactgccatggctggcggtctatttactgcatcccgaagcggcctgcattcaaaggttctgcgcctctgaacctttccgaccgtcttcaccaggtccttcgctgggcccttgggtccgtcgaaattttcttcagcaagcactgcccactttggtacggatacggcggcgggctaaaattcctggaaaggttttcttatatcaactccatcgtttatccctggacgtccattcctctcctggcttactgtaccttgcctgccatctgcctgctcacggggaagtttatcacaccagagcttaccaatgtcgccagtatctggttcatggcacttttcatctgcatctccgtgaccggcatcctggaaatgaggtggagtggcgtggccatcgacgactggtggaggaacgagcagttctgggtcatcggaggcgtttcggcgcatctgttcgcggtgttccagggcctgctgaaggtgttcgccggcatcgacacgagcttcaccgtgacgtcgaaggccggggacgacgaggagttctcggagctgtacacgttcaagtggaccaccctgctgatacccccgaccacgctcctcctgctgaacttcatcggggtggtggccgggatctcgaacgcgatcaacaacgggtacgagtcgtggggccccctgttcgggaagctcttcttcgccttctgggtgatcgtccacctgtacccgttcctcaagggtctggtggggaggcagaacaggacgccgacgatcgtcatcgtctggtccatcctgctggcctcgatcttctcgctcctgtgggtccgcgtcgacccgttcctcgccaagagcaacggcccgctcctggaggagtgtggcctggactgcaactgaagtgggggccccctgtcactcgaagttctgtcacgggcgaattacgcctgatttttttgttgttgttgttggaattctttcctgtagatagaaaccacatgtccccggcatctctgctgtgtccatggcatctctgcgttttttttgaaccgaagacagtccatgtctgatgctcctgctgctggttggtggtggtggtggcaaggcaggcagggattgatattgatctgcaagccactggagcaggagagagaggtgcctgctgctgtttgttgagtaaattaaaaagttttaaagttatacagtgatgcacattccagagaaaaaaaaaaaaaaagggcggccgcagtctgtatattagcgacaaaggacagattggttaggagtttgatgctcgtgtagcaatgtgtcccgt

SEQ ID NO: 258222 - DNA, 2742 bp, Zea mays
tgatggtgctgcaatgctaacgtttgaagcattatctgaaacatctgaatttgcaaagaaatgggctccattctgcaaaaggtacaatattgaacctcgcgctccagtgtggtacttccaacagaagatagactactggaaagacaaggtggcagcaaactttgttagggagaggagagcaatgaagagagagtacgaggaattcaaggtcagaatcaatgccttggttgctaaagcccagaaagttcctgaagaaggatggacaatgcaagatggaaccccctggcctggaaacaatgttcgtgatcatcctggaatgattcaggtcttccttggccaaagtggaggtcttgactgtgagggaaatgagctgccgcggttggtttatgtttctagagagaaacgaccaggctataaccatcataagaaagctggtgctatgaatgcattggtccgagtctctgctgtactaacaaatgctccatatttgttaaacttggattgtgatcactacatcaacaacagcaaggctataaaggaagcaatgtgttttatgatggaccctttacgaggaaagaaggtttgctatggacagttccctcaacgatttgatgggattgatcgccatgaccgatatgctaaccggaatggaggcttgtgtgttatctacatgaaaggtttggatggtattcagggtccaatttatgttggtactggatgtgtatttagaaggcaggcattatatggttatgatgcccccaaaacaaagaagccaccatcaaggacttgcaactgctggcccaagtggtgcttttgctgttgctgctttggcaataggaagcaaaagaagaagactaccaaacccaaaacagagaagaaaaagttattatttttcaagaaagaagagaaccaatcccctgcatatgctcttggtgaaattgatgaagctgctccaggagctgagaatgaaaaagctggtattgtaaatcaacaaaaattagaaaagaaatttggtcagtcttctgtctttgcaacatccacacttctcgaaaatggtggaaccttgaagagtgcaagtcctgcttctcttctgaaagaagctatacatgtcattagttgtggttatgaagacaagacagactggggaaaagagattggctggatctatggatcagttacagaagatattctaactggtttcaagatgcattgtcatggttggcggtcaatttactgcatacctaaacgggttgcattcaaaggttctgcacctctgaatctttcagatcgtcttcaccaggtgcttcggtgggctcttgggtctattgagatcttcttcagcaatcattgccctctttggtatgggtatggtggcggtctgaaatttttggaaagattttcctacatcaactccatcgtgtatccttggacatctattcccctcttggcggactggacattgcctgccatctgtttattgacaggggaaatttatcactccagagctgaataatgttgccagcctgtggttcatgtcactttttatctgcatttttgctacgagcatcctagaaatgagatggagtggtgttggaattgatgactggtggaggaatgagcagttctgggtcattggaggtgtgtcctcacacctctttgctgtgttccagggacttctcaaggtcatagctggtgttgatacaagcttcaccgtgacatcaaagggtggagatgatgaggagttctcagagctatatacattcaaatggactaccttattgatacctcctaccaccttgcttctattgaacttcattggtgtggtcgctggcgtttcaaatgcgatcaataacggatatgagtcatggggccccctctttgggaagctattctttgcattttgggtgattgtccatctttatccctttctcaaaggtttggttggaaggcaaaacaggacaccaacgattgtcatcgtctggtccattctgctggcttcaatcttctcgctcctttgggttcggattgatcctttccttgcgaaggatgatggtccgcttcttgaggagtgtggtttggattgcaactaggatgtcagtgcatcagctcccccaatctgcatatgcttgaagtatattttctggtgtttgtccccatattcagtgtctgtagataagagacatgaaatgtcccaagtttcttttgatccatggtgaacctacttaatatctgagagatatactgggggaaaatggaggctgcggcaatccttgtgcagttgggccgtggaatacagcatatgcaagtgtttgattgtgcagcattctttattacttggtcgcaatatagatgggctgagccgaacagcaaggtattttgattctgcactgctcccgtgtacaaacttggttctcaataaggcaggcaggaatgtgcatctgccagtggaacagaggaacctgcacagtatttatgtacaaacttcattacatgttcgtctatactaggaaaaacagaatatttgtaccaatctatacttgattaaagtatgtaaaggagtccctttttttttcttgtgtactgtaatcgtcggagtaggttttgtgagattttcgtagaaaggttgaatgtgatataatatattttatggtcccatactagtgtattgagcaactctagcaaggcaactcttttggttaccaaaaaaaaaaaaaaaaaaaaaaaaaaaaacccacgcgtccg

SEQ ID NO: 258223 - DNA, 3009 bp, Zea mays
ccgcttccttcaagccaaatcaacccctataggatgattataataattcggctagtggttttgtgtttcttcttccactaccgagtgatgcatccggtgcctgatgcatttgctttatggctcatatctgtgatctgtgaaatttggtttgccatgtcttggattcttgaccagtttccaaagtggtttcctatcgagagggaaacctatcttgaccggctgagtttaaggtttgacaaggaagggcatccttctcaactcgcccctgttgatttctttgtcagtacggttgatcccttgaaggaacctccattggtcactgctaatactgttctatctatcctttcggtggattatccagttgataaggtttcatgctacgtttctgatgatggtgctgccatgctgacatttgaagcattgtctgaaacatctgaatttgcaaagaaatgggttcctttctgcaaaagatatagccttgagcctcgtgctccagagtggtacttccaacagaagatagactacctgaaagacaaggtggcgccaaactttgttagagaacggagagcaatgaagagagagtatgaggaattcaaggtcagaatcaatgccttggttgctaaagcccaaaaggttcctgaggaaggatggacaatgcaggatggaactccatggcccggaaataatgtccgtgatcatcctggaatgattcaggttttccttggtcaaagtggtggccatgatgtggaaggaaatgagctgcctcgattggtttatgtttcaagagaaaaacggccaggctacaaccatcacaagaaggctggtgctatgaatgcattggtccgagtctctgctgtactaactaatgctccttatttgctgaacttggattgtgatcactatatcaataatagtaaggctataaaggaagcaatgtgttttatgatggatcctttgcttggaaataaagtttgctatgtgcagtttcctcaaagatttgatgggattgatcgccatgatcgatatgctaacagaaatgttgtctttttcgatatcaacatgaaaggtttggatggtatccagggcccaatttatgtgggtactggatgtgtcttcagaaggcaggcattatatggctacgatgctcccaaaacaaagaagccaccatcaagaacttgcaactgctggccaaagtggtgcatttgctgttgctgttttggtaacaggaagaccaagaagaagaccaagacctctaaacctaaatttgagaagataaagaaactttttaagaaaaaggaaaatcaagcccctgcatatgctcttggtgaaattgatgaagccgctccaggagctgaaaatgaaaaggctagtattgtaaatcaacagaagttggaaaagaaatttggccagtcttcagtttttgttgcatccacacttcttgagaatggtggaaccctgaagagtgccagtccagcttctcttctgaaggaagctatacatgtcatcagctgtggatatgaagacaaaacaggctggggaaaagatattggttggatttatggatcagtcacagaagatattcttactgggtttaagatgcactgccatggttggcggtcaatttactgcatacctaaacgggccgccttcaaaggttccgcacctctcaatctttccgatcgtcttcaccaggttcttcggtgggctcttggttcaattgaaattttcttcagcaaccactgccctctctggtatgggtatggtggtggactaaagttcctggaaaggttttcgtacattaactccatcgtatacccttggacatctatcccgctcttggcctattgcacattgcctgccatctgcttgctgacagggaaatttatcacgccagagcttaacaatgttgccagcctgtggttcatgtcacttttcatctgcatttttgctacgagcatcctggaaatgagatggagtggtgtaggcatcgatgactggtggagaaacgagcagttttgggtcattggaggcgtgtcttcacatctctttgctgtgttccagggactcctcaaggtcatagctggtgtagacacgagcttcactgtgacatccaagggtggagacgacgaggagttctcagagctgtacacattcaaatggacgacccttctgatacctccgacaaccctgctcctactgaacttcattggagtggtagctggcatctccaatgcgatcaacaacggatatgaatcatggggccccctgttcgggaagctcttctttgcattttgggtgatcgtccatctttacccgttcctcaagggtctggttgggaggcagaacaggacgccaacgattgtcattgtctggtccatcctcctggcttcgatcttctcgctgctttgggtccggatcgaccctttccttgcgaaggatgatggtcccctgttggaggagtgtggtctggattgcaactaggaggtcagcacgtggacttccccgtcagtgtgtggtcgaagaagtatttttgcagatgttttgtgcccatatttcttttttcaatttttgtccctctgtagatagaaacaaggggagaaggggaaaaaaagtacttgtatttcttttgttccatggtggtggtggtggtgggcggctcagcctcgtgagtgcagtattgggcaaaccggaggctgcggcaaccttgtgcagttcggccacgaatatactagggaagatcgcgaccaatcaatcaatcgatgaccgagttcaattgttcagcattctttattagttttggtgggtggatacttcaatcggtgagccgaacagacagttgttttgagtatgaattgctctgcatctgcaaagttgttgtttgtcatccgtcgtctcaataaggcgaagggaagacaggaatcgctgacattaatctatgttaaattagtgtggcaaaagttgaaacaatttttgccttttgacctctaattccaaaaaaaaaaggggggg

SEQ ID NO: 258224 - DNA, 645 bp, Zea mays
  unsure (1)..(645): unsure at all n locations
cggnnnggaannnccgggtcgacccacgccttccgtgtttttccccaatattcagggtctgtagataagagacatgaaatgtcccaagtttcttttgaggcatggtgaacctacttaatatctgagagatatactgngggaaaatggaggctgcggcaattccttgtgcaagttgggccgtggctttcagcatatgcgagtgtttgattgtgcagcattctttattccttggtcgcaatatagatgggctgagccgatcagcaaggtattttgattctgcactgctcccgtgtacaaacttggttctcaataaggcaggcaggaatgcatctgccagtggaacagagcaacctgcacattatttatgtatgcctgttcattggagggcttgttcattacatgttcgtctatactagaaaaaacagaatattagcattaatctatagttaattaaagtatgtaaatgcgcctgttttttgttgtgtactgtaatcatctgagttggttttgtgaaattttcgtagaaagaatgaatgtgagatacagaaaatgtaatgccgtggtatatgcgtatggaacgatgtagtatcttttatggttccataatagtgtatttaacaaccccagcaaggggtttcttgggtt

SEQ ID NO: 258225 - DNA, 1024 bp, Zea mays
cccacgcgtacgtgaagtttcaacttctggttgttagggatcacacactaatcttctttattgtgcaactggtagttgctttcatgggtatggtgacttacagattttatggagatgaactgcgcgaaatgtttggttatgaagagcacccatatgctttctatgccatggcgatactggctattgttttggttggtttgctgtatgggttcttcattgctataatatgtggacagaggataactgaacggcattaccatgttcttgcaaagcaagagttaaccaaggagtatattgtagatgaccttgaaggagctgaccatgtgccagaccttgatcctagccatgttgcagagttgaagatattaggactatattaaacattgctgcatatagcatcagcaacaacttggtttccgtcgctgcccaaacttcagcagaggcgatctaagaagaagcaagcgtatcggctcatgttctgacggccgtgttcacgtggtgtaagatctgcattgtggaatccttcgcccggacaagagagattggatcctcccgtccagacaacctgatagaacgacagtgtataagaacagggctcttaggacgccttttgtcaaggtaagcgtctccgtggatggagcctgaagtatattcaaattcaaggcatgccacaaagcatctcgcgtgtgggatgctccggcgtgtggaaagtagaaaagccaaataaatgggtacatgtacagcaggcgtgagttcttaaatactcagattccttgtccataggcaaatgcatagttcatacgaatcagagtacacgatgcacacaacttgatgtctctatcgttgttttcaacatgatgaacatgcgaatttcgtggtattaattgggaccgtctgatttctcatggatccatagttctattctacaagcatttgagataaagggatcatgcaaactgaaaaatgggagatgacattcctgtcccacttagtataattcataaacggcatgtttggctgccat

SEQ ID NO: 258226 - DNA, 589 bp, Zea mays
cttctcgtgggcggacgcgtgggcggacgcgtgggcggacgcgtgggtttatcactccagagctgaacaatgttgccagcctgtggttcatgtcactttttatctgcatttttgctacaagcatcctagaaatgagatggagtggtgttgggattgatgattggtggtggaatgagcagttctgggtcattgcaggtgtgccctcgcacctcttcgctgtgttccagggacttctcaaggtcatagctggtgttgatacaagcttcaccgtgacatcaaagggtggagatgatgaggaattctcagagctgtacacatttaaatggactaccttattgatacctcctaccactttgctcctattgaacttcattggtgtggtcgctggtgtttccaatgcaatcaataatggatacgagtcatggggccccctcttcgggaagctcttctttgcattttgggtgattgtccatctgtatcccttcctcaaaggtttggttgggaggcaaaacaggacaccgacaattgtcatcgtctgggccatcctgctggcttcaatcttctcactcctttgggttcggattgaccc

SEQ ID NO: 258227 - DNA, 634 bp, Zea mays
gtaccctgcagtacgtcggattccgggtcgccacgcgcgaccagagtacggacaggtccgcggacgcgtggcgacctggcaggacccgacgatcgtcatcgtctggtccatcctgctggcctcgatcttctcgctcctgtgggtccgcgtcgacccgttcctcgccaagagcaacggcccgctcctggaggagtgtggcctggactgcaactgaagtgggggccccctgtcactcgaagttctgtcacgggcgaattacgcctgattttttgttgttgttgttgttggaattctttgctgtagatagaaaccacatgtccacggcatctctgctgtgtccattggagcaggagagaggtgcctgctgctgtttgttgagtaaattaaaagttttaaagttatacagtgatgcacattccagtgcccagtgtattccctttttacagtctgtatattagcgacaaaggacatattggttaggagtttgattcttttgtagcaatgtgtcccgcccccccactgttgttgtaaaatccgcccattcgcccagaaccgcggtgggcggcgctgctagctttgtgatcatatagaaaacgacttggttgtttttggacattttgaattgaaagaaaga

SEQ ID NO: 258228 - DNA, 500 bp, Zea mays
tataagaacagggctcttaggacgccttttgtcaagttgggtcataactctaccctgagaattgagatagatgatcatgtggtgcaagatattgagtccctaatctttgatgacacacataacaaatggtaagcgtctccgtggatggagcctgaagtatattcaaattcaaggcatgccacaaagcatctcgcgtgtgggatgctccggcgtgtggaaagtagaaaagccaaataaatgggtacatgtacagcaggcgtgagttcttaaatactcagattccttgtccataggcaaatgcatagttcatacgaatcagagtacacgatgcacacaacttgatgtctctatcgttgttttcaacatgatgaacatgcgaatttcgtggtattaattgggaccgtctgatttctcaaaaaaaaaagaatgaaaaaattaataaaaataattaagaaaaaaaaaaaaaaaaaataaaaaaaaaatgatcatattaataatag

SEQ ID NO: 258229 - DNA, 504 bp, Zea mays
cccacgcgtccgccaagaacctcacagcgcacctccttgtgatgctcttttctccaatgtcttctcttatctacatgcaggaaaaaatctacatgttgatggcgtggatcagaaaaatggtaagttttgcttcatagatgtattaatatttggaatctcaataaacccctcttgttttccgtctgctaacatattcgtatggaacccagcacaaagctcaacgagaataatgatgcaatgatacatacatgtccacagtccatacgttttttttgaagaaataacacttttctagatgagataattagcacatgtgcaattagccaattactgtcttgtgttatgtgagccattggatttgatttttatatcctagaaagtgattcatgttacacttgacctgagattcatggaaccaattggttgagctgcacattcaaatttgatttgttttaatctaatgaataacaatttgttagcagtggaaggacaagatttacgatg

SEQ ID NO: 258230 - DNA, 1250 bp, Zea mays
atgctaacaggaacgtcgtcttttttgatatcaacatgaaaggtttggatggtattcaagggcccatctatgtgggtactggatgtgttttcagacggcaggcactatatggttatgatgctcctaaaacaaagaagccaccatcaagaacttgcaactgctggcccaagtggtgcctctcttgctgctgcagcaggaacaagaataaaaagaagactacgaaaccaaagacggagaagaagaaaagattatttttcaagaaagcagaaaacccatctcctgcatatgctttgggtgaaattgaggaaggcgctccagatattgagaaggctggaattgtaaatcaacagaaactagaaaagaaatttgggcagtcttctgtttttgttgcatcgacacttcttgagaatggtgggaccctgaagagtgcaagcccagcttctcttctaaaggaagctatacatgttatcagctgcggctatgaagacaagactgactggggaaaagagatcggctggatctatggatcaattacggaggatatcttgactggatttaagatgcactgccatggttggcggtctatttactgcatcccgaagcggcctgcattcaaaggttccgcacctcttaacctttcggaccgtcttcaccaggtccttcgttgggctcttgggtctgtcgaaatcttcttcagcaagcactgcccactctggtacggatatggcggcgggctaaaatttctggagaggttttcttatatcaactctatcgtatatccctggacatccattcctctcttggcttactgtaccttgccagccatctgcctgctgacggggaaatttatcacaccagagcttaccaatgtggccagtatctggttcatggcgcttttcatctgcatctcagtgaccggcatcctggaaatgagatggagcggcgtggccatcgacgactggtggagaaacgagcagttctgggtcatcgggggcgtttccgcgcacctcttcgcggtgttccaaggccttctcaaggtcctcgctggcatcgacacgagcttcacggtgacatccaagggcggggacgacgaggagttctcggagctgtacacgttcaaatggaccaccctgttgataccaccgagcacgcttctcctgatgaacttcatcggggtggtggctgggatctcgaacgcgatcaacaacgggtacgagtcgtggggcccgctcttcgggaagctcttcttc

SEQ ID NO: 258231 - DNA, 713 bp, Zea mays
tctgctgttttccataattcttactgcttgcaagcccttttagtatattactgctgcgaggttcttgcaagtccttgatgaagaagtcgaaggtgacgaacgccgaggccgtcatcctgatcgacgccaagaacctcacagcgcacctccttgtgatgctcttttctccaatgtcttctcttatctacatgcaggaaaaaatctacatgttgatggcgtggatcagaaaaatgcagtggaaggacacgatttaagatgcactgccatggctggcggtctatttactgcatctcgaagcggcttgcattcaaaggttctgcacctctaaatatttctggtcgtgaagctgtctatgaaaggaagatgaaaattcagcaagctggattgatttatctttcccccctatggctgattcagcaacctgtattaattagtctatttgacatttgatatttcaatgctgttataggactatattgtacatgaccttgaaggagctgaccatgtgacagaccttgatcataaccatgttgcagagttgaagatattaggactatattaaacattgctgcatatagcatcagacttagaagtcaaacaacatcaaacttatcatcagcaacaacttggtttccgtcgcttgccaaacttcagcagaggcgatctaagaagaagcaagcgtatcggctcatgttctgacggccgtgttcacg

SEQ ID NO: 258232 - DNA, 389 bp, Zea mays
  unsure (1)..(389): unsure at all n locations
gcgccgggcagaggataactgaacgactttaccttgttcttgcaaagcaagagttagccaaggtgtatattgtagaagatcttgaacgagctgaccatgtgccagaccttgatcctagccatgttatacagttgaagatattacgactatattaaacatagctgcatattacatcagataaacattgttgatgaatggggaacagcataccggagacatatcccaggtcgctgttgcaagaaatacgtacgtcattccacttcacctgcagacagtgcaaaatgccccttcgtgtgactgtcgcccataaattcttgtgaagcataacacaattgctcattcgacgaacaccatttgaaggatctttggtncaatgtaggcctgatagc

SEQ ID NO: 258233 - DNA, 468 bp, Zea mays
cccacgcgtccgcccacgcgtccggaccaggcaaactatattgaatgggagaggataaagcgtggcaacaaatgagagggatatctcaaggtcatagctggtgtggataaaaacatcaatgtgacatcaaagggtggagatgatgagttctcagagctatatacattcaaatggactaccttattgatacctcctaccacctcgcttctattgaacttcattggtgttgttgttggcattttgggtgattgcattacctcccgaggcactgaggtcgttctcaatttatttggtagtgttgacttgatccttggcggcaacccctggactggtctttgagttgcagcagagcgttgtcactaggaacgccatgatacacgagtatgcgtgcgacaacgcggaggcgcaggagtgggcgttggagttgtttagtgcgatgcaggcggaagggttggcacaatagagtga

SEQ ID NO: 258234 - DNA, 525 bp, Zea mays
ggcggctcaagcctcgtgagtgcagtattgggcaaaccggaggctgcggcaaccttgtgcagttcggccacgaatatactagggaagatcgcgaccaatcaatcaatcgacgaccgagttcaattgttcagcattctttattagttttggtgggtggatacttcaatcggtgagccgaacagacagttgttttgagtatgaattgctctgcatctgcaaagttgttgtttgtcatccgtcgtctcaatgaggcgagggtggaactggaatagatggtgctgtctggaacaggggaagagacgcgtccgccattgttgtttgttttgtttatgtagtaagatgcgtgcgttccttcccttgctcctcgtcctggtgcatttctcctttactaggacacacaaactccattggtgagtgtctagtgatctagcgtagcagcgtcgtcaggcaatgtaatatgtaaacgtgccattttgtcgatcaacttcatgcgcaaagaaccgaatggaatcgttggtgttgatg

SEQ ID NO: 258235 - DNA, 434 bp, Zea mays
gcatgaagccagtcgggcaccagtccacgaactggatggtgcgcttggcggacgcgtggggtccattcctctcctggcttactgtaccttgcctgccatctgcctgctcacgggggtgcctgtcacacccgagcttaccaatgtcgccagtatctggttcatggcacttttcatctgcatctccgtgaccggcatcctggaaatgaggtggagtggcgtggccatcgacgactggtggaggaacgagcagttctgggtcatcggaggcgtttcggcgcatctgttcgcggtgttccagggcctgctgaaggggttcgtcggcatcgacacgagcttcaccgtgacgtcgaaggccggtgactactaggagtttttagtgcttttcatgtttaagtggtccaggctgttgtttacctcctatttacttcttcttt

SEQ ID NO: 258236 - DNA, 482 bp, Zea mays
gaattcggctcgagcggatgtgtggatcattggctttaaacatgtgtggagttgcctgtggtagactagatttgtgttatgagataggatttggtggtccatgggatgttgctgctggtgctgtaattcttcaggaagccggtggccttgtttttgacccaagcggcggagagtttgatttgatgtcgcgaagaatggcaggatcaaacagcttgctgaaggataagttcgtcaaggaactgggggatactaattgaaacaaatgttagtattattcgtggaacagattaagacaataaggttgccccgccgcatggtgattaacttattgtttgggcaacaaaattccatgtaattctgcacctgtacaactatgttggacgcagaacattttattgagttttgtgattacatgggaatacataggttgaggcaacggtccctactttatggcaaaaaaaaaaaaaaaaagggcggccgcc

SEQ ID NO: 258237 - DNA, 1493 bp, Zea mays
gccggccgcttcccggctctccacgctgcggctcttgcccgattgggcggtctcccccgccgcgctgctcacggtctgccctgcactcgccggtctgacgtcgctccacctcaccgctgtccgccccctagaattcggctcgagcaagctgttgccgcgcctcaagtcgttcgccctcgtcaactccgccgccaccgttgactccgcgggctcgagctcggatgacaccgacggcgaggccgaggacgtcgcagggacattgccgctggagaagctgtcactttgcggcatccgctccggcgaccgcggtcttgggtggctgtggcggcggtgcgggagcctcaagtggttgcagctgcgcgcctgcgacggtaccggggacgggcccgcgtcgctggccttcgcgggttgccttgctggcttgctcgcgcttgagcttcgtgcttgccgtgctgtcgccgaccgtgtactcctccttgcagccgaccattgccgcacgctaacgtccctcctggtctatgacggcggcggcagcgaggcccttcaccggttcatccagcagcgtgctgctggtctgcacaccttggaccttcgcctcccgcttgacctgcacaacgatcatctcctcgccattggagctgactcagttcacaatgctacacatggcctagcttcacttcgcctccagagctgcgtccttatcacaggggacggcctccggtccctggcacgcacagccgccggagccggcatagaagagctcgccttggtgagttgcgacgtggtggagcgggagcccgggttgctgacattcctcagtcagagcatgccgcggctccgtcgacttaacctgtcttacaatgagacactgaacgacaaggtgatcggcgccatgctttcatcctgccggaatctcatcgacatcagactcagggggtgccggggcctgacgggaggctcgctgctctcgctgcttaggcactgtgggcagtcactggagatccttgacatctcccgctgtccgggcattgctgtaggtaacgttgagctctttgcccagcgcgccgctaagttgaatcatgtgatcattgaggagagcgcgatgtcggaggaattgaaggcaatcgctcagaagaaaggcatgaaggttggctcattgccgtgcgaaggaggaccattctgaagtaaggttgtatctccttcagaatgcagttccatgttctgtgcaactcgatttgtgaatgtaaccttcactggaatgttaataaagtattgctgcttagtacttgtgtgtgcagctttgtatctgccttgtaagcttattatgactagcctcttggtgcctgcttgacatgtaaattgagcgccaaaggtgtgctgttgtatatgttcaacaattgccatggaataatacagaaaattcaaaccaaaaaaaaaaaaaaaaaaaaaaaaagggcggccgccaaaaaagggggccgctcgcgatctagaac

SEQ ID NO: 258238 - DNA, 499 bp, Zea mays
aggtaatgtcagctctttgcccagcgtgacgttaggttgaatcatgtgatcatctaggataggtctatgtcggaggcattgaaggcaatcgttcagaagaatggcatataggttggctcattgccgtgcgaatgaggaccattgtgaagtcaggttgtatctcgttcagaatgcagttccatgttatgtgcaactcgatttgtgaatgtgtctttcactggaatgttaataaagtattgctgcttagcacttgtgtatgcagctttgtatctgccttgtaagcttattatgactagcctcttggtgcctgcttgacatgtatcttgagcgccaaagccgtcctgtactgctgttgtatatgttcaacgattgccatggaataatacagaaaattcaaaccaagagaaaaatgagccaaccggccatttgattttgggaaaaaaaaaaaaaaaaaaaaaaaaaaaaaaaaaaaaaagggcggcggctcgcgatctagaac

SEQ ID NO: 258239 - DNA, 3115 bp, Zea mays
aatgtgttgagagctggagggttgaacaagacaaaaatatgatgcaagtgactaataaatatccagaggctagaggaggagacatggaggggactgcctcaaatggagaagatatgcaaatggttgatgatgcacggctacctttgagccgtatcgtgccaatttcctcaaaccagctcaacctttaccgggtagtgatcattctccgtcttatcatcctgtgcttcttcttccagtatcgtgtcagtcatccagtgcgtaatgcttatggattatggctagtatctgttatctgcgaggtctggtttgccttgtcttggcttctagatcagttcccaaaatggtatccaatcaaccgtgagacatatcttgacaggcttgcattgaggtatgatagagagggagagccatcacagctggctcccattgatgtcttcgtcagtacagtggatccattgaaggaacctccactgatcacagccaacactgttttgtccattcttgctgtggattaccctgttgacaaagtgtcatgctatgtttctgatgatggctcagctatgctgacttttgagtctctctctgaaactgccgaatttgctagaaagtgggttcccttttgtaagaagcacaatattgaaccaagagctccagaattttactttgctcaaaaaatagattacctgaaggacaaaattcaaccttcatttgttaaggaaagacgagcaatgaagagagagtatgaagaattcaaaataagaatcaatgcccttgttgccaaagcacagaaagtgcctgaagaggggtggaccatggctgatggaactgcttggcctgggaataatcctagggaccatcctggcatgattcaggttttcttggggcacagtggtgggctcgacactgatggaaatgagttaccacgtcttgtctatgtctctcgtgaaaagagaccaggctttcagcatcacaagaaggctggtgcaatgaatgcgctgattcgtgtatctgctgtgctgacaaatggtgcctatcttctcgatgtggattgcgaccattacttcaatagcagcaaagctcttagagaagccatgtgcttcatgatggatccggctctaggaaggaaaacttgttatgtacaatttccacagagatttgatggcattgacttgcacgatcgatatgctaatcggaacatagttttctttgatatcaacatgaaaggtctggatggcattcagggtccagtttacgtgggaacaggatgctgtttcagtagacaggctttgtatggatacgatcctgttttgactggagctgatctggagccaaacattgttattaagagctgctgtggtagaaggaagaaaaagaacaagagttatatggatagtcaaagccgtattatgaagagaacagaatcttcagctcccatcttcaacatggaagacatcgaggagggtattgaaggttatgaggatgaaaggtcagtgcttatgtcccagaggaaattggagaaacgctttggtcagtctccaattttcattgcatccacctttatgactcaaggtggcataccaccttcaacaaacccagcttctctactaaaggaagctatccatgtcatcagttgtggatatgaggacaaaactgaatggggaaaagagattggctggatctatggttcagttactgaggatattctgactgggtttaaaatgcatgcaagaggctggcaatcaatctactgcatgccaccacgaccttgtttcaagggttctgcaccaatcaatctttctgatcgtcttaatcaggtgctccgttgggctcttgggtcagtggaaattctgcttagcagacattgtcctatctggtatggttacaatggacgattgaagcttttggagaggctggcttacatcaacaccattgtttatccaatcacatctattccgcttatagcctattgtgtgcttcctgctatctgtctacttaccaataaatttatcattcctgagattagcaattatgctgggatgttcttcattcttctttttgcctccattttcgccactggtatattggagcttagatggagtggtgttggcattgaagattggtggagaaatgagcagttttgggttattggtggcacctctgcccatctcttcgcggtgttccagggtctgctgaaagtgttggctgggattgataccaacttcacagttacctcaaaggcatctgatgaggatggcgactttgctgagctatatgtgttcaagtggaccagtttgctcatccctccgaccactgttcttgtcattaacctggtcggaatggtggcaggaatttcgtatgccattaacagcggctaccaatcctggggtccgctctttggaaagctgttcttctcgatctgggtgatcctccatctctaccccttcctcaagggtctcatgggcaggcagaaccgcacgccaacaatcgtcatcgtttggtccatcctccttgcatctatcttctccttgctgtgggtgaagatcgatcctttcatctccccgacacagaaagctgccgccttggggcaatgtggtgtgaactgctgatccagattgtgactcttatttgaagaggctcagccaaagatctgccccctcgtgtaaatacctgagggggctagatgggaattttttgttgtagatgaggatggatctgcatccaagttatgcctctgtttattagcttcttcggtgccggtgctgctgcagacaatcatggagcctttctaccttgcttgtagtgctggccagcagcgtaagttgtgaattctgcatttttgttatgcgtgcagtttattgttttagagtaaattatcatttgtttgtgggaactgttcacacgagcttatattggcaatgctgttatttatacgcaaagactacattctttggaatgtgagcaaacagtcagaacactgtaatctcttagcacaactatataaggcagctgttgtatcatctctattgtttctaatggccctggggatatgtaattgcgaatgactagcaacattatcctgtcggctgtttatttccccctgcccaaaagatcaacc

SEQ ID NO: 258240 - DNA, 1655 bp, Zea mays
gtgggaactggttgttgtttcaataggcaagcactttatggttatgggcctccatctgtgcccgcacttccaaagtcttcgatttgttcctggtgttgctgctgctgtcccaagaaaaaggttgaaagaagtgagagggaaatcaacagagactctcggcgagaagacctcgagtctgccatttttaaccttcgcgaaattgacaactacgatgagtacgagaggtccatgctcatctctcagatgagcttcgagaagtcttttgggctgtcctcggtctttattgaatcgacccttatggagaatgggggcgtccctgaatctgcaaacccatctaccctaattaaagaagccattcatgtcattagctgtggatatgaagagaaaactgaatggggaaaagagattggctggatctatggttcagttacagaggatattctgactgggtttaagatgcactgccgtggctggagatccatctactgcatgccggtgagacctgcattcaagggatcagccccaatcaatctttccgatcgtcttcaccaagttctccggtgggctcttggttctgtcgagatcttcttcagtcggcactgcccgctgtggtacggttacggtggcggccgtctgaaatggctccagaggctctcctacatcaacaccatcgtgtacccgttcacttctcttcctctcgttgcctactgttgcctgcctgccatttgcctgctcacaggaaagttcattatacctacgctgtccaacgctgcaacgatatggtttcttggcctcttcatgtccatcatcgtgacgagcgtgttggagctgcggtggagtggcatcgggatcgaggactggtggcgcaacgagcagttctgggtcatcggaggcgtgtccgcgcacctgttcgccgtgttccagggtatcctcaagatgattgccgggctggacaccaacttcacggtcacggcaaaggccacggacgacactgagttcggggagctgtacctgttcaagtggacgacggtgctgatcccgcccacaagcatcctggtgctgaacctggtgggcgtggtggctgggttctcggccgcgctcaacagcggctacgagtcctggggcccgctcttcggtaaggtgttcttcgccatgtgggtgatcatgcacctgtacccgttcctcaagggtctcatgggccgccagaaccgcacgccgaccatcgtggtgctctggtccgtcctcctcgcctccgtcttctccctcctgtgggtcaagatcgacccattcgttggaggaaccgagaccgtcaacaccaacaactgcaacacgatcatctgctgattcaccatcggtcagctgctgtcgtgccgcggcggacgtgtttctggtgttgcaaacgtgggttgcctgcctgatgcgggtctcctctgtctatctcgcatctgggcttttgccccaggatctgaagcgggtggtgtaggttagctttattttgcgtccaagtgttgattgatgttgtctgtgttatgaaaagttttggtggtgaaacctgaaatgttaaaattcggctcaattgtgataaggcactgttttttaagtgtgtgtaaataataggaccgcccgaaaaaggatctaaccatcccttgcctgcc

SEQ ID NO: 258241 - DNA, 666 bp, Zea mays
caccattgtgcttgtgattaacctggttggtatagtggctggagtgtcgtatgctatcaacagtggctaccaatcatggggtccactattcgggaagctgttctttgcaatctgggtgatcctccacctctaccctttcctgaagggtctcatggggaagcagaaccgcacaccgaccatcgtcatcgtttggtccgtccttcttgcttccatattctcgctgctgtgggtgaagatcgaccccttcatatcccctacccagaaggctctttcccgtgggcagtgtggtgtaaactgctgaaatgatccgaactgcctgctgaataacattgctccggcacaatcatgatctaccccttcgtgtaaataccagaggttaggcaagacttttcttggtaggtggcgaagatgtgtcgtttaagttcactctactgcatttggggtgggcagcatgaaactttgtcaacttatgtcgtgctacttatttgtagctaagtagcagtaagtagtgcctgtttcatgttgactgtcgtgactacctgttcaccgtgggctctggactgtcgtgatgtaacctgtatgttggaacttcaagtactgattgagctgtttggtcaatgacattgagggattctctctcttgaaatttatatatgtatttctaat

SEQ ID NO: 258242 - DNA, 1143 bp, Zea mays
agcgaacgagcagcagcaccaccactgcgcggcattgcagcgagcgagcgggagggatctggggcatggtggcggtcgctgccgctgccgctcggatctagagggccgcacggtatccgccggcctcgtcggtgtcggtgtcggtgtcggtggagtgtgaatcggtgtctgtaggaggagcgcgaagatggcggccaacaaggggatggtggcaggctctcacaaccgcaacgagttcgtcatgatccgccacgacggcgacgcgcctgtcccggctaagcccacgaagagtgcgaatgggcaggtctgccagatttgtggcgacactgttggcgtttcagccactggtgatgtctttgttgcctgcaatgagtgtgccttccctgtctgccgcccttgctatgagtacgagcgcaaggaagggaaccaatgctgccctcagtgcaagactagatacaagagacagaaaggtagccctcgagttcatggtgatgatgaggaggaagatgttgatgacctggacaatgaattcaactataagcaaggcaatgggaagggcccagagtggcagcttcaaggagatgacgctgatctgtcttcatctgctcgccatgaccccttcctcaagggtctcatgggcaggcagaaccgcacgccaacaatcgtcatcgtttggtccatcctccttgcgtctatcttctccttgctgtgggtgaagatcgatcctttcatctccccgacacagaaagctgccgccttggggcaatgtggtgtgaactgctgatccagattgtgactcttatctgaagaggctcagccaaagatctgccccctcgtgtaaatacctgagggggctagatgggaattttttgttgtagatgaggatggatctgcatccaagttatgcctctgtttattagcttcttcggtgccggtgctgctgcagacaatcatggagcctttctaccttgcttgtagtgctggccagcagcgtaaattgtgaattctgcatttttttatacgtggtgtttattgttttagagtaaattatcatttgtttgaggtaactattcacacgaactatatggcaatgctgttatttatacgcaaaaaaaaaaaaaaaaaaaaaaagggcggccgccg

SEQ ID NO: 258243 - DNA, 579 bp, Zea mays
ttttattataaatccttttttttttgtttttgatacaacagctgccttatatagttgtcctaagagattacagtgttctgactgtttgctcacaatccgaagaatgtatcagtctttgcgtataaataacagcattgccatatagttcgtgtgaatagttacctcaaacaaatgataatttactctaaaacaataaacaccacgtataaaaaaatgcagaattcacaatttacgctgctggccagcactacaatcatggagccttcataccttgcttgcccacgcgtccgcccacgcgtccgcccacgcgtccgcccacgcgtccgccaatcctggggtccgctctttggaaagctgttcttctcgatctgggtgatcctccatctctagcccttcctcaagggtctcatgggaaggcagaaccgcacaccaacaatcgtcattgtctggtccatccttcttgcatctatcttctccttgctgtgggtgaagatcgatgctttcatctccccgacacagaaagctgctgccttggggcaatgtggcgtcaactgctgatcgagaccgtgactcttattt

SEQ ID NO: 258244 - DNA, 1025 bp, Zea mays
ttcgcggtccgacccacggaattcggctcgagaagcaacaaagttctactctgtccacccgtccatctagctctcaagaaccaacccgtaccagcgctatccggccggccatggcggcggcgcgccggctctccctgcccctcgtcctgctggtcgtcctggccgtcgccgggcgcgcggcggcgcaggactacgacttcttctacctcgtgctgcagtggccgggggcctactgcgacaccaagcagagctgctgctaccccaagtccggcaagccggcggcggacttcgggatccacggcctctggcccaaccgcgacgacggcacgtacccgcagaactgcagccccgacaacgccttcaacccgtcgaaggtgagcgacctaatgagcagcctccgcgccaagtggccgacgctggcgtgcccgtccaacgacgggctgcgcttctggggccacgagtgggagaagcacggcacctgcgcagccgacgtcttcgacgagcacggctacttccaggccgcgctgcgcctccgcgaccagctgggagtcctcggcgcgctcacctccgccggcgtcaagcccgacggcggctactacacgctgagccagatcaagggcgccatccgccagggcaccggcttcgagccctacgtggagtgcaaccgcgacgaggccggcaacagccagctctaccagctctacttctgcgtcgacgccgccggcgacagcttcgtcgactgccccgtcctccccagcggcaggccctgtggcaaccggatcgagttcccggctttctaagctaactcactcttcacgtcagttgctgcaatatactgctagtccttttgcttgcattctatgcaagaggataatggaatgttcattccccattcttcatttttttttgcaaataaaaggagggcgatcggtgttccatatttattatgttgatcataacatgacattcagagaacaattcataagttcagtcccaaaaaaaaaaaaaaaaaagggcggccgccg

SEQ ID NO: 258245 - DNA, 1357 bp, Zea mays
atcgaaccaaaatagggggaaaatgaataaaaaagaacgtccacatatattagattggagacaaaaaaaagttaaataaaacaaaatcctaataatagcttagtgcttataggaaggcgaaggacagcattaagccaggcgaggcaggcaagctgatcgaaatcatatgttggagctgaatggtacatgtgtgtgtatataagcaggttcatcatcgattgtatcgtatggacgaagatgtaatggatcagaagacctttgcgacgtccttcatgagccccgggttggcgttgcagaaggtgatgaactcgttgaagtcgatccagccgtcgccgtcggtgtcgatctcggccatcatgcgctgcacctcgtcggcagaggtggagaattcactagtgattggatcccagctccgacagcgagatcttaccgtcgccgttggtgtcgaaccgcttgaagatccgctccatgtccgccgtctccgccattagcgaatctgctacggatcaataatcgtccggtctcccggcccggcactcttctcggcttgcggccaagcgtggcggtggcgggtcgctctccgatgaagctcagagataccgtgtccctcgacctcaacgtctgcgcatgcacggcgttcgcgcttctcctagctcggtcgtgctcttctaggtatctgctgcatatatagtgatgaaaacttgagaaggggtccccgatttagttagctctaccaggagcctgctgcatcggtggaggtctggaggagaggacatgccggggagaaattcttggaccacctcgctgccatccatcgccatgcaacagctgcagctctcccaccggaagaatcgctcagccggacggagcagaggagaccatgggcctgtttggttcagcttttttctgaccagcttttctgaaaatttggctgtgggggaatttggctgtggaaagaatctgagtatcattacgattacgtgtggaggaagataaagttgttcatagggttcaatatctagaaagtgacggattccaactattacaacgactcaaccgattatgtgtttatattgattttggatggtttttgccccaacgaattttatagaagctgactgaaaagcagagcgtttggcagtccgcagcagcttttggtggccagaagctgtcagaagccgaaacaaacaggcacatggtagggagaagcgcaattatgcaatgcaattatgcaagccatcaactaactaggcttcgaggcccagttgataagagagccatggtagggcccatatgtgtacccgtggaaagtcacggaccagcccgggccgtcgaccaagcttgccctaatcgaatt

SEQ ID NO: 258246 - DNA, 480 bp, Zea mays
  unsure (1)..(480): unsure at all n locations
nccacgcgtncgctcacgcgttcgccgccctggctagcaccacacaccgcaggtatggagaaggcgacgaggctggccttggcagcggcggtggttctgtgcctgctgctggcgaccgggccgcaggaggccgccggcgccgaggggatgctgtcgtatgataagttgctcagctgcaaggtgctgggcaactgcgacaagaacaggggccccggggccacccgcccggggaagcccgtaaacaagtacacccgcggctgcagcccgctgacccggtgccgcggcggctgatcatatctccggtggttctggtcgatgtgcgcgcaacgtcacgcgcgtgcaggcaccagcgccggccggcccctgagggcgggggcaaagggggcaaccgccctggtgggcctcgtaatctggaggaccccaattccgtgtacacattagtatactgcatatgagtttttgcatgtgtattacgtgatt

SEQ ID NO: 258247 - DNA, 986 bp, Zea mays
catgagccccgggttggcgttgcagaaggtgatgaactcgttgaagtcgatgcagccgtcgccgtcggtgtcgatctcggccatcatgcgctgcacctcgtcggcagaggtggagaattcactagtgattggatcccagctccgacagcgagatcttaccgtcgccgttggtgtcgaaccgcttgaagatccgctccatgtccgccgtatccgccattagcgaatctgctacggatcaataatcgtccggtctcccggcccggcactcttctcggcttgcggccaagcgtggcggtggcgggtcgctctccgatgaagctcagagataccgtgtccctcgacctcaacgtctgcgcatgcacgcgttcgcgcttctcctagctcggtcgtgctcttctaggtatctgctgcatatatagtgatgaaaacttgagaaggggtccccgatttagttagctctaccaggagcctgctgcatcggtggaggtctggaggagaggacatgccggggagaaattcttggaccactcgcagccatccatcgccatgcaccagctgcactgcagctcccctaccggaagaatcgctcagtcggacggagcagaggagaccatgcaatgcaattatgcaagccatcaactagctaggcttcgaggcccagttgataagagagccatggtagggcccatatgtgtacccgtggaaagtcacggaccatgaagcgagaagcgcaaacgcacaagaggcccatgactcacttcctgttaaagatgacaatgggtactcgaaacccgaaacccgatgggtttttaccctattagggtacgggtttggatcaattttcatatccatgggtttgttaatgggcataaatctatacccgacgggtttattggtacgggtttgttcctatagtacccaaacccgtgaacccgtgggttttttaccagcccgggccgtcgaccaagcttgccctaatcgaattc

SEQ ID NO: 258248 - DNA, 1866 bp, Zea mays
catggaatcaatcacaagagttgaatcagaaaaaccacatccacacatacacctgacaaacatcttgaaaaaaaattttgcagaaggtttggtagggcagcaagacaagacagttggccctgtttgtttcggcttttttctgaccagcttttctgaaaatctggctgtgggaagaatctgagtatcattacgattacgtgtggaggaagataaagttgtttatagggctcaggatctagaaagtgacggattcctactattacaacgactcaaccgattatgtgtttatgttgattttggatggtttttgccgcaacgaattttatagaagctggctgaaaagctgagcgtttggcagtccgcagcagcttttggtggccagaagctgccagaagccgaaacaaacagggccgaagtgactaggccacaagctgtacatcgtgttaagtttcagaatgcaccaggtgcgtccctcatgctgatattcaagctgtttctcattgtccgtcgaccgactcccatattgcccttggtcatcatggcaacaaactctccatagtcaatgcggccatcgttatcctgatcagcttcgttgatgacatcatcaagaaaagcatccggcatgttatgctctttgcaagcttgctgtagttcatccactgtgatatagccactaccatctttgtcgaaatatgaaaaggccgccacgagatgttcttcgcgctccagcttattgagatgcaaagttgcagcgatgaattcaatgtagtcaattgttccattgttgtcgatatcagctgcatccataagatcacgaatctcagtgtccttcagtgtggaaccatattttctcaatccttcttttagctcatcgtaggtgattgcgccactgttgtcagtgtccatgatctggaacatttccttcaaccccgcaatttcctcttctgataggctctcagctattactcgtaaagccattttcttcaacttattcattgcagagaattgcttaatgcgagataagacagctggatccagtggacggtcaggagctactccatgatcacgaatccatggatggcatagaacttcatgtgctgttaagcgctcggcagagcgaggattcagcatccgtcttataagatcttttgcactatcagatatgacaggccacggatcagaatcaaaatcaatgacacctttcaatacagcatcaaatattccttgttgtgtttctgcccaaaacggaggcacgccacttagtagaatgtaaagaatgacgccagctgtccatacatcagctgctggtccataatttttcaacaaaacttctggagctacataatatgggctaccaacaacatcggtgaaaacttgaccaggcttgaagaagacagagagtccgaaatcgatggccttgagcgagaggtcatcgtccctgttggcgagcaggaagttctcgggcttgaggtcccggtgcatgaccccgagcgagtggcaggcctcgacgaccccgacgatgatccttgtgagcgcggcggccttgcgctcgctgtagtgtccgcgctgtatgatccggtcgaagagctcgcccccggcgcagagctccatgacgatgtggacgtagacctggtcctcgtacgcgcccttgatggcgacgacgttcgtgtggccggagagctgctgcatgatctggatctcgcggcgcacgtcgtccacgtcctccctggtgatgagcttgcgcttggagatggacttgcaggcgtagtcgacccccgtggcgagctcggtgctgaggaacgtggtgccaagctgcccctgtccaagcttaaacccgagcgcgtagaggtcgcggaggttaggtga

SEQ ID NO: 258249 - DNA, 819 bp, Zea mays
cccacgcgtccgcccacgcgtccgcggacgcgtgggtgcgactcaattataacttcgatactgccctgggatgaaaggctgatagttggactatccaacagggaaataaaggtttactacaaggcatcatgactctttgcttcaaccccatgtatacattgtgaatagttcagtatacagtaaacgtgagatagaggattggaatccccaggactagaatacatcaaaagtacaatccgtgtttttttctttaaacaacaggggcgttcgtgtcccctccttttttttatattttctacaaagggatagtatacaaggggcctgtttggttcagcttttttctgaccagcttttctgaaaatctggctgtggggagaatctggctgtgggaagagaatctgggtatcattacgattacgtgcgaaggaagataaagttgtccatggggctcaggatctataaagtgacggattactactattgcgacgaatcaaccaattatatgttgattttgaatggtttttacccaaacgaattttatagaagctggctgaaaagctgagtgtttggcagtccgcagcagcttttggtggccaaaagttgcgaaaagccgaaacaaacaggggctaagccttatttatgatctatgaggactagacgagaatactttgacgtcctacgagacacgtaagacaacgaagggaaaacaggaggacatgctacgaaggcatgtatgagtatgacgatgacacgaaaacaccagggcaggctacgaagaccattagggcatgtacaatggtgtttaatgtgggagctttt

SEQ ID NO: 258250 - DNA, 480 bp, Zea mays
  unsure (1)..(480): unsure at all n locations
ccccgtgtcgagccccgccccccgcaggtatcgtgaaggcgacgaggctggccttggcagcggcgttggttctgtgcctgcttctggcgaccgggccgcaggaggccgccggcgccgaggggatgctgtcgtatgataagttgctcagctgcaaggtgctgggcaactgcgacaagaacaggggccccggggccacccgcccggggaagcccgtaaacaagtacacccgcggctgcagcccgctgacccggtgccgcggcggctgatcatgggcctgtttggttcagcttttttctgaccagcttttctgaaaatctggttgtgggaagaatctagctgtggggagaatctgagtatcattacgattacgtgtgaggaagataaagttgttcatagggctcaggatctagaaagtaacggattcctactattacaatgattcaacagattataaaanaaaaaaaaaagggcggccgctct

SEQ ID NO: 258251 - DNA, 467 bp, Zea mays
gtgtgtgtgtatataagcaggttcatcatcgattgaatcgtatggacgaagatgtaatggatcagaagacctttgcgacgtccttcatgagccccgggttggcgttgcagaaggtgatgaactcgttgaagtcgatgcagccgtcgccgtcggtgtcgatctcggccatcatgcgctgcacctcgtcggcagaggtggaccccagcgtccgtagcgcctccgtcagctccgacagcgagatcttaccgtcgccgttggtgtcgaaccgcttgaagatccgctccatgtccgccgtctccgccattagcgaatctgctacggatcaattatcgtccggtctcccggcccggcactcttctcggcttgcggccaagcgtggcggtggcgggtcgctctccgatgaagctcagagataccgtgtccctcgacctcaacgtctgcgcatgcacgcgttcacgcgtccgcgc

SEQ ID NO: 258252 - DNA, 537 bp, Zea mays
attagtgtttttagagtcaaaagggcaaaagcatttacaattgggcttcattgcgtaacatgggcatcttgttatgcaatttcatggaatcaatcaccagagttgaatcagaatccccagaaaaaacacatccacacagacacctgacgacatcttgaaaaaaaaattgcagaaggtttcgtagggcagcaaggcaggacagaagaggaagtggccaggccccaagctgtacatcgtgttaagtctcagaacgcaccaggtgcgtccctcatgctgatattcaagctgtttctcattgtccgtcgaccgactcccatattgcccttggtcatcatggcaacaaactctccatagtcaatgcggccatcgttgtcctgatcagcttcgttgatgacatcatcaagaaaagcatccggcatgttatgctctttgcaagcttgctgtagttcgtccactgtgatatacccactaccatctttgtcgaaatatgaaaaggctgccacgagatgttcttcgcgctccagcttattgagatgc

SEQ ID NO: 258253 - DNA, 451 bp, Zea mays
ttcttttttttttttttttttagcatccatgattttttttcatacaagagttctccacgtaaaacatgtctcgtgttcgatctatatttacattatttgacaacatctgtcatatgttatcccactaatatcttattggagatatatttggaagatgctggaggtgctcaaaacacttccgagaaacaacttattctggcggaatttgtcctaatgatacatatttgccatcagttcaattcttggcccatgctgctcggttggtatggccgaggacaacaacatctaaatattatggggctgtttggttcagcttttttctgaccaacttttctgaaaatctggctgtggggagaatctggctgtgggagaatctgagtatcattacgattatgtgtgtaggaagataaagttgttcataaggctcaggatctagaaagtgatgaattcc

SEQ ID NO: 258254 - DNA, 405 bp, Zea mays
tcaaattgttctatgtagaggcggatagtagctccagcagatccggttcccgaaagccggaagataatcctagatccatcagtgaaaacaaatcgaagtccttgttttgataccgtactaccgtctacaggatcagtatagctgaaatcatcagcaaattggagggtgtaatttccgtatttctctccaggcttgctatttgccataacatctctaacgtgatccatcatctggtttgcactgtgtgattcacacgcctcataatcgtatctagacaagaaattcctgccataggttttccagtgctccatagcaatatcttcaactgacactaatccctctccgacatccttatccttgttccggtctgcaagtatggaaagcaacgccagacacagcccagat

SEQ ID NO: 258255 - DNA, 2246 bp, Zea mays
acaaggactgccgtggctccggagatcggcgccattttctccaggttgttgaattcactagtgattggatcctagatctcaccgatcaaaacgacaggctcctctgggtgcccctccctctcgctctggggggtcaggacgagaaggagagagcgcagcagcgtttggcgtttggttccgtccggcgatgcacaggagagagagggaacgcccaggaaagatttatacagccttatttcgtggtggaattgatggaaccgaacggaacacatgcagggacgaacaaggagcggacggccttgttgctcgcacccgccgcacactcgaggacgatttagttagttagagcggttcaaagttacatcaaatcatcaatctttacctgtgcaacgactgacgaagcctcacccctcacctgtatttggtacccaaactcctcatgcaaagttaagagtgtgccctacttatcactaaaaaaattcctgtctatggataagcggcttcctcgcagaatcctgctccaacagactgtcactcctgctaacattttctgttagtattaataacaaataaatccccttgattctgtgttcagaaaaagaaaacagttttttaaggtggtgcctttggttttgctggtgtccttatttttaactttagtcatgtttttttctcatttttgctcttacaatgttagttatagaccggaagtcaaaactaagaaaaaaaagaagaaacctctctctccagaactcctttgagtctcctacacatactgttcaagcgcatgtttctcttaccataagtccttgttcaaacccaaattttgcatgcacatattggattgcttccatccatcctttttttttctgtaattactgcaacttctacaactgctaacctcctagccgttctaatcaacaaagatgattagtttcagcatgagctatatgcatcacaaccaaacatagtaacccctttcaaatgataagttgtgcaaccttacggaagtatttatcttctttgttccagaaaatactgaacaactcttcagaacattacaatactactctctcaagtgaaatataaccaaatcaaaggccacccccacggatacaaccatatatacatccatatccaagttggaattagttaagttactagctcaatccaaatatgaagtcattactcgttactcaaatatataatacaacaaaccaggcaactaggacaattacaatgttcactaattgcaaattaaatgatttatggttaaaatgggtttgtaggtacaccaaatagctcagtaggtagagcatatggcttaataggtggcttaagcttcatgagaatatgtagaatcatgtttgttgttttgctcctaggttggactagataagttaattagttctaacctttagatataggcaagaaagatcaataagataagagtttcagattagattagactagttttgactaaattaggtcaaattagattatattgaattagattagattagattagatctaattaatttggattagatcatgattgttactctaaggtggaataagtatgcttatcaggacaagatggatctattaggataatatagaatctttcaagataagatggatctgtttttatgggagtatttctatatttttatgcatatatatatatttagatgcaattatagacattacttcacaactcatcacactcaatcaaaaaaccaaatcaaacaggaatagtaagaacaagtgcaaatattgttagaaagttaggcatttttagttttaatttaatccagataatcagtgcgatatatgtgatgacatgtatgtgcatatgtgtataactactcgcataagcagtaaacagcaatgaaacatgcacaaatacgaagaacagagtgtacccagcggagggaccgatgctcaaggcaccagtggctccattcacacgagacatctcgtgtgtttgttcgatgtagccgtacgaagtcggtgcaggaagatgtacgcagtgcagtccctcgaacggtcgccgggaagaagaacagcagcacgcgtcaacttgggaaggcgacgaacagcaagctgtggacgatcacgcgagcagtcgcgaagacgctccccaaaaatctgatcgcccgcacacccgtgcaagtgtatctctgtggtcggtgatttcggaggaccagcccgggccgtcgaccaagcttgccctaatcgaattc

SEQ ID NO: 258256 - DNA, 450 bp, Zea mays
ggatgggacaaagtcgtgaatgccaagtatacgactcattcgaaacaacattgttcacagacttattacacgcatcatgcaaagataagcggaacaagcctccgctgtcatagccttttccaacaaacgttccatacttagacagtatacatttattagactcaaagacaattttgtagccatctcggcacaattgagagccactaactagattctttttgatggaggggacatgctgcacgttcttcaatagcaccgtctttcccgaagtaaacttcagaatgactgtaccaacaccaagaacacgcgcatgtgatccgttccccatcagcaaggctccagtccctttgcaccagcggagggaccgatgctcaaggcatcagtggctccattcacacgagtcatctcgtgtgtttgttcgatgtagccgtacgaagtcgatgcaggaag

SEQ ID NO: 258257 - DNA, 593 bp, Zea mays
aactaaacaaggcttaacgagtatttgcaataatttggcttcttctggcctcgccctcgattgaaattaagacatatgaaaagatcctagaagtagcaaggataagatgtgtgcattttttccttttctagttgtggggccaaactggatcgattaataatcgaacaccgttaatgacaccctcaattggcgccaaattacaaagcggatggttttaaaagagctgcttgtaggcgaaggaggcgtccaatgggtggatgaggtaggtgaggacaagcgccaccagcatgaggacgtaggcgattccctggtctacacttgttccgtcactggtagcaggtgctggggcgggggccagggcgttagccgcggcggcgagcgtggcgacgacggccatcacaaggactgccgtggctccggagatcggcgccattttctccaggttgttctctcctcgcgggaacgggggcagagacaccgatcaaaacgacaggctcctctgggtgcccctccctctcgctctggggggtcaggacgagaaggagagagcgcagcagcgtttggcgtttggttccgtccggcgcacgcgtccg

SEQ ID NO: 258258 - DNA, 1323 bp, Zea mays
gaattcggctcgagctcgagccgattcggctcgagtgatttgatcgcagtgcctactggtgttgcatggtggatgtacaacaatgaagacactcctgttgttgccgtttctattattgacaccaacagcttggagaaccagctcgaccagatgcctaggagattctatcttgctgggaaccaagagcaagagtttctaaaatatcagcagcagcagcaaggaggttcccaaagccagaaaggaaagcaacaagaagaagaaaacgaaggaagcaacatattgagtggcttcgcccctgaattcttgaaagaagcgttcggcgtgaacatgcagatagtgagaaacctacaaggtgagaacgaagaggaggatagtggagccattgtgacagtgaaaggaggtctaagagtcacagctccagccatgaggaagccacagcaagaagaagatgatgatgatgaggaagagcagccacagtgcgtggagacagacaaaggttgccaacgccaaagcaaaaggagcagaaatggcattgatgagaccatttgcacaatgagacttcgccaaaacattggtcagaattcatcacctgacatctacaaccctcaagctggtagcatcacaaccgccaccagccttgacttcccagccctctggcttctcaaactcagtgcccagtatggatcactccgcaagaatgctatgttcgtgccacactacaccctgaacgcgaacagcataatatacgcattgaatgggcgggcattggtacaagtggtgaattgcaatggtgagagagtgtttgatggagagctgcaagagggaggggtgctgatcgttccacaaaactttgcggtggctgcaaaatcccagagcgataactttgagtatgtgtcattcaagaccaatgatagaccctcgatcggaaaccttgcaggggcaaactcattgttgaacgcattgccagaggaagtgattcagcacacttttaacctaaagagccagcaggccaggcaggtgaagaacaacaaccctttcagcttcctggttccacctcaggagtctcagaggagagctgtggcttagagagccctttttgcatgtgctaccacacttttgtccttttgggctctagctagtgctggtagcagtaaataagaatgaataaaagaaacaaaggcttagatgccctttgttaagtgtagaataacgggtatagtaactatgtacccttgtgtaatgagtcactcaagtacctatgcgggaaaagcataaataaaagaagaaattccaataaaaaaaaaaaaaaaagggcggccgccg

SEQ ID NO: 258259 - DNA, 1418 bp, Zea mays
acgcgtggtcgacggcccgggctggtaaatccagtcccacatcgtctccttcctcctcgtccacccattcctccgttcttccttaattcctcatttcctccacgtacgcgggcatactctgcgagtccaggagatattttcccccttcttcacgatactctcgacgagagcgtctccatggccggaaaaggagacgggccggcgatcggcatcgacctcggtacgacctactcgtgcgtcggggtgtggcagcatgaccgagtcgagatcatcgccaacgaccagggcaaccgtacaacgccgtcttatgtcgcgttcaccgattcggagaggctcgtcggcgacgccgccaagaaccaggtcgccatgaaccccatcaacaccgtcttcggtaagacgatcatcaccaatcttttgttacgtgcgctgtttatctgtttgttcgatccattaatacacggggtttgggtgtgggtgtgggtgtgggactaatacgctgtgtggtttgttgatccgtttgcgcgcatttgcagacgcgaagcggctcatcggccggcgcttctctgacacgtcggtgcagagtgacgccaagctatggcctttcaaggtgatcccgggctccggcgacaagcccatgatcggggtgcagttcaggggcgaggagaaacagttctcggccgaggagatcagctccatgatcctgaacaagatgaaggagacggccgaggcttacctcggcaccaccatcaagaacgctgtcgtcaccgtcccggcctacttcaacgactcccagcgccaggccaccaaggacgccggcgtcatctccggcctcaacgtcatgcgcatcatcaacgagcccaccgccgcggccatcgcatacgggctcgacaagaagtcgagcagcgacggcgagaagaacgtcctcatcttcgacctcggcggcggtacctttgacgtctcgctcctcaccatcgaggagggcatctttgaggtcaaggccaccgccggcgatacccacctgggaggcgaggacttcgacaaccggctcgtgaaccacttcgtccaggagttcaagaggaagaacaagaaggacatcactggcaaccccagggcgctccggcggctgaggaccgcctgcgagagggctaagaggacgctctcctccaccgcccaaaccaccatcgagatcgactcgctctatgagggcatcgacttctacacgaccatcacccgtgcccggttcgaggagctcaacatggacctcttccgcaagtgcatggagcccgtggagaagtgcctccgcgacgccaagatggacaagagcagcgcgcacgacgtcgttctcgtgggcggctccactcgcatcccccgcgtaattgcgataaaggaaaggctatcattcaagatgcctctgccga

SEQ ID NO: 258260 - DNA, 1708 bp, Zea mays
tgacaaaaaggccaccagcagcggcgagaagaacgtgctcatcttcgacctcggtggtggcaccttcgatgtgtcgctcttgaccatcgaggagggcatcttcgaggtgaaggccaccgccggtgatacccatctgggtggggaggacttcgacaaccgcatggtcaaccacttcgtccaggagttcaagcgcaagcacaagaaggacatcagcggcaacccgcgcgcgctgcggcgtctgcggacggcctgcgagcgggccaagcgcacgctgtcgtccaccgcgcagaccaccatcgagatcgactcgctgtacgagggcatcgacttctacaccaccatcacccgcgcccggttcgaggagctgaacatggacctcttccgcaagtgcatggagcccgtggagaaatgcctccgcgatgccaagatggacaagagcaccgtgcacgacgtggtgctcgtgggcggctccacgcgcatccccaaggtgcagcagctgctccaggacttcttcaacggcaaggagctctgcaagagcatcaaccctgacgaggccgtcgcgtacggcgccgctgtccaggccgccatcctcagcggcgagggcaaccagaaggtgcaggacctgctccttctcgacgtcaccccgctctccctcggcctggagactgccggcggcgtgatgaccgtgctgatccctcgcaacaccaccataccaacgaagaaggagcaggtgttctccacctactccgacaaccagccgggggtgctgatccaggtgtacgagggagagcgcgccaggaccaaggacaacaacctccttggcaagttcgagctgtccggcatcccgccggcgcctcgcggcgtgccccagatcaccgtgtccttcgacatcgacgccaacggcatcctgaacgtgtcgccggaggacaagacgacgggaaagaagaacaagatcaccatcaccaacgacaagggccggctgagcaaggaagagatcgaacgcatggtgcaggaggcggagaagtacaagaccgaggacgaggaggtgaagcgcaacgtggaggcccgcaacgcgctggagaactacgcgtataacatgcgcaacacggtgcgggacgagaagatcgcgtcgaagctgcccgccgatgacaagaagaagatcgaggacacgatcgaggacgccatcaagtggctcgacggcaaccagctcgcggaggccgaggagttcgaggacaagatgaaggagctggagagcatctgcaaccccatcatctcgcagatgtaccagggcggcgcgggcgctgcgggcatggacgaggacgtgcccggcggtggcgccggcaacggaggtggcagcggcgccgggcccaagattgaggaggtcgactgagcgagccatggacggtgatgatctggatgggacgcttctgcgcgtgcggtgcagctagagttgagagtgtgctacgtgaactcgtgaaggcgtattaatctgtgtgtgcgataataatctggggttaacacctgcagggtgttctctgtttccgttgtcaagtggttgtaagtagggtgaaagtgtgaggcatatacattaggcttagtaaaatagtaacccaagtgttactgtaaccgcctccgcgagttcaggagtctataaatatatcagtatgtaatactgtttgtttttctcgctatgcacgttctagcatcc

SEQ ID NO: 258261 - DNA, 803 bp, Zea mays
tacaacaccctgaggtgagtcgtattaaattccacgataacatcaaccacgtccagatctgagtccagcacatggtcctcttccgcaagtgcatggagcccgtggagaaatgcctcggcgatgccaagatggtcaagagcaccgtggacgacgtggtgctcgtgggcggctccacgcgcatccccaaggtgcagcagctgctccaggacgtcttcaacggcaatgagctctgcaagagcatcaaccctgacgaggacgtggactacggtgctgctgtccaggccgccatcctgagcggcgacggcaacgataaggtgcacgacctgctccttctggacgtcaccccgctgtccctgggcctggagaccgccggcggggtgatgacggtgctgatccctggcaacaccaccataccaacgaagaaggagcaggtgttctccacctactccgacaaccagccgggggtgctgatccaggtgtacgagggagagcgcgccaggaccaaggacaacaacctccttggcaagttcgagctgtccggcatcccgccggcgcctcgcggcgtgccccagatcaccgtgtgcttcgacatcgacgccaacggcattctgaacgtatcagcggaggacaagactacaggacagaagaacaagatcaccatcaccaacgacaaggggcggctgagcaaggaggagatcgagaagatggtgcatgacgctgagaagtacaaagctgatgacgaggagcatacgaagaaggtggacgccaaagactcgctggagaactacgcctacaacatgcgc

SEQ ID NO: 258262 - DNA, 2177 bp, Zea mays
gggccccccctcgaggtcgacggtatcgataagcttgatatcgaattcctgcagcccgcgagtctgatgagacatctctgtattgtgtttctttccccagtgttttctgtacttgtgtaatcggctaatcgccaacagattcggcgatgaataaatgagaaataaattgttctgattttgagtgcaaaaaaaaaggaattagatctgtgtgtgttttttggatccctccaggacttcttcaacggcaaggagttgtgcaagagcatcaacccagacgaggcggtcgcgtacggagcggccgtccaggccgccatcctcactggcgagggcaatgagaaggttcaggatctgctcctgctcgacgtctcgccgctctcgctcggcctggagacggctggaggcgtcatgactgtgctcatccccaggaacaccaccatcccgacaaagaaggagcaggtcttctccacttactccgacaaccagcccggcgtgctcatccaggtgtacgaaggtgagagggccaggaccaaagacaacaatctgctcggcaagttcgagctctctggcatccctccggcgcccgggggcgtcccccagatcaccgtgtgtttcgacatggacgcgaacggcatcctcaacgtgtcagcggaggacaagaccaccggccagaagaataagatcacgatcaccaacgataagggccggctaagtaaggaggagatcgagaagatggtgcaggaggcagagaagtacaaggccgaggacgaggaacaccagaagaaggtgaacgccaagaacacgctcgagaactacgcctacaatatgcgcaacaccatcagagacgacaagatcgcctccaagctaccggaggacgacaagaaaaagatcgatgacgccgtcgagggggccatcaattggctcgacaacaaccagctcgccgaggttgatgagtttgaggacaagatgaaggagctggagggcatctgcaaccccatcatcgcgaagatgtatcagggcgccgctggtcctgacatggccggtggcatggatcaggatgcttcgccggctggtggcagcggtgctggacccaagatcgaagaagtcgactaaatgaggaaattctgatatatgtatttttgcttaaataattgcgtcaattacaaagtggatcttattattattattatgcagtttttttggccatacacagggccccaagttcatgtttaagttcatttttactagtaccctggctataaacagtgattagccctgcatgtattggcggtatttatatatcttcgaaagctattttagatggctaaaaacctttattaacctatatgcaatacaatgaataagatctgaagtttaacaactggttcaacaattactgacttcacatagaacaacgcactacaataacaagatgcacacaaaaaccaatcaagcattccgtaataaaaataactctatatataaattttggtttgcagtccagggttttcaccgttaccagttttattatttatataaataccattcaaacagatattgatagtttacggctccatgttcaaacatcatctactctattaaattcgagaagccatagatcttcgaataaaacatagcaatctaaaaccatatttcaaagttccaaaataacggatatatagtttctcactggttttgtggcaagtgagctgtcacctagaccgctatagctcttcacgcgctgcaaaatccctctaatcgaaccagcatgcggcagagtcctcagcatccttggctggttccttgaatgtgaaccttgcaagtgggttgtcaaccgtaaccgctacagctcttcacggtctgcaaaccctcttcctctaacccaaccagcatgcggcagaagtcctcagcatccttggcaggttccttgaatgtgaacctgaactccttccagtggtattgtggattagtaaggatgtctccttgaggcactttggcgaggacatcaaaaccatggtggtcaatggaaagcatgacagcgctcttcaagaaaagatagataccaacccgggccgtcgaccacgcgtgccctatagtgggggatccactagttctagagcggccgccaccgcggtggagctccagcttttgttccctttagtgagggttaattgcgcgct

SEQ ID NO: 258263 - DNA, 1740 bp, Zea mays
  unsure (1)..(1740): unsure at all n locations
gaagagctatgaancgatcgcatgcaccgcgtatcgtaatgcttgtgatacctnnctagagatcgacccacgcccgtccgcaagcgacagccggctttcagttgcgcggcgctcgaatgatgagtgcgtatcactcatacgagacccacctgtctgcttgctacttccacctacaggcctttgacaaagaatggcaacaagctctggcgagaagaacgtgctcatctttgaccttggtggtggcacgtttgatgtgtcgctcctcaccatcgaggagggcatcttcgaggtgaaggccactgcgggcgacactcaccttggcggcgaggacttcgacaatcgcatggtgaaccacttcgtccaagagttcaagcgcaagaataagaaggacataagcggcaacccccgtgcactgcgccggctgcgcacggcgtgcgagcgcgccaagcgcacgctgtcatcgactgcccagacgaccattgagatcgactccctgttcgagggcatcgatttctactccacgatcaccagggctcgcttcgaggagctcaatatggacttgttccggaagtgcatggaacctgtggagaagtgcttgcgcgacgccaagatggacaagagcagcgtgcacgacgtcgtgctcgtcggtggctccacccgcatccccaaggtgcagcagctgctgcaggacttcttcaacggaaaggaattgtgcaagagcatcaaccccgacgaggctgtggcgtacggcgcggctgtccaggctgccatcctcagcggcgagggcaacgaaaaggtacaagatctgctcctgctcgacgtcacgccactgtctctcggcctggagactgcaggtggcgtcatgacggtgctgatcccgaggaacaccaccatcccgaccaagaaggagcaggtcttctccacgtactccgacaaccagccgggcgtcctgatccaggtgtacgagggtgagcgcgcgaggaccaaggacaacaacctcctcggcaagttcgaactctccggcatccctcctgctccccgcggcgtgccccagatcacggttaccttcgacatcgatgccaacggcatcctcaacgtctctgccgaggacaagaccaccggccagaagaacaagatcacgatcaccaacgacaagggccggcttagcaaggaggagatcgagaagatggtgcaggaggctgagaagtacaaggcagaggacgaggaggtcaagaagaaggtggatgccaagaacgcgctcgagaattatgcctacaacatgaggaacaccatcaaggatgacaagatcgcctccaagctcccggctgaggacaagaagaagatcgaagatgccgttgacggcgccatcagctggctggacagcaaccagctggctgaggtggaggagttcgaagacaagatgaaggagcttgaggggatctgcaaccccatcatcgcgaagatgtaccagggcgagggcgcgggcatgggcgctgctgctggcatggatgaggatgccccgtctggtgggagcggtgctggtcccaagatcgaggaggtggattaaattggttagtgttcgaggtttggtttggtgaggtgtcaagtgcctgaactctgaaggttgtttgtgagataagtgatcttacgaagtggtcgcaatagctgcggcctgtgttgaacttctcagaaataaataagttttcgttcctaaaaaaaaaaaaaaaaaagggcggccgc

SEQ ID NO: 258264 - DNA, 1148 bp, Zea mays
tcgcccacgcgtccgcccacgcgtccgcccacgcgtccgcccacgcgtccggcagcagccaattcgctcgagttcagatcgagcgcgcgccaagcaagtcttccggccggccgcgaagagcgcaatcaagcaagacaagatggtgaagctcgccttcggaagcgtcggcgactccttcagcgccacctccatcaaggcctacgtggccgagttcatcgccaccctcctcttcgtcttcgccggcgtcggttccgccatcgcctacgggcaactgacgaatggcggcgcgctggacccggcgggcctggtggcgatcgcgatcgcgcacgcgctggcgctgttcgtgggcgtgtccgtcgcggcgaacatctcgggcggccacctgaacccggccgtgacgttcgggctggccgtgggcggccacatcaccatcctgacgggcgtcttctactgggtggcccagctgctgggcgccaccgtggcgtgcctgctcctcgggttcgtcacccacggcaaggccatccccacgcacgccgtcgccgcgggcatcagcgagctggagggcgtcgtgttcgagatcgtcatcaccttcgcgctcgtctacaccgtgtacgccaccgccgccgaccccaagaagggctccctcggcaccatcgcgcccatcgccatcggcttcatcgtcggcgccaacatcctggccgccggccccttcagcggcggctccatgaacccggcccgctccttcggccccgccgtggcggccggcaacttcgccggcaactgggtgtactgggtcggccccctcgtcggcggtggcctggcggggctcgtctacggcgacgtcttcatcgcctcctaccagccggtcggccagcaggagtacccatgaaagtccggagctagcccgatcgatccgtctgtgttgatttcaccatcgtcgtcgtcgtgtcatctggcgcttcgtgctgtaatcatgtttggtcctgtttgcatttcccaacgtctggttttcatttccattcaccaacggtgccaagatgccgtactgtaagcgagagaagtgttcggtctgtatctgtataaatgcaatgcacagttcggcgtttccaaaaaaaaaaacaaaagggcggccgctcgcgatctagaac

SEQ ID NO: 258265 - DNA, 544 bp, Zea mays
acgcctcttttagaacaaggcacaggacgaggctgtggggatgatttaaacgctaagaacacgctcgagaactatgcctataacatgaggaacaccatcaaggatgacaagatcgcctccaagctctcggcagaggacaagaaaaagatcgaggacgccgtcgatagcgccaccagctggctggacagcaaccagctagctgaggtggacgagttcgaagacaagatgaaggagctcgagggcatctgcaaccccatcatcgccaagatgtaccaaggcgctggcgcgggcatgggcgatgcggctggcatggacgaggatgccccgtctggtgggagcggtgctggtcccaagatcgaagaggtcgattaaattggttagcatcgggcggtttgttttggtgtggtctgaagtactcctgaactctgaaggttgtctgtgagatggggtggtgtccacagtctgtgggctgtggtcgaacttcttaataaatataagttttagttcctaatttgttttcgtaaaaaaaaaaatcgaacaatct

SEQ ID NO: 258266 - DNA, 551 bp, Zea mays
ccctcggcaccatcgcgcccatcgccatcggcttcatcgtcggcgccaacatcctcgccgcggggcccttcagcggcggctccatgaaccccgcccgctccttcggccccgccgtcgccgcggccgacttcgccggcaactgggtctactgggtcggcccgctcatcggcggcggactcgctggcctcgtctacggcgacgtcttcatcggcggctcctaccagcaggtcgccgaccaggactacgcctaagtagtgtgctccgttcgtctggattcagctcatccaacgcagccgcgcgtttcgatcggcgtcgtcatttgctttgctcttcatttcatcacgttatgtaacgtgccaatgatgtgtgtcgtcctggtctgttccattccgtccttgtattcatttcccttcttttttcggggtaaaatcgatgtaaagatctcatccgatctgccgttttcgatcgccttggagtggaaaaaaacaggtgattttcgtttcgacttcgtttatgcatggaattcttggctccttttacggtttgtatcc

SEQ ID NO: 258267 - DNA, 842 bp, Zea mays
tttgttttcgtgggcggacgcgtgggcgcacgccacgagcgaagcaaagcaatcggaattctctgcgatttctctagatctcgactaccccccactagttttggttcctcctttcgttcgagagagcgattctggtggcaatggcgaagagcgagggtccggcgatcgggatcgacctcggcaccacctactcgtgcgtcggcgtgtggcagcacgaccgggtggagattatcgccaacgaccaggggaaccgcaccacgccgtcctatgtcggcttcaccgacaccgagcggctcatcggcgacgctgccaagaaccaggtcgccatgaaccccaccaacaccgtcttcgatgccaagcggttgatcggcaggaggttctctgatccgtcagtgcagagtgacatgaagctatggccgttcaaggtcatcccagggcctggtgacaagcccatgattgtagtgaactacaagggcgaggagaagcagtttgctgctgaggagatctcctccatggtcctcatcaagatgaaggagattgctgaagcctaccttggttccaccatcaagaacgcagtggtgacagtgccggcctatttcaacgactcgcagaggcaggccaccaaggacgccggtgtcattgcgggcctcaatgtgatgcgtatcatcaacgagcccactgctgctgctattgcctacggtcttgacaagaaggccaccagctccggcgagaagaacgtgctcatcttcgaccttggtggtggcacgtttgatgtgtcgctcctcaccatcgaggagggcatcttccaggtgaaggccactgcgggcgacactcaccttggc

SEQ ID NO: 258268 - DNA, 1227 bp, Zea mays
gaaattcccgttgagaaatagacttacggggcagacgtgaatcaaaaccataaaggagccaagaaatccatgcgtaaacaaacttggaacgaaaaccaatttttcccaacacagcgcgagtacggcaggcaagacgagatctttacatctatttcaccccgaaaaaagaaagggaaatgaatggaccagggcaaaggcacatcatattggcacatacatgcatacacaaccattaattgaacgtggcgaggagcaaaagcaaacgacgacggttttgaatccattcatccagagcggagatggagtggtgaataaattaggcgtagtcctggtccgcgacctgctggtaggagccgccaatgaagacgtcgccgtagacgaggccagcgaggccgccgccgacgagcgggccgacccagtagacccagtttccggcgaagttgcccgcggcgacggcggggccgaaggagcgggcggggttcatggagccgccgctgaagggccccgcggcgaggatgttggcgccgacgatgaagccgatggcgatgggcgcgatggtgccgagcgagcccttcttggggtcggcggcggtggcgtacacggtgtagacgagcgcgaaggtgatgacgacctcgaacacgacgccttccagctcgctgatgcccgcgacggcgtgcgtcgggatggccttgccgtgggtgacgaacccgaggagcaggcacgccacggtggcgcccagcagctgggccacccagtagaagacgcccgtcaggatggtgatgtggccgcccacggccagcccgaacgtcacggccgggttcaggtggccgcccgagatgttcgccgcgacggacacgcccacgaacagcgccagcgcgtgcgcgatcgcgatcgccaccaggcccgccgggtccagcgcgccgccattcgtcagttgccctgcatgtgtgtggaacatggacaagggattattattgacgtaggcgatggcggaaccgacgccggcgaagacgaagaggagggtggcgatgaactcggccacgtaggccttgatggaggtggcgctgaaggagtcgccgacgcttccgaaggcgagcttcaccatcttgtcttgcttgattgcgctcttcgcggccggccggaagacttgcttggcgcgcgctcgatctgaactcgagcgaattggctgctgccccacgcgtccgcccacgcgtccgcccacgcgtc

SEQ ID NO: 258269 - DNA, 704 bp, Zea mays
cgtttctgctcctcgggttcgtcacccacggcaagggggtcctttcgcacgccgtcgccgcgggcatcagcgagctggagggcgtcgtgttcgaggtcgtcatcaccttcgcgctcgtctacaccgtgtacgccaccgccgccgaccccaagaagggctcgctcggcaccatcgcgcccagcgccatcggcttcatcgtcggcgccaacatcctcgccgcggggcccttcagcggcggctccatgaaccccgcccgctccttcggccccgccgtcgccgcgggcaacttcgccggaaactgggtctactgggtcggcccgctcgtcggcggcggcctcgctggcctcgtctacggcgacgtcttcattggcggctcctaccagcaggtcgcggaccaggactacgcctaatttattcaccacaccatcgtctccgctctggatgaatggattcaaacccatcgtcgtttgcttttgctcctcgccacgttcaattaatgcttgtgtatgcatgtatgtgccaatatgatgtgccgttgccctggtccattcatttccctttcttttttcggggtgaaatagatgtaaagatctcgtcttgcctgccgtactcgcgctgtgttgggaaaaatttggttttcgttccaagtttgttaaaattaaaaaaaaaaaaaaatacaaaaatttaaacaaaaaaaatatatg

SEQ ID NO: 258270 - DNA, 711 bp, Zea mays
atatctttggatgaaaagtaccccaccacacacgcacgaccccaatctaggcctcaagctcaacgtcgacaaggcgctcggcctccccgccgtctgccatgcgcccgccaatatctccgactgccccaggctgctggacctgccggccggctccaaggacgcacaggtgttcgagcagtacgcgaggcagcaggctgcggcggcggcgcagggcggcgcacccaccagtggacgcagcagcgcggcggcgagcacgaccgcgggcgcgcagaagagcggagcctcagccgccggtcggtggttgggagtggggagggtcggtggtgctggtggcggcgcacgcgcggtggcgccgctccccgtgcctttcctgctcctgctcgggtagataataatcactttacgcgcggccaacggcccgagtcccggcggtttggttggcgccgcgcgttgccgacttgtggtgtgcttcgggtgcgtgcgtgtgtggtggggtacttttcacactatattggaaaaagaagctattatatatctttgactgaaaaaaagtgtcgttgtataattatcttttttttcgtgtccgtgtatgcaacccctcctctcatagacccatagcgccaaatagtcatccaatgaatattctatctgactctttgtatacctctctcttagtttaaacgggctatctattctttactctcaaacaga

SEQ ID NO: 258271 - DNA, 483 bp, Zea mays
  unsure (1)..(483): unsure at all n locations
tttattttttttttttttttttttttttttttggggttttttttttttttttggggcggcaggcaagacgagatctttacttctatttcgccccgaaaaaagaaagggaaatgattggaccagggcaaaggcacatcatattggcacatacatgcatacacaaccattaattgaacggggcgaggggcaaaagcaaacgacgacggttttgaatccattcatccagagcggagatggagtggtgaataaattaggcgtagtcctggtccgcgacctgctggtaggagccgccaatgaagacgtcgccgtagacgaggccagcgaggccgccgccgacgagcgggccgacccagtagacccagtttccggcgaagttgcccgcggggacggcggggccgaaggagcgaacgccccccctggagccgccgctgaagggcacaaaagagcccangagtccgcccacgcgtccgcggncgcgtgggt

SEQ ID NO: 258272 - DNA, 705 bp, Zea mays
atagctcttcacgcgttgcaaaatccctctaatcgaaccagcatgcggcagagtccttcagcatccttggctggttcctagaatgtgaaccttgcaagtgggttgtcaaccgtaaccgctgcagctcttcacggtctgcaaacactcttcctctaacccaaccagcatgcggcagaagtcctcagcatctttggcaggttccttgaatgtgaacctgaactccttccagtggtattgtggattagtaaggatgtctccttgaggcactttggcgaggacatcaaaaccatggtggtcaatggagagcatgaccgcgcttcttgctatcacattaaaatacgcaaaacagaacatcaccagtgccctcctcctagagtcattttggttgataccatccacaagttcgcagagaatggcattagcagatctgcttttggtgcttcaaagctgtccaattcaatattatggctgctcccattgaagtctatgtagacacaggaacctatgtcaaattttaagatgttgtaagagctctcctcactgagcagactaaggaggccctcactccgggacctgcaggtagcacctgccgaagacagtattgctgacactccataactagctttgctagcagctgcatgtgccttcagaatagtttgcttcaggctatcggcaataattggaacctgtgagtctttcagccgc

SEQ ID NO: 258273 - DNA, 482 bp, Zea mays
cccacgcggataagctatagccatcttcttctctgaattccagtccaagggccggaataccgtcagaaggagtgggagacggggggaaaaaagatggtgaagctcgcatttggaagctttcgcgactctttgagcgccgcgtcgctcaaggcctatgtggccgagttcattgccacgctgctcttcgtgttcgccggcgtcgggtccgccattgcctactcgcaattgacgaagggcggcgctctggaccccgccggcctggtggccatcgccatcgcccatgcgttcgcgctcttcgtcggcgtctccatggccgccaacatctccggcggccacctgaaccccgccgtcaccttcggcctccccgtcggcggcacatcaccgtcctcaccggcctcttctactgggtggcccagctgctgggcgcgtccgtggcgtgcatgctcctcaggttcgtgacccagggcaaggccatcccgacg

SEQ ID NO: 258274 - DNA, 336 bp, Zea mays
cccacgcgtccgcccacgcgtccgatcaagctcagagcctcagagcgccaccaagtcttgcggtcgcgaagagcaacgcaacaagatggtgaagctcgcattcggaagcgtcggcgactccttcagcgtcacctccatcaaggcctacgtggcggagttcatcgccaccctcctcttcgtcttcgccggcgtgggttccgccatcgccttcgggcaactgacgaatggcggcgcgctggaccctgcgggactggtggcgatcgcggtggcgcacgcgctggccctcttcgtgggcgtctccgtggccgcgaacacctccggcggccacctgaaccc

SEQ ID NO: 258275 - DNA, 644 bp, Zea mays
cgaattaccggccgacccacgcgtgcgcccggtcagccgcagcaagtgcccagaaggccagaaccagaaccaagcagctcgttgcaacctcatatcatcccctgccacgcacctccgtccgccgcgccatggaatcgaggaggagggccgtgcccaccgtgacggcggttgcggtggcgacgctgctgctgacgatgatgacgtcgtcgggcgtgggcggcgacttcgcggcggaccgggcggagtgctcggagcagttggcggggctggcgacgtgcctgacgtacgtgcaggagcaggcgacggcgacggcgccgacgcccgactgctgcgcgggcctcaaggcggtgctgcagagcagccgcaagtgcctgtgcgtgctggtcaaggaccgggacgaccccaatctaggcctcaagctcaacgtcgacaaggcgctcggcctccccgccgtctgccacgcgcccgccaacatctccgactgccccaggctgctggacctgccggccggctccaaggacgcacaggtgttcgagcagtacgcgaagcagcaggctgcggcggcggcgcagggcggcgcacccaccagtggacgcagcagcgcggcggcgagcacgaccgcgggcgcgcagaagagcggagcc

SEQ ID NO: 258276 - DNA, 430 bp, Zea mays
  unsure (1)..(430): unsure at all n locations
tctttcaaggatgacaagatcgcctccaagctcccggctgtggacaagaagaagatcgatgatgccgttgacggcgccatcagctggctggacagcaaccagctggctgaggtggaggagttcgaagacaagatgaaggagcttgaggggatctgcaaccccatcatcgcgaagatgtaccagggcgagggcgcgggcatgggcgctgctgctgatccaggtgtacgagggtgagcgcgcgagtcccaagatcgaggaggtggattaaattggttagtgttcgaggtttggtttggtgaggtgtcaagtgcctgaactctgaaggttgtttgtgagataagtgatcttacgaagtggtcccaatagctgcggcctgtgttgaccttctcagaaataaataagttttcgttccttaanaaaaaaaanaaaa

SEQ ID NO: 258277 - DNA, 260 bp, Zea mays
cagggcaagggcgcgggcatgggcgctcctgctggcatggatgaggatgccccgtctggtggcaccggtgctggtcccaagatcgaggaggtggattcagtcggttagtgttctaggtttggtttggtgaggtgtgaagtgccgtgtactctgatggttgtttgtaaggtgtggtcccaatagctccggcctgtgccgaacttctcagaaataaatgagttttcgttcaaaatttgttaaatttcaaaaaaaaaaaacaa

SEQ ID NO: 258278 - DNA, 2008 bp, Zea mays
gaattcggctcgagattgggcctctttctagagtctggcaagtcatacactttgtgcctggttgaggcttggtctgctgaatctatgagcaggagaagcaatgcatggggtagaaaagttgaggcaatagatgaaagtgatgacacctgtggtttctgtggagatggtggtgaattactttgctgtgacaattgcccatcgacatatcatcaagcttgcttgtctgctaaggagcttccagaaggtagttggtactgccataattgcacttgtcaggtttgtggggggccatttagtgaaaaggaggtttcaacattctcggcgattttcaaatgtttccaatgcggagatgcataccatgacacttgcattgaacaagagaagctacctcttgaggatcaaatatctcagacatggttttgtgggaaatactgtaaagagatattcatagggctgcgtagtcatgtcgggacagataatattcttgacagtgacctttcatggtccatactgagatgcaacaatgacgggcagaagctacattctgttcagaagattgcctgtttggcagaatgtaatatgaaattagcagtggctcttactctattggaggaatgtttcattcgtatggtggatcctagaactggtgtggacatgataccccatgttttatacaacaagggatcaaactttgctcgtgtggattatcagggattctatactgtaatcctggagaaaggtgatgaaatattatgtgtggcttctatcagagtacatggaactaaagccgctgagcttccttttattgctacttctgtagactttcgacggcaaggaatgtgccgaattctaatgagcatcattgaaaagatgctctgttcatttaatgttaagatgttggtcctttctgccatcccagagttggttagcacatgggtgtcaggatttggcttcaaacctatcgaagatgctgaaaggaaacaacttcataatgtaaacttgatgttgtttcctggaacatccttactaacaaagagattggatggatttattatggccacaaaaccaggcgaggaaaaggatatacatgaagtttctggagtgcctaatcttaagcgtatgcctaatgggaaagcaaatgagcatttcaaactccatgaccttgatttgtccgggacagagtttaaagctgaggtttccgtgaatggtccattcagaacactgaaacatgaatgtggttcagcagcatggtttcagtctactaagttagctgttggggaagtgtgatattcttacacaaattatctgggctcatgctctgcatcgatactagctgctttgtgttggccaatttcgtcttcccacttcatggctcaaattaatttgcagcagcaaaatcattcgaacacttgctgctgcatgaactcatccttttcaagtaaagttctcacaagactactgggaaatggttgggatgacgcaggcatccatgaatttgggttgagcaaagttgaagaaaccacagattggtgtggtctgttctgcatcgagaaaatggaaattataactgtctctcctgggtgaagtgctctcctgagactgggtaaagtacgcaacacctgagttgatattgcttgcacgttgaacaaagaggatgtatttgcactccaacgtacaaagtgtaacgcattcggccccttttcaaagtaagccatgataggaattaatctaagctgtttggtatatacatcaaaagggtactgcagtaacatgtttggtaccttctcttgcgagttttattttgatatatgtgttttatatgtgtctagattaatcatcatctatttaaatatagacataaaaagaattatattctggaacggagtgagtattattttgccatatgtgctgttaggttgaggcccaaatggcaatgcaatgcatctgtcggcagttgattttcctgaaaaaaaaaaaaaaaaaaaaaaaaaaaaaaaagggcggccgc

SEQ ID NO: 258279 - DNA, 1448 bp, Zea mays
agttgcacaatttctgatgaccactcatcattactgctacccattatctcctcagagtcagaggcattgcttttaaattcaacagcaggcgtggcaggtcctatcctagattgtgaggagcctgctgatgttccattggagccaaattctggtacagatgatagatgcttcatttcaaacatgtctccaacttccatgactccggacaaaaagaatgctgctgaatgttcctcatcgaatattggccctacagaatcaattaccgagcatatttcaccaagggatctttgcattgccatactgatgaaagatggactaataaatgaatcaagaacaagaatggcacataaagaggaattcactgacaatgatgctaaccctttgttggcatgcaataattgtggctgtcgaccagcgtccgtgaagatgctgatatgcgattcttgtgaagcaggatttcatttgtcttgctgcattccttgtattaaggagctacctactgatgaatggtattgtgctccatgcttgtgtaagaaacccaagagtctttatggcaaactctcagagggcaggataaatccttccaggaatactaacacaaggcctcatgggatgagtcacatagagtacatgctgaaggatgctgaaccatatgtaactggggttcgacttggtagagattttcaggcagaggtgccagaatggtctggtccatcatccagcagcgatgtttactttgacgagccctgtgcaattgattctgcagaactaactacatttaatttgtgcaaaatgagtaatcaaagtcattcttccattggtaattggatccaatgccgtgagaccttgaatccaggagattctgacaagcaagttgtctgtggaaaatggagaagggcacccttatatgttgtacagtcagataattgggattgtttttgttgtcttctttgggatccagtccatgctgattgtgctgttccacaggagttgaagactagtgaagttctaaagcagctgaagtttgtaaacatgctaaagaatcagctggtggaccaaaaccagaagcctgcttaaataaatgccagtaccagagtgggcgattcctcaagagaaggatacccattatgatggtatgaatgagttgccgtatgtggcgttctcttgtagtaactagccgtctgtgaacatgtgagaactatgttgttctagcctgttaaacgaaatgatctgtactgtcttctatagggtcttggtacacaagagttatacaacatagatctgtctgtgcagtccagggagcagcgtgtcgctactgctgtgatcgccgccaaacgatcctgtgatcctgcgccaagttttgtttcttggtaaaaaaaaaaaaaaaaaaaaaaaaaaaaaaaaaaaaaaaaaaaaaaaaaaaaaaaaaaaaaaaaaagggcggccgc

SEQ ID NO: 258280 - DNA, 1432 bp, Zea mays
gtcgacccacgcgtccgcccacgcgtccgaaagcaggcttctggtgtttcagaaattgatgtggctgaacacaagatagaagaaacaagcctggttggtgttgcccgcaaagcccctaagggagttgactccccagttgcgattctggctaatcctacgataccaaaacgaagcctggaaggtctggatcggatggaatttgcaaggattgtggcagaaaggcagacagcaaaggaagaattatctgtgacagatgtgaagctgcgtaccatgtttcgtgtctgaagcttgccatcgatgaagaggccccagcaaaatggtactgtcccagctgcgttgagccagacgtagctttgaagcataaaaaccatggcaggtcacatgaaggctgtgatgtatgcgagtggctcgtggtgaagccagaagagcctgctgaagatgttagcgagcctgaactggcggtcaaaacgcaggagagctcagtgtcaagcatgggcgaagacagcgaaccagacctctcaacgactgctctagcgaacttgtgcaagaactgtggcacatgcgaagacgaggacaggaagttcatggtatgcgggcatggtttatgttctttcaagttctaccatgtcctgtgcctgaaagagagacagattgcaagcgagaagcagaagaatctaaagtgctggtactgcccgtcttgcctgtgcagacggtgcttcaaggacaaggatgatgagaaaatagtactgtgcgatggctgcgacgaggcttatcacatctactgcatggacccgccgtgcgagtctgtcccgagaggtaaatggttctgcacgcggtgtagcgcgcggaggtcagtgcaagggatgcagaggtatgagaagtcgatcctggagaaagtcaagcgtgctcctggtgccaatgggccgaaggtgcaggcatctgctggtccagaaaaataggcagcagtgtggatgatgtttcacaggccatactagggtagaagaaagggaaggatacttttgttcctctgagggagggggtatacattgctctggtagctttgaagaatcgatggatgggttgtgtatacgtggggggaaggaagatgccccgttggctgctgatgttgattcactgtgctgccatttcgtttttggaattcttgagtgtcgctcggcttgttgttgtgctgttatgttgtgtctgatggtaagtggcatcgcttatcgatgatatgtacatgcctgtaactcgttttcttttatttgttggacattgtgtgtgtgtgtgtgtgtgtttgaattgtgatgacctagagaacgctggtgtcaatcaatgcagcgtaccttgtttgcgcctaaaaaaaaaaaaaaaaaaaaaaaaaaaaaaaaaaaaaaaaaaaaaaaaaaaaaaaaaaaaaaagggcggccgc

SEQ ID NO: 258281 - DNA, 1913 bp, Zea mays
acccacgcgtccggtgctctgtcaagtttgcctagagtcaaagcaacctcaagaccctcttaccacatcatatacatgtaatggcagttcgagtctgactccaagttcgaaggaggctttgctaaagaacatatcatcagggataacagactacacaaattggtctttaatgttttgcttgatggcacagaagtagcttactatgttgatgggcagagaaaggttgacgggtatattaaggatcaaagaatctactgtaatcactgcaacaaagtggttagcccatcagcatttgaagctcatgcgggtgagggatcaaggcgcaaaccgtatgataacatattcacatcaaacggagtatcattgcatgagctggcaatgaaaatatcaaaggatatggaactgtcagaacgtgagactgatgatctgtgcagagaatgtggtcagggtggagatattttcccatgcaaaatctgtccaaggtcatttcatccagcttgtgttggactctctaaagtcccctcagaatggtactgtgataattgtcgcaatcttgtccaaaaagaaaaggctttagcagagaacaaaaatgctaaagctgctgggaggcaagctggagttgattccattgaacagataatgaagagagctatacgaattgtccccatctctgatgatcttggaggctgtgctctatgcaaacagaaagatttcaacaatgctgtgtttgatgagcgcactgtgatactctgtgaccaatgtgagaaagagtatcatgtaggatgcttgaagaatcaatggcaagtggaactaaaggaattgccagagggggagtggttctgttgcagtagttgctctgagacacgatcttcattagacaagataatctccgacggagctcaactgttggtggagccagatcttgaaatcataaagaagaaacatgtgacaagaggtttatgtatggacaccagtaaagatctcaaatggcaattactttctggtaaaaggactactgaagacggaagcatattgctctctgctgcagtgccaatttttcatcaatcttttgatccgatccgtgaagctctcactggtagagacctgattccagagatggttaacgggaggggacctaaggagggaatgcctggacaagattacagtggaatgtactgtgcactgttaactgtgggctctactgtggtgtcggcagcacttttgcgtgtgatgggaggtgatgtggccgagctgccactagttgctacaagccaggatgttcaggggctgggctactttcaagccttgttctcatgcatcgagaggatgctagtttcgctgaagatcaagcactttgtgcttccagctgcacacgaagcttgaagggatctggatgaagaaatttggattctctaggaccactccggaagagctggaagcttatcttaatggggcacacctgactatattccatggaacatcatacctgtacaaggctgttccaatgtcatgatatatgggatgaaaaagatatgggtgttgcaatagctagcaggattttgtcttgtcttttctggagtcgctattgtgacgtacataaagagttgatgaggaaacaaagcattggcaagacaatgaaaggttggtatacaggagctggaagccaaggggaagaaaagagctacaagaggtctggattagttttctttctttgtttactcttgaatcgagtgtagtggcgctggggttggcaagtggtggcacacctagcaaattttggtgtaatactagatgcaatgcaattgaagcagttccgtgagtcctggtccgatagccatattttgcaattgaattttgatgtgtttgacaccgaaaaaaaaaaaaaaaaaaaaaaaaaaaaaaagggcggccgc

SEQ ID NO: 258282 - DNA, 2196 bp, Zea mays
cccaataaaaataaagaaaagttggcacagtgcaactccaagacagcccttgctttcagagtcgacccacgcgtccgcggacgcgtgggtgacgatagaagtggaattaatatgattcacaatgttgcatataattgtggttctgatttcagtcgtttagacttcagtggtttctatgcatttatcctggaacggggtgatgaagtaatagctgcagcatctgtaaggattcatggaactgatttagcagaaatgccattcataggcacaagaggcatgtataggcaccaagggatgtgtcgtcgactactgaatggaattgaatcggccctcggttccctcagtgttcagaaactagtagtatctgctgtgactgaaatggagaatacttggacaactggttttggttttaagcctgttgcaccttccaagaaacaaagaatgaagtcgttaaatctcttgattatgaatgggaccggtctactagagaagaggttgctgccaacacaaacagttgatggacagatcactaccaagacagctaatgctgttggatctgataagatggatgctaaaatgcttggtgaagcaagtggatctgtgacacccattcatgtttctagtgaacccgatgcctctgacaatcatgaaattaatcgccatgagagtcctcatcctttaggaaactctgcaggcttgacattggaccagtctcctgctgcagacgaaaatgaagcgaaaataactacagaaaggacacccccagtatctataggtgatgctaagacagtcaaggtgaatacacttcctggagctacttgtggagttaacttgcagtgcatggttgaagcagagaacattcaacaagagaaatacaaagaaaccaatgggagattgattgctgaaaatactatttcagagcagaagtgtgaagatagatctaattccagtcgttcaaattcatgtgctactccggtgactgtggatcaatgttctcatttatctaatgagattgggaaaggtgacaactgtttatctagtgaactttctgttggagctgctcccataacaggcaaaactgaatctagtttgacatctgttcattgcgctaaccaagaggatgagaaagcttacgcagcccctgtggacactaaaatacctttagtcattatggatgaaaagcctgataagcatgagtttaaaactatggttgtagggtgtagtcaaggctcaatggaacctaaaagtttggaaaatagaactagtattgtaaatggaacctcaatggacgcctatagagataaaagtactaatgaagatcacagtgcttctgcagttgacactggagtatctgtgaagctatatgctcagcaaatggagacgattgaggaaaaaactggctcagttttaccagattcggaacactcttctagttgcaaagatgtgttggtgaccttgactgagtcaaagccacttaaaaatgacatgcttgaaacggatgatgcaattattaaggtaggaatgactggtcagagtttcaatgaagcaggaataacagctcctgcgctcaacatttcagatcctgttggtgaaaatgtggttaagcctactcaaacttgtggggagggtcaacttcgtggagaggatgtcatatacagtaataacgtcatggaagatgacctaacttctagagcatgctgatgtatgatcattgtattttctgctagaaaaggccctgatcattggtataaaggagaggtcgttgggctggcgactcgcatggatgaatttttactgtgtgcgaggcacttctgggagcgcggggaccgtccgcgggaaggcattgacacagttggctcttaagctttcctgacttttggttcttctacattgaggctgttgaccatggagcctttttttttttgagtagtagaagtatgcaaattgaaccatggaagttctatacgacccacaatccgggtcaacattttgttgtagatataccatgtctggtagttttctgttgtcctcctggtcgacccgaactccttattaagagctgatacttggtacccatggtatgcatgtgaaattctgctccatgtacagagagtagaaaagaaaatgaaagccgtgctagctgttataagcaaaaaaaaaaaaaaaaaaaaaaaaaaaaaaaaaaagggcggccgc

SEQ ID NO: 258283 - DNA, 3050 bp, Zea mays
ggggccgctgtcggccccgtgctcgccttgatggctgctgctgggcccagccctccgccgacgcctttgactccgcaaccccatgccgacgcggatgcggatcccgcacacctcgccaacatcatcattccgccggagtcgtcgcccaggcgcatcacgcgctccatgctccagcccaagtctcgccttcctaccgccgctcgttctcctgacaatgcggcaccgctcaaaccaaaactggaaccgccggaagaggaggatggcaagccggttccagcgttgaggcgcttcaccagatcactactggtcaaggacaaggacagcaacgacgacgacctctcaggcaccaccaccgccagcaatgcctcctccccttcgcccaaaaccaacaccacatgtaccagcaggagcagcaacaaggggaataagaatacaaacaagattcccaccaacctcagggagctgctcgccaccggcatgctcgaaggtcagcccgtcaagtacgtcgacccacgcgtccggcgagcggtactccggggagttatcaaacgcattggcatattgtgttcatgctcttcatgcaaaggccgaaaagttgtttcaccttactactttgaggtgcatgctgggagtaccaaaaagcatccatcagactacattttcctggaaaatggaaataatctgcatgatgtgttgagggcatgtacaaatgctacattagacatgttggagcctgcaatacgaaaggcaataggcccagcacctcaggagagaatatccagatgcaaatcatgcaaaagttcattcagtacactccgcagtgggaaatttgctttgttttgtgattcgtgtcttgagtccaagggagctaagaataatatcagttcatccaaagttgggcgaagtcaaacttcatctgccaaggtatataagagtgcatcaccaggagcaaagtcttcaagtgtaggaaggcttacaagaaaggataagggtatgcataaggtcgttttcatgagtggcattttaccagagggcactgatgttggttactatgttggtggaaagaggttactggatggatatataaaggaacttgggatctactgtcattgctgcagcacagtggttagtccttcacagtttgaaggtcatgctggtcgagctgctcgacgcaaaccttaccacaacatatatatgtcaaacggcgtttcactacatgagctgtcaatttcactcttgaaaggtcaaaagatgtcaaacagacaaagtgatgacttgtgcagcatttgttcagatggtgggcaactactcctttgtgatacctgtccaagagcttttcatagagaatgtgttggcttatcttctgccacaaagggaacttggtgttgccgatattgtgagaatagacaacagagggaaagttgtttggcatataacaacaatgcaatagctgctgggagagttgaaggagttgatgccttggaacaaatattcacgcggtcgatacgtattgctacaacacttgagactggatttggtggttgcgcactgtgcaagctccatgatttcagcaaaaagaaattcagtacccgaaccgtgctgctttgtgaccaatgtggtagagaatatcatgttggttgcctcaaggaacataatatggctgatctgacggcattgcccgagggagcctggtattgttctacggactgtgtgaggattaaccagacactgcaagatttacttaacagtggtggagaacctgttcttgccatggatttagatgtcattaagaagaaacgagaagtgaaaggttttaatgatgatgatgctgaccttgatgttagatggagagttttaaaggacaagagctcagacgacagcaaactagtgctctccaaagcagttgccattttccatgaaacttttgatcccattatccaggtttcaactggacgggacctcattccagccatggtttatgggaggagtgcaagggaccaagattacacaggaatgtattgtactgtgttaactgtgaacaatattgtagtttctgcgggtcttttccgcatcatgggtagtgaaattgctgagctgccgttggttgctacaagtagggatagacaaggcttggggtatttccaagcacttttttcctgcatagaacgtctgttgtcatctttggaggtgaaacattttgtgctaccagctgcagaggaagcggagtctatctggactgagcgttttgggttcgcaaagataagccaggatgagctgcgcgaatacctcaagggtgggcgaacaactgtgtttcaggggacgtcaaacctgcacaagctggttgcgaaacttgaatgctagttatgtgagaattgtatggcaagagcaaggacatgaagctaagaagcagctcattgtttgtgtgcctctgggattgatgcagacaggaaagaggcaccctgatccctttcttgtaaatgttggtgagcatgttggcattggcatcttgatctgtttccataggtaaggtgaagaggattgtgtaagataaaagggacaagctgtatgtaaagacaagccaaagctgagtgaatttcaggcaccttattgtgtggagggtcctgtgtttgttgagtaggcaacgctcgggctggtgtgagatgatgactgcatttgtgttgtgttggtggtattttcactgctgacatgactgttgtatcggatgacatcttttctgttttatgacagtggcagtgtgatactaggctgttaggaggggacgggggaggtcaaacccaacgtacatcatgagtggagctgctgtaatgtaacagaagtattgcacccccccccccccctctgtcctgtgtatgctttaacggagatgcacgttgtacccgtggtaatatatataaatttgcgttgtaaagatcaaaaaaaaaaaaaaaaaaaaaaaaaaaaaaaaaaaaaaaaaaaaaaaaaaaaaaaaaaaaaaaaaaaaaaaaaaaaaaaaaaaaaaaaaaaaaaaaaaaaaaaaaaagggcggccgc

SEQ ID NO: 258284 - DNA, 1583 bp, Zea mays
gaattcggctcgagtggaggacttgtctcaacaaggtttgtgcataaaatgtggtgaaggtggtcagttgttggaatgcaatggctgttttttagccgcccatagcagctgttttggttcatcggcgacatttgaaggaaccaattttttctactgcccggtatgcttgtataagaaagccactgaagcatataaaaaggcaaagaaaacatattgtgaaactaggaagaaccttgttgctttccttggcacagcacaagccaccaatcaacctgacaaacaactaaatggagctcagccaggagctgccaacagagatgaagagcctcatgatgagcaacattctaaagggtgtggcgcatcaaaaggggcccatgaaaatgaagtatacaatcttgctcatcaggatgaagagcatcatcagcagaggaagaagcagaaaataaatgctataggtaagagttatcctaaggaggtactcactgagaaggttattttccagaactctgatcctgcatccattaataaacattcagtgctccagaataacaataaaacaccagttaaggatccagagaaaaagcagcaagcggtcaacgaagaagctcgcaaagaaggtggtaatgacaactcatctcatgaaacaggagcttcatctccgagaagatgtgatcctccttcgaatcaggacgttgaggctgaccaggacgatagccttacaacttctaatcaatctggtggttctgatgaaatagagctacatcttctaatgactctgccaagcaatcatcacccccttggcgtggtatgggacacaacaaaaaaggattgcacgaaaaggagccagctgtatcaagtaaatctggaaaaggtattgggaaacaggatcaacatatgcatacttcacgaaggaaaaaaaaaatgcacacctgcaaaagcgctattccaatcctgttgcgccacctggaagacgcaaacaactctgttggacagaaaaagaagtagctattttgagggatgggatggcaaaattctctccacataataatggtaaaataccatggacccagatactgcaatatggccgtcgtgtgtttcacaagacgcgcctgccatgtgatttgagggtcaagtggaggaacatggagaggaagaagtgggcaggctactgatgctggcaatcttacacacagacacacacacacacacaactgttgtgtgtcatactgaattactaaccacaccttcatttgtttgtgtccatctgcagatctgatgccgtcgacatggaacactgatgtggtactagaacatagcggaacactgatatggtactaatagcgaatggaggagggtttcttctaaaatagtattttgatgcacagggtgggcatccttttgtgactggttgtgtcaacctagacctactatgcccgtgagagagattgctaaagagtcaactttcttttggaaaaaaaaaaaaaaaaaaaaaaaaaaaaaaaaaaaaaaaaaaaaaaaaaaaaaaaaaaaaaaaaaaaaaaaaaaaaaaaaaaaaaaaaaaaaaaaaaaaaaagggcggccgc

SEQ ID NO: 258285 - DNA, 773 bp, Zea mays
attgattatcgtaaggaggtactcactgagaaggttcctttccagaactctggtcctgcatccattaataaacattcagtgctccagaataacggtaaaacacgagttaaggatccagagaaaaagcagcaagcgggagacgaagaagctcgcaaagaagctggtaatgaaaaatctcatgaaacaggagcttcatctcagagaagatgtgatcctccttcgaatcatgacgttgaggctgaccaggaaggtagtcttacaacttctatccaatctagtggttctgatgaattagaagctaaaggattgcaagagaagaaggcagctgtatcaagtaaatctagaagaggtattgcgaagcgggatcaacatatgcctacttcacgaaggaaaaaaaatatgcacacctgcaaaagcgctattccaatcctgttgcgccacctggaagacgcaaacaactctgttggacagaaaaagaagtagctattttgaggatctgatgccgtcgacatggaacactgatgtggtactagaacatagcggaacactgatatggtactaatagcgaatggaggagggtttcttctaaaatagtattttgatgcacagggtgggcatccctttgtgactggttgtgtgaacctagacctactatgcccgtgagagagattgctaaagagtcaactttcttttggaactgaaccctgcactctagatgatgataacatccggtagctgtgtttcttaaggcaactgtgtgtgtttcatccggc

SEQ ID NO: 258286 - DNA, 714 bp, Zea mays
taaaggattgcaagagaagaaggcagctgtatcaagtaaatctagaaaaggtatttcaaagcgggatcaacatatgcctacttcaccaagaaaaagaaattctgtacacctgcaaccgcgcgtggccaatcctcttgcaccacctggaagacgcaaaaaactcttttggacagaagaagaagaagctgttttgagggagagggatggcaaaattcactccacagaataatgcgcaaattccatggattctgatactagaacatggccgtggtgtgtttcacaggacgcgcctgccatctgatttgagggtcaagtggaggagcatgcagaggaagaagtgggcaggctactgatcttacacgcccccgcgcacgtagctgttgtgtctcatgctaaattactaaccataccttcatttctctgtgtccatctgcagatctgatgccgttgacatggaacactgacgtggtacttgtacatagcgaatgtgcaagtaggaatggaggagggtttcttctaattacttttgcagcccttaatcctgtagcactgacgtggattggttgtgggattcggtgaacctaggctctcctctaatatgcacgtagatgatggtagagagattggtagattcaaacctacgcgaagaattgccaatagatgactttggctgcttcgttcgttcaaaaaaaaaaaagaagaaacaaaaaagaa

SEQ ID NO: 258287 - DNA, 1641 bp, Zea mays
gtcgacccgcccgtcgacgcgccacccacgaaacacacagaagcgaggagcactacttgttggttggattctcttcagtctagcagctagtccagttaagtttcagacacacatggggagcattggcagaggcacggccaactgcgccaccgtgccgcagccgccgccgtcgacagggaagctcatcacgatcctgagcatcgatggcggcggcatccgcggccttatcccggcgaccatcattgcgtacctcgaggccaagctccaggagctggacggcccggacgctcggatcgccgactacttcgacgtgattgccgggacgagcaccggcgccctgctcgcgtcgatgctggcggcgccggacgagaacaaccggccgctgttcgccgccaaggacctcaccacgttctacctcgagaacggcccaaagatcttcccacagaaaaaggctgggttgctgacgccgctgaggaacctgctgggcctggtgcggggccccaagtacgacggcgtgttcctgcacgacaagatcaagagcctgacgcacgacgtcagggtggcggacacggtgaccaacgtcatcgtgccggcgttcgacgtcaagtacctgcagcccatcatcttctcgacgtacgaggccaagaccgacgccctcaagaacgcgcacctctccgacatctgcatcagcacgtcggcggcgcccacctacttcccggcgcacttcttcaagaccgaggccaccgacggccggcccccccgcgagtaccacctcgtggacggcggcgtcgcggccaacaaccccaccatggtcgccatgtccatgctcaccaaggaggtgcaccgccgcaaccccaacttcaacgccggcagccccaccgagtacaccaactacctcatcatctccgtcggcaccgggtcggccaagcaggcggagaagtacaccgcggagcagtgcgcgaagtggggcctcatccagtggctctacaacggcggcttcacgcctatcatcgacatcttctcgcatgccagttccgacatggttgacatccatgcgtcgatcctctttcaggccctgcactgcgagaagaagtaccttcgcatccaggatgatactttgactgggaacgcatcgtccgtggacatcgccaccaaggagaacatggagtctctgatatcgatcggccaggagctgctcaagaagccagtggcgagagtgaacatcgacacagggctgtacgagtcctgcgacggtgagggcacaaatgcacagtcgctagctgacttcgccaagcaactctctgacgagcgcaagctacgcaagagcaatctcaactccaactaataaatacctctctcagtcacagcatgtgctctttccgcagattcaccgtttcttatttttaatttaatttcaattctgtgtgtgtgtgattgtgtgtgtgactgtgtgtgtaccaataaacatttaagttcaatcatttgcttgtctatgatcaaaagaaccaaaaccttcaaaaaaaaaaaaaaaaaaaaaaagaaaaaaaaaaaaaaaaaaaaaaaaaaaaaaaaaaaaaaaaaaaaaaaaaaaaaaaaaaaaaaaaaaaaaaaaaaaaaaaaaaaaaaaaaaagggcggccgc

SEQ ID NO: 258288 - DNA, 1509 bp, Zea mays
gtcgacccacgcgtccggaaacacacagaagcgaggagcactacttgttggttggattctcttcagtctagcagctagtccagttaagtttcagacacacatggggagcattggcagaggcacggccaactgcgccaccgtgccgcagccgccgccgtcgacagggaagctcatcacgatcctgagcatcgatggcggcggcatccgcggccttatcccggcgaccatcattgcgtacctcgaggccaagctccaggagctggacggcccggacgctcggatcgccgactacttcgacgtgattgccgggacgagcaccggcgccctgctcgcgtcgatgctggcggcgccggacgagaacaaccggccgctgttcgccgccaaggacctcaccacgttctacctcgagaacggcccaaagatcttcccacagaaaaaggctgggttgctgacgccgctgaggaacctgctgggcctggtgcggggccccaagtacgacggcgtgttcctgcacgacaagatcaagagcctgacgcacgacgtcagggtggcggacacggtgaccaacgtcatcgtgccggcgttcgacgtcaagtccctgcagcccatcatcttctcgacgtacgaggccaagaccgacaccctcaagaacgcgcacctctccgacatctgcatcagcacgtcggcggcgcccacctacttcccggcgcacttcttcaagaccgaggccaccgacggccggcccccccgcgagtaccacctcgtggacggcggcgtcgcggccaacaaccccactatggtcgccatgtccatgctcaccaaggaggtgcaccgccgcaaccccaacttcaacgccggcagccccaccgagtacaccaactacctcatcatctccgtcggcaccgggtcggccaagcaggcggagaagtacaccgcggagcagtgcgcgaagtggggcctcatccagtggctctacaacggcggcttcacgccgatcatcgacatcttctcgcatgccagttccgacatggttgacatccatgcgtcgatcctctttcaggccctgcactgcgagaagaagtaccttcgcatccaggatgatactttgactgggaacgcatcgtccgtggacatcgccaccaaggagaacatggagtctctgatatcgatcggccaggagctgctcaacaagccagtggcgagagtgaacatcgacacagggctgtacgagtcctgcgagggtgagggcacaaatgcacagtcgctagctgacttcgccaagcagctctctgacgagcgcaagctacgcaagagcaatctcaactccaactaataaatacctctcggtcacagcatgtgctctttctgcagattcaccgtttcttatttttaatttcaatttcaattcagtgtatgtgtgtgtgtgactgtgtgtgtaccaataaacatttaagttcactcaaaaaaaaaaaaaaaaaaaaaaaaaaaaaaaaaaaaaagggcggccgc

SEQ ID NO: 258289 - DNA, 1292 bp, Zea mays
attcgcccgtcgacccacgcgaccgagcggcatttcgaataacacagttgagcgcgacgatgggatccctcgctaataacatcatggtcgtgggcgccgtccttgcggcgctcgtcgccggcgggtcgtgcgggcccccgaaggtgccgcccggccccaacatcaccaccaactacaacggcaagtggctcaccgccagggccacctggtacggtcagcccaacggtgccggcgctcctgacaacggcggtgcgtgcgggatcaagaacgtgaacctgccaccctacagcggcatgacggcgtgcggcaacgtccccatcttcaaggacggcaagggctgcggctcatgctacgaggtgagatgcaaggaaaaacctgagtgctcgggcaatccagtcacggtgtacatcactgacatgaactacgagcctatcgctccctaccacttcgacttgagcggcaaggccttcggctccctggcaaagcccgggctcaacgacaagattcgccactgcggcatcatggacgtcgagttcagaagggtgcgatgcaagtaccccgccgggcagaagatcgtgttccacatcgagaagggctgcaaccccaactacctggccgtgctggtgaagtatgtggcggacgacggcgacatcgtgctgatggaaatccaggacaagttgtcggctgagtggaagcccatgaagctctcttggggcgccatctggaggatggacactgccaaggcgctcaagggccccttctccatccgcctcaccagcgagtccggcaagaaggtcatcgccaaagacgtcatcccggcgaactggagacccgatgccgtctacacttccaacgtccaattctactagactttgaattcccttcgattcatccggcacagcgggctatggaccttcagcagcaagctaattaagttggcagcatgcaccgctaaccttatatactactgagacttccaaattctagtatatgtaatccttttgttcgggttcatgatcgaattccaaagagtggaaaacaagcaaaaggttaaatatacatgccatttttggaggcatttttttcatgagggcatgtttcgatatatggaccactaaatatacatatcatttactttcctaaaaaaaaaaaaataaaaaaaaaaaaaaaaaaaagataagaaaaaaataaaaaaaacacaaacaaaacaaaaaaaaaataaacagaacacataaataaaaaaaaaaaaaagggggggccgccctaaaggttcaatcctaacgttatcttaa

SEQ ID NO: 258290 - DNA, 463 bp, Zea mays
agcccatgaagctctcttggggcgccatctggaggatggacactgccaaggcgctcaagggccccttctccatccgcctcaccagcgagtccggcaagaaggtcatcgccaaagacgtcatcccgccgaactggagacccgatgccgtctacacttccaacgtccaattctactagactttgaattcccttcgattcatccggcgcggtgggctatggacctgcagcagcaagctaattaagtttatatatattgcatgagagagcatgcaccgctaaccatatatactactgagacttctgaattctagtatatgtaatccttttgtttgggtttaggaggcaattctaatcatgtatgccgaattccaaagagtggaaaacaagcaaaatgttaaatatacatgccattttcggaggcaaaaaaaaaaaaaaaaagggcggccgctcgccggacgcgtggg

SEQ ID NO: 258291 - DNA, 811 bp, Zea mays
aatttccgggtcgacccacgcgttcgcggacgcgtgggtcaaggacggtaagggtttcggctcatgctatgaggtgagatgcatggtaaaacctgagtgctcgggcaatccagatacggtgtacatcactgacatgaacttcgagcctatcggtccctaccacttcgacttgagcggcaaggccttcggctccctggcaaagcccgggctcaacgacaagctttgccactgcggcatcatggacgtcgagttcagaagggtgcggtgcaagtaccccgtcgggcagaagatcgtgttccacatcgagaagggctgcaaccccaactacctggccgtgctggcgaagtttgtggcggacgatggcgacatcgtgctgatggaaatccaggacaagttgtcggctgagtggatgcccatgaagctctcttggggcgccatctgcaggatggacactgccaaggcgctcaagggccccttctctatccgcctcaccagcgagtccggcaagaacgtcatcgctaaagacatcatcccggcgaactggagacccgatgccgtctacacttcctacgtccaattctactagactttgaattgccttcgattcatccggcgcggcgggctatggacctgcagcagcaagctaattaagctggccgatatatatataatatataatggaagccctgggctttgattattggggaagccccaaccagaatgcggataggccaccaccccgcatgattacgttagcatttatgctggtataaccaaattatataattttcatatactatgcaatgaatct

SEQ ID NO: 258292 - DNA, 714 bp, Zea mays
ggagagacgaacaagaaaagacgacatcatatataccgtacgttatagagtaggaaaatagaaatacgaatgatgatcacgggagggcagcgaaaccctgcaaggctgcaggtgtcgtcgtccttcctgcttgcccttgttttcgcatcatcggtgctcgtcggcatcgtggccggcggcagcttctacgaggagtgcgacgcgacttgggagccccagaactgctgggcctacgacgatggcaacaggctctccctcgcgctcgtcagcagttcctcaggttccatgatccggtcgaagcggcagttcgtgtacgggaccgtgtccaccatgatccagcttgtccccggcgactccgccggcaccgtcaccacctactatacgtcgtcgctgggcgacaaccacgacgagatcgacttcgagttcctgggcaacgtgagcgggcagccctacaccatccacaccaacgtgtacgctgccggcgtgggcaacaaggagatgcagttcaagccatggttcgaccccaccgccgactaccacaactacaccatctcctggactccctgcatgatcgcgtggtacgtcgacggcgtccccatccgcgtgttccgcaactacgcggcgagccacggcgtggcgttcccgacgagccagcccatgtacgcctactctagcatctgggcggcggaggactgggccacgcagggcggccgc

SEQ ID NO: 258293 - DNA, 768 bp, Zea mays
gaattcggctccatctccgatccatctcttcggctgcctgtgctacccttcccttcacctcacacaggaatatactacacattcctgccttagatacatatatacttttttactgaaaaaaaaggctgagccggtgcgagcgaggcttgagcaatggcgagcgcgtttagctcgagggcatgcgcgctgctggcgctgctcctggggctctgcaccgccggcgcggcggcgggcagggtcgacgacgggctggaggtgacgtggggcgacggccgcgggagcgtctcgcccgatggccaggtgctgacgctgtcgctcgaccgcacctccggctccgggttccgctccaaggacacgtacctcttcgcgcgcgccgacgtgcagatcaagctcgtccccgacaactccgccggcacggtcaccaccttctacttcatctcggaggggccgtgggatgtccacgacgaggtcgacctcgagttcctgggcaacgccagcgggcagccgtacacgctgcacaccaacgtgtacgccagcggcaacggcagcagggagcaacagttccacctctggttcgaccccaccgccgacttccacacctactccatccagtggacgcagcagcacatcctcgtgctggtggacgggacgccgatccgggagttcaagaaccacgcggaccggggcgtgccgtacccgtcgtcgcagcggatgcgcctctacggctcgctgtgggacgccgaggactgggccacgcagggcggccgc

SEQ ID NO: 258294 - DNA, 1347 bp, Zea mays
gtcgacccacgcgtccgaccatctgtcgactggtagcagagagaagagatagaccgagagagggagggagagagagaacctgacactgagactgaagcatcggcgctagctagcttgggcagcaacatcacgatgtcgtccaactgcggcgaggatgagaaggagctggtgtgcgtgaccggcgccggcggcttcatcggctcgtgggtggtgaatgagctgctccagcggggttaccgcgtcaggggaaccgcgagggaccctgcggacagcaagaacgcgcacctgctggctctggagggagccaaggagcgcctcaccctgtgccgcgccgacgtcctcgaccgcgcctccctgcgcgccgccttcgccggctgccacggcgtcttccacgtcgcctccccggtgtccaacgacccggagcttgtcccggtggcggtggagggcaccaggaacgtcatcaacgccgcggcggacgagggcgcgcgccgtgtcgtcttcacctcctcctatggcgccgtgcacatggaccccagccggagccccgacgccgtcctcgacgagacctgctggagcgactacgacttctgcaagcgaaccgacaacctgtactgctgcgccaagatgatggcggaggtgacggcggcggcggaggcggacgcgcggggcctgcagctggccgtggtgctgccctgcatgaccacgggccccatgctgcagcagacgctcaacttcagcaccaaccacgtcgcgcgctacctcatgggcaccaagcgctccatccccaacgccgtcgccgcctacgtcgacgtccgcgacgtcgcgcgcgcgcacgtgctcgcctacgagcgccccggagccaggggccggtacctctgcatcggcaccgtgctgcaccgcgccgacctcgtcgacatgctcagagacctctttccgcagtaccccgtcacggccaagtgcgaggaggacggcaagccaatggcgaagccgttcaagttctccaaccagaggctcagggacctggggctggagttcactccgctgaggaagagcctgtacgagaccgtgctgtgcctgcagcagaagggccacctgcctgtcatccaaccgcagcagcgcgcgtacctgtgatgtgaaacaaccgacatatataaacatgcatgcaatgaggcaaacgacacacacgtcagtggaagaacgagaagatgacataaggaatctgagaactttttattaagtgtatattcatgttacttttcagtatctacgggtgtattacgttttacgttcttaaaacaaaagcttttgctgttgtacaattaaaaaaaaaaaaaaaagggcggccgc

SEQ ID NO: 258295 - DNA, 1530 bp, Zea mays
aaacaatctacggttgccaggtctgcgacgtcagtgccgacgaactcatggctcgcgagaggcccgtaaaaacatgatagccagatctgcgacgtcacggctgtcgacccacgcgtccgcgccattcgccaccctctccgttccattccaatccgttcagcggtcagcggaacatgatacgcctgcttgccgcgcttgcattgaggggagttcggggagcggccggtgcggaaggaatcgacacagagttcagttcacatggctgctgaatcagagaacggcaactgcaaagcttgggcagcgagagatccttctggagttctctcaccacacagttttaaccgcagagcagtgcaaagcggcgatgtttcgctgaagatcatatactgtggagtctgttatgcagacgttgcttggacgcggaataagctcaatgattcaaaatatcctttggttcctgggcatgagatagctggagttgtaactcaggttggtgcagatgtcaaaggctttaaagtgggtgaccatgtaggtgttggaacatatgtgaactcttgccgtgattgtgagaactgcaatatctctctagacaaccattgcccaaaagcagtttatactttcaatggcattgatacagatggaactgtcacaaaggggggttactccactcacattgtagtccatgaaaggtattgcttcaaaatacccgatggctaccctttggcgaaggcagcacctcttctgtgtgctggaataaccgtgtatactccaatgatgcgacacaacatgaaccaacctggaaagtcacttggggtcattggtcttggtggtctgggtcacatggctgtgaaatttggtaaagcatttggtcttaaggtcacagttttcagtacaagtgaatcaaagagagatgaagccatcaacctccttggagcagataattttgttatatcatcagacacacagcaaatggagtccctgaagaactccctgcacttcataattgacactgcttccggtgaccatccatttgatccgtatttctctctccttaaggttggtggtgtgatgacattggtaggttttccaagtgagatcaaaatgcatcctgcaagccttatacttggtgcgcggaccttgtctggcagtgttgttggaggtataaaagacatccaagaaatggttaacttctgtgcagccaacaatatctatccggagattgagatcattaagatagattatatcaacgaggctctcgcgaggcttgttaatcgagatgtgaaataccgctttgtaatcgacatcgagaactccttcaagtagcgtgctagtgcacatgctctcgtctttctgttagtgttcaacagttcaagagctattacaaatgtgagtcatgccaaataaacttgatgtaaacaaccataattgaacagcaaggggaaacaggtatattgtgataaaaaaaaaaaaaaaaaaaaaaaaaaaaaaaaaagggcggccgcaaaaaaaaaaaaaaaaaaaaaggggggg

SEQ ID NO: 258296 - DNA, 496 bp, Zea mays
ccggatttcctttgttttcccccgccccccatgatagcccgatctgcgacgtcacggctgtcgccagtgatcgccattcgccaccctctccgttccattccaatccgttcagcggtcagcggaacatgatacggtctgcgcccttccaagcaatcacatcttcttccccgttataaatcgctcactcgctatcgtcggctacctgtatcctggcgacacccaacactaccctgcttgccgcgcttgcattgaggggagttcggggagcggccggtgcggaaggaatcgacacagagttcagttcacatggctgctgaatcagagaacggcaactgcaaagcctgggcagcgagagatccttctggagttctctcaccacacagttttaaccgcagagcagtgcaaagcggcgatgtttcgctgaagatcatatactgtggagtctgttttgcagacgttgcttggacgcggaataagctcaatgattcaaaatatc

SEQ ID NO: 258297 - DNA, 1318 bp, Zea mays
gtcgacccacgcgtccgcagactccaccaccccgcttcgatcttctgttgcagctgaaatctgtcagattctgcagttcattccaaatggctgctgcagcagagcacggcaactgcgatgcttgggcggccagagacccttctggggttctctcaccatacaagtttaaccgcagggcagtgcaaagcagcgacgtttcgctgaagatcatatactgcggggtgtgttacggtgacgttatgtggatacagaacaagcacaacgactcagtttatcctctggttcctgggcatgagatagctggggttgtgactgaggttggcgcagacgtcaaggccttcaaggtgggtgaccacgcaggcgttggaacctacgtgaactcgtgccggcactgcgagaactgcaacagctctctggagaactactgcccagaaacagttttcacttacaacacaactgatgctgatgggaccatcacaaaggggggctactccactcacattgtcgtccatgaaaggtactgcttcaagatacccgatggctaccctctggcgcaggcagcgcctcttctgtgtgctggaatcaccgtctataccccaatggcgcggcacaacatgaagcagcctgggaagtcgctgggagtcattgggctcggtggcctaggccacatggcggtcaaatttggcaaggccttcggcctcaaggtcacggttttcagcacgagcgaatcgaagagggaagaagccattaacctccttggagcagataactttgttatatcgtcagacacgcagcagatggaggccctgaaaaactccctgcacttcatagttgacactgcttctggtgaccatccattcgatccgtatctctcgctccttaaggttggcggtgtgatgacaatagtgtgctttccaagtgagatcaagatgcaccctgcgagcctcaatcgtggtgggcggaccttgtctggtagtattgtcggaggtacaaaagacatccaggagatggttaacttttgcgcggagaacaaaatctatccagagatcgagatcatcaagatggattatatcaacgaggctctcgccaggcttgttaaccgagacgtgaaataccgctttgtcatcgacatcaagaactctttcgagtagcatgctcattcacatgatccctgtcttctttgtcaatgtatgagagataatgagtcgtttcgaataaagcttagacatgataaataacaagtatgcttgtgactgtaaaaaaaaaaaaaaaaaaaaaaaaaaaaaaaaaaaaaaaaaaaaaaaaaaagggcggccgc

SEQ ID NO: 258298 - DNA, 2600 bp, Zea mays
tttcacgcgtccgcccgtgcgcgcccactcctccggctcttcttctccaccggcaccagtccaccacctcccacctcctgccaccgcgcggccccaaccaaccacaccgcagcgcagcaatggcgggcaacggcgccatcgtggagagcgacccgctgaactggggcgcggcggcggcggagctggccgggagccacctggacgaggtgaagcgcatggtggcgcaggcccggcagcccgtggtcaagatcgagggttccaccctccgcgtcggccaggtggccgccgtcgcctccgccaaggacgcgtccggcgtcgccgtcgagctcgacgaggaggcccgcccccgcgtcaaggccagcagcgagtggatcctcgactgcatcgcccacggcggcgacatctacggcgtcaccaccggcttcggcggcacctcccaccgccgcaccaaggacgggcccgcgctccaggtcgagctgctcaggcatctcaacgccggaatcttcggcaccggcagcgacgggcacacgctgccgtcggaggtcacccgcgcggcgatgctggtgcgcatcaacaccctcctccagggctactccggcatccgcttcgagatcctcgaggccatcacgaagctgctcaacaccggtgtcagcccctgcctgccgctccggggcaccatcaccgcgtcgggcgacctggtcccgctctcctacatcgccggcctcatcacgggccgccccaacgcgcaggccgtcaccgtcgacgggaggaaggtggacgccgccgaggcgttcaagatcgccggcatcgagggcggcttcttcaagctcaaccccaaggagggcctcgccatcgtcaacggcacgtccgtgggctccgcgctcgcggccaccgtgatgtacgacgccaacgtcctggccgtcctgtcggaggtcctgtccgccgtcttctgcgaggtcatgaacggcaagcccgagtacacggaccacctgacccacaagctgaagcaccacccggggtccatcgaggccgcggccatcatggagcacatcctggatggcagctccttcatgaagcaggccaagaaggtgaacgagctggacccgctgctgaagcccaagcaggacaggtacgcgctccgcacgtcgccgcagtggctgggcccccagatcgaggtcatccgcgccgccaccaagtccatcgagcgcgaggtcaactccgtcaacgacaacccggtcatcgacgtccaccgcggcaaggcgctgcacggcggcaacttccagggcacccccatcggcgtgtccatggacaacgcccgcctcgccatcgccaacatcggcaagctcatgttcgcgcagttctccgagctcgtcaacgagttctacaacaacgggctcacctccaacctggccggcagccgcaaccccagcctggactacggcttcaagggcaccgagatcgccatggcctcctactgctccgagctccagtacctgggcaaccccatcaccaaccacgtgcagagcgcggagcagcacaaccaggacgtgaactccctgggcctcgtctcggccaggaagaccgccgaggcgatcgacatcctgaagctcatgtcgtccacctacatcgtggcgctgtgccaggccgtggacctgcgccacctcgaggagaacatcaaggcgtcggtgaagaacaccgtgacccaggtggccaagaaggtgctgaccatgaacccctcgggcgagctctccagcgcccgcttcagcgagaaggagctgatcagcgccatcgaccgcgaggccgtgttcacgtacgcggaggacgcggccagcggcagcctgccgctgatgcagaagctgcgcgccgtgctggtggaccacgccctcagcagcggcgacgcggagcgggagccctccgtgttctccaagatcaccaggttcgaggaggagctccgcgcggtgctgccccaggaggtggaggccgcccgcgtggcggtcgccgagggcaccgcccccgtggcgaaccggatcgcggacagccggtcgttcccgctgtaccgcttcgtgcgcgaggagctcggctgcgtgttcctgaccggcgagaggctcaagtcccccggcgaggagtgcaacaaggtgttcgtcggcatcagccagggcaagctcgtggaccccatgctcgagtgcctcaaggagtgggacggcaagccgctgcccatcaacgtcaagtaaagaacgccaaggagaagaggagggaggggaggaaatacgtggaaaaaaaaataaaacctgtacacgtgtatgtccagatcgcgtgccgtcgatcgttcttcgttgttgatttttggttgtattgatcgatccgtatgtgtgcgtgcgtgtgtggcgttgctctttcttcttttgtgtagctgccctgccaccggccgacgtgcatgccatggtggcggacagcgttttctaaggtcatatactgttgttgtgtttaagtacatcttgcgtactcaattccttctaagtaagtatcctaatactagaatgttcctctaaaaaaaaaaaaaaaaaaagggcggccgctactatattatattttatttcatt

SEQ ID NO: 258299 - DNA, 973 bp, Zea mays
cgagatcctaaagctcatgtcctcgacgttcgtggtcgccctgtgccaggccgtggacctgcgccacatcgaggagaacgtcaagagcgctgtcaagagctgcgtgatgacggtggccaagaagacgctgagcaccaaccccggcggcggcctccacagcgcgcgcttctgcgagaaggacctgctcacggcgatcgaccgcgaggcggtgttcgcgtacgccgacgacccctgcagcgccaactagccgctgatgaagaagctccgcgccgtgctggtggaccacgccctcgccagcggcgacgccgagcgcgacccctccgtcttctccaggatcaccaagttcgaggaggagctccgcgcggtgctgccccaggaggtggaggccgcccgcgtcgccgtcgccgagggcaccgcccccgtggccaaccggatcgcggacagccgctcgttcccgctgtaccgcttcgtgcgcgaggagctcggctgcgtgttcctcaccggcgagaagctcaagtcccccggcgaggagtgcaacaaggtgttcctcggcatcagccagggcaagctcgtcgaccccatgctcgagtgcctcaaggagtgggacggcaagccgctgcccatcaacatcaactaaaagacgccaggcgccgccatccatgctgccgtccgcgcatggccggaggaggaggagaggaggaggaggaaaatacatgaaaaataaaacttgtacacgtgtatgtctccagattgtgccgccgtcgttctcgtcgttgacttttcgttgtattggtcgatccatatgtgtgtgcgtgtgtggcgatgttctttcttctttgtgtagctgccctgccaccgcctgcaatgcgcatgccatggcaggtagcgttgtctaagatcctatactgttgtattttggggtgaactacatcttacgtgctcaatttcttcaactaaaaagggcggccgctct

SEQ ID NO: 258300 - DNA, 1417 bp, Zea mays
gctcttttttcggctcgcgccaagcggataagctcgccgccaccgagagcatgggacacaaggaggactacgggagccacaacccggtcatctatgttgctcgccgctaggggtcttgacggctgcaccttgcaatgcacgcccatcgcggtgaccatggcacaacacacgtctaggcatggcagccataggcaagctcatgtgtgggcagctactctggggtcgaaaccactactacaacaacaggtggacctgcaacctgtggagcgggggcaaccgcagcttgaactaccgatttaaaggatgcgagatcgccacagtgcactactggtccgagatgcagttcctggggaaccccgtcaccaaccacgtccagagcgcggagcagcacaaccaggacgtcaactccctcggcctcatctcctccaggaagacggccgaggccgtcgacgtgctgaagctcatgtcgtcgacggttctgggcgcgctgtgccaggccatcgacctgcggcacctcgaggagaacgtgaaggccgcggtgaagaactgcgtgacgcaggtggccaagaagtccctgagcctgaacgcccggggcgggctccacaacgcgcgcttctgcgagaaggacctgcagacggcgatcgaccgcgaggcggtgttcgcgtacgcggacgacccgtgcagccccaactacccgctgatgcagaagctccgcgcggtgctggtcgagcacgcgctggccaacggcgacgccgagcgcgccgcggagacgtccatcttcgccaaggtggccgagttcgagcagcaggtccgcgcggcgctgcccaaggaggtggaggccgcgcgcgcggccgtggagagcggcagccccctggtccccaacaggatcagggagtgccggtcctacccgctgtaccggttcgtgcgcgaggaggtcggcaccgagtacctgaccggcgagaggaccaggtcccccggcgaggagctcaacaaggtgctcgtggccatcaaccagcgcaagcacatcgacccgctgctcgagtgcctcaaggagtggaacggcgcgcccctgccgctctgctgagctcagctgcacgcacctgctccgcacaaagaaggaaaaaacaaaagtatagcggctcaagacagtgtttcaagatcgtttatttacaaccagactagcagaagatgctctctatatctaccgtcgccttgtattattagtagctgaagtaagttcatgtgaatgttgtcgtgttcccgcagctgcgacgccacagcgtgcgacgtgcgcgttcttgtctgtcgcagctgctgaaacttttgatggttttttaacttgtaagctgggaggatgaagtaaattattttgttctacaataaacgtgcgccagaagttcgttggcaacgaagcctg

SEQ ID NO: 258301 - DNA, 873 bp, Zea mays
cttacgcgtgggcggcggcgacctccacagcgcgcgcttcagcgagaaggccctgctcaccgccatcgaccgcgaggcggtgtacgggtacctcgacgacccctgcagcgccaactcgcccctgatgaagaagatccgggccgtgctggtggaccacgccctcgccagcggcgaggccgagaaggacgccagcgcgtccgtgttctccaagatcaacaggttcgaggaggagctgcgcgaggcgctgcccagggagatggaggccgcccgcgtggccttcgagaccggcgccgcgccgatcgccaacaggatcaaggagagccggtcgtacccgctgtaccgcttcatccgccaggacctcggcgccgtgtacctgaccggcgagaagctcaagtcccccggcgaggagtgcaacaaggtgttcctggccctcagcgagggcaagctcatcgaccccatgctcgactgcctcaaggagtgggacggcaagcccctgcccatctgctgaggagtgaggaggaggacgccaccggtgccaagaggcaagacccgcaagaggaggagatgacaccgtacgcgcgcgaggaagaaataaagaagggagtatttcggtattctcaagcaggcttcatatcgtttgcgatctgaagatcattatatgttgttcctctgtactcatcttttttgtttggagcttgtagcagtgatcgtgtaaacgtgtattctgtctgttgttcttggctttctcatctgcaatatgttttggaattaaaatatactactactactactatattgagtaaaaaaaaaaaaaaaaaaaaaaaaaaaaaaaagggcgccgctcgcgatcccacgcgtccgcggaagcgtggg

SEQ ID NO: 258302 - DNA, 555 bp, Zea mays
  unsure (1)..(555): unsure at all n locations
cgacccactcgttcgcctacgcgtcttccttcgcgtccttgttcgtcggcctcagccagggcaagcttggtgcgtgttcctgaccggcgagaggctcaagtcccccggcgaggagtgcaacaaggtgttcgtcggcatcagccagggcaagctcgtggaccccatgctcgagtgcctcaaggagtgggacggcaagccgctgcccatcaacgtcaagtaaagaacgccaaggagaagaggagggaggggaggaaatacgtggaaaaaaaaataaataaaacctgtacacgtgtatgtccagatcgcgtgccgccgatcgttcttcgttgttgatttttggttgtattgatcgacccgtatgtgtgcgtgcgtgtgtggcgttcctctttcttcttttgggaagctgccctgcccccggccgacgtgcatcccatggtggcggacagcgttttctaaggtcaaaaactgttgttgtgtttaagtaaaaaaaaaaaaaaaaaaaaaaaaaaaaacccccaaaaaaaaaaaaaaaaaaaaaaaaaaaaanaaaannaa

SEQ ID NO: 258303 - DNA, 998 bp, Zea mays
cgagatcctgaagctcatgtcctcgacgtttctgatcgccctgtgccaggccgtggacctgcgccacatcgaggagaacgtcaagagcgccgtcaagagctgcgtgctgacggtggcgaaaagaagactctgagcaccgactccaccggtggcctccacgtcgcccgcttctgcgagaaggacctgctccaggagatcgagcgcgaggcggtgttcgcgtatgccgacgacccctgcagcgctaactacccgctgatgaagaagcttcgcaacgtgctcgtggagcgcgccctcgccaacggcgctgccgagttcaacgcggagacatccgtgttcgccaaggtcgcccagttcgaggaggacctgcgcgcggcgctgcccaaggcggtggaggctgcacgggcggctgtcgagaacggcacggcagggataccgaacagaatcgccgagtgccgctcctacccgctctaccgcttcgtgcgcgaggagctcggagccgtgtacctcaccggcgagaagacgcgctctcccggcgaggagctgaacaaggtgctcgtggccatcaaccagcgcaagcacatcgacccgctgctcgagtgcctcaaggagtggaacggcgagcccctgccgctctgctgagctgcaccagcagagaaagacaatgtatccagaaggaaaacaaaagtatagcagcacaaaacagagcgtttcaaggtcgttgtgaagtgctttacgatcatactagcaggagaactctatatttaccgttgccctgtaccagtagctaaagttcatgtgaatgttgttgtgttcccgcagctgcgacgccatggcctgcgatgtgcatggtcttggctgctgcagctactgaaacttttgatggttttaacttgtaagctagcgggggataaagtaaattactttgctctacaatatcgcatgagcactgagaagttcatgtcgattacataaaagcaaccggcgcgaatgtgactgag

SEQ ID NO: 258304 - DNA, 909 bp, Zea mays
  unsure (1)..(909): unsure at all n locations
tcctcgcgtccgcccacgcgtccgcccacgcgtccggaacgagctggacccgctgctgaagcccaagcaggacaggtacgcgctccgcacgtcgccgcagtggctgggcccccagatcgaggtcatccgcgccgccaccaagtccatcgagcgcgaggtcaactccgtgaacgacaacccggtcatcgacgtccaccgcggcaaggcgctgcacggcggcaacttccagggcacccccatcggcgtgtccatggacaacgcccgcctcgccatcgccaacatcggcaagctcatgttcgcgcagttctccgagctcgtcaacgagttctacaacaacgggctcacctccaacctggccggcagccgcaaccccagcctggactacggctgcaagggccccgagatcgccatggcctcctactgctccgagctccagtacctgggcaaccccatcaccaaccacgtgcagagcgcggagcagcacaaccgggacgtcaactccctgggcctcgtctcggccaggaagaccgccgaggccatcgatatcctcaagctcatgtcgtccaccgaggacatatctggtgcacatagaagactggtgacnatggtgcacatattaaatcattaacactcattttagatctaacgtctctagttgattattcaatttacaaataacaccttccaccactacacaacaccacgttggagggtgtccttaataaaatataccaaacaactagagacattagatctaaaatgagtagtgatgatttaatatgtgcaccatgtgcaccaatgttccatgtgcaccggatatgttgtcgtcgtccacctacatcgtcgcgctgtgccaggccgtcgacctgcgccacctggaggagaacatcanagacctcgtcaagaaca

SEQ ID NO: 258305 - DNA, 1400 bp, Zea mays
gtcgacccacgcgtccgcccacgccgccccccgcgcccgtttgattccatttttattactgttactatcatccaaacccttggtatttgtagccatgagtcttgtttcagatctcatcaaccttaacctctcagactccactgacaaaatcattgctgaatacatatgggttggtggttctggaatggacatgagaagcaaagccaggactctacctggaccagtgactgacccttcgcagctaccaaagtggaactatgatggttcaagcacaggccaagctcctggtgaagacagtgaagtcatcttataccctcaagccatattcaaggatcctttccgtagaggaaacaacattcttgtcatgtgcgatgcgtacactcccgcgggtgaaccaatcccgactaacaaaagacacgctgcggctaaggtctttagcaaccctgatgttgcagctgaagtgccatggtatggtattgagcaagaatacactttactccagaaagatgtgaagtggcctgttggttggcctattggtggttatcccggccctcagggaccgtactattgcggtattggagcagacaaatcttttggcagagatgttgttgattctcactacaaggcctgcttatacgctgggatcaacattagtggcatcaatggagaagtcatgccgggtcagtgggagttccaggtcggtccagctgttggtatctcggctgctgatgaaatttgggtcgctcgttacattttggagaggatcacagagattgctggtgtagtggtatcttttgacccgaaaccgattcccggtgactggaacggtgctggtgctcactgcaactacagtaccaagtcaatgagggaagaaggcggttacgagatcatcaagaaagcaatcgataaattgggactgagacacaaagaacacattgctgcttacggtgaaggcaatgagcgtcgtctcacaggacaccacgagactgctgacatcaacactttcctttggggtgttgcgaaccgtggagcatcgatccgagtaggacgtgatacggagaaagaagggaaaggatactttgaggacaggaggccagcttcgaacatggatccttacattgtcacttccatgattgcagagactacaatcctctggaatccttgatgatcatcagatcaagaaaaaatcttgaatgtcactcaaatttgtgtttcttgcaagattcaaagtttgtgttctctatcaagcaatgtcttaggataagtcaaagatttgctctgcttattctgctttttatttacttcacatcctattgaaaacatttctgtgtattatttatgaataaacattatcttaaaagggctgaaaaagggcggccgcaaaaaaaaagggcggccgc

SEQ ID NO: 258306 - DNA, 1750 bp, Zea mays
agcccacgcgtccgcccacgcgtccgcccacgcgtccgcccacgcgtccggaagaagacgagtgtcaagtgaacctgaaacttgcggtgtcactggctggtatagcctgagtgtgagtgagtgatcgagctagctgagctccgatcctcgctagctagctaggataccgccataccacaagtcttcttcacaagtttaggagtgacagcaacaagagatcgatggcctctgccaccgtgctcaagtcctccttccttcccaagaagtccgaatggggcgccaccaggcaggccgccgcgcccaggccgcccaccgtctccatggtcgtccgcgcctccgcctacgccgatgagctcgtgaagaccgcgaaaacgatcgcgtcgccggggcggggcatcctggcgatggacgagtcgaacgcgacgtgcgggaagcggctggcgtccatcgggctggagaacacggaggccaaccggcaggcgtaccgcacgctgctggtcacggcgccgggcctgggccagtacatctccggcgccatcctcttcgaggagacgctgtaccagtccgccgtcgacggccgcaagatcgtggacatcctggtggagcagggcatcgtgccggggatcaaggtggacaagggccttgtcccgctcgccggctccaacaacgagtcgtggtgccagggcctggacggcctggcgtcccgcgaggccgcctactaccagcagggcgcgcggttcgccaagtggcgcaccgtcgtcagcatccctaacggcccctccgagctcgccgtcaaggaggccgcgtgggggctcgcacgctacgccgccatctcacaggacaacgggcttgtgccgatcgtggagccggagatcctgctggacggcgagcacggcatcgagcgcacgttcgaggtggcgcagaaggtgtgggccgaaaccttctacgccatggcggagaacaacgtcatgttcgagggcatcctgctgaagccgtccatggtgacgcccggcgcggaggccaaggacagggccaccccggagcaggtggccgcgtacaccctcaagctcctccaccgccggatccccccctccgtgcccgggatcatgttcctctccggcgggcagtcggaggtggaggcgacgcagaacctcaacgccatgaaccaggggcccaacccgtggcacgtgtccttctcctacgcgcgggcgctgcagaacacctgcctcaagacctggggcggccagccggacaaggtcaaggcggcgcaggacgcgctgctgctgcgcgccaaggccaactccctggcgcagctcggcaagtacacctccgacggcgaggccgccgaggccaaggagggaatgttcgtcaagaactacagctactaattaatcgcccggccatcacccgggataccgccgcccctccgagagatacgtgtgtactgatcatggttaagcacgtactccgatccattcccatcccatgaagccatgataatgatgatatgatccatggaccatgcatggtgctctggtcgatgccgtacgtgtgtccctgatacaatactattttagtactgatgctagtcatcatatatatcgatcgagctcgccactgcgaagtctgagataatgcatgtatgcttgacggcgagatctgaggaaaaataatttctatatatgcatgtttcgagatggctctcccttaattaaaaaaaaagggcggccgccaaaaaagggcggccgcc

SEQ ID NO: 258307 - DNA, 1057 bp, Zea mays
cccacgcgtccgcccacgcgtccgcccacgcgtccgcccacgcgatcacagctagctagcgttcctaatcacgacgaataatctcttcttcacctcactaacaccagctagcaactctttctctcctgcaataatggccgctcgctcctcctcctcccagccgcagctggtcgcggcggcggcggtcctggcagcggcgctgctgctgctggcggcgggggccgggacggcgtcggcggcggtgagctgcggcgaggtgacgtcgtcggtggcgccgtgcctcgggtacgcgatgggcagcgcggcgtcgccctccgcggcgtgctgcagcggggtgcgctcgctcaacagccgcgcgtcgtcggcggcggaccggcaggccacctgcaactgcctcaagagcatgacgggccggctcggcggcggcgtcagcatggccaacgccgccaacatccccggcaagtgcggcgtctccgtcggcgtgcccatcagccccaccgtcgactgcaccaagatcaactgatcgatggaaccatagtggaggtagctcgctcgttggatggcagcgtacgtggccatcagcagcatgcagtcgtcgtcgtagcagagatgtcctagctacgtgtgtgtcatgcatcagactggcacataataaagaagtagatcatgcacccactagtgatcacttcgtctagtgtccctccgttcaatgtcgtcgtcgtcgtcgtgtaccttacgtgacatgctgtagcacgtacgctagcagagcagcacctcaatgtccttgggtttgctttgctggctctctgttttcgtcttgtgttgcttttaatctggcacaggtttctaaattataataatgaatacttttttgtccacaaaaaagtattcattattataatttagaaacctgtgccagattaaaagcacaaagcgaagctatagctcagcaaagcaaacccaaggacattgaggtgctgctctgctagcgtagtacgtgctacagcatgtcactcacgtcttccttcaatgagaggcctatcatcttttcactgtc

SEQ ID NO: 258308 - DNA, 1994 bp, Zea mays
cggacgctgggctagttctagatcgcgagcggccgcccttttttttttttttttttttttggtgctcaaatctaaattgcattttatttctgcaattgatctcatgacagggacgcccacagcgcgccaaatgttccagtatcatatatgcagacaggtacagtgtctaccagccacaaaggtggtcagcagcagggccaacaaatgaaacaataaactacaacattgcaggatcatctgcgtcgacatattttattactgcagaattgatcccagcagcactatcggtagttacggtagacaggagtgtacatgcagctctgtgcatatttcaccaggtcccttgggggaggcagacgggtcgccaaaccgagttcataagcttttgcagccacggctgcggcaatgcgcgcagagatctttctaatgttggtgaagggcgggaagattgatcccttgtcgaagttctcctgtgtggcctgagcagctagtgcttccgaggcggcaagaagcatgtcctcgtggacacggatggctccagagataacaagaccgaggccaaatccagggaaaatgtaggcgttgttcgactgtccaggtacaaaaaccttcccatcgtactccacagggtcaaatggactgccactggcaaatattacacgaccctgagtccagttatatgcttcttcagcagtacattcagaatgagaggttggatttgacagtgaaaagatgataggcctctcattgaaggaagccatggcctcaacaacttcttttgtgaatgttcttccaactccagacgtcccaatcagaactgtaggtttgatggactgaacagcatcgtacaaggttgtcaagggctcatgctcatgtgcccaaggtttctttgaatgactgaagggagtctttacgagagtcaacaatcaaaccctttgagtccaccagccaaaccttcttgcggcactcttcaattggagcattcgtctgtttcgaaatctcaagagcaataagttctgcaataccagttccagcctccccagcaccaaggaataaataagtgtgctctgccaaggtcccaccaaccaccttgagtgctgctaacaaacctgcaaggaccactgatgctgtgccctggatgtcatcattgaaaacaagatggctcttgctatattttgcaagcaaattaaaagcattatgattcgcgaagtcctcaaactgaatgaggactttctcgccatagatttgcttaacagcagccatgaactcttccataagctcatgatactcctcgccagttgcacgtttttgccggagtccaatgtaaaactcatcattaagcagtttctcattatttgtgccaacatcgattgtgataggcaaacaagctgatggacgaactcctccaagagcagtgtatagagcaagtttgcctacaggaattcccattccctgagaacccaaatctccaagtcccaagattcgctcaccatcagtaacacagataacttgaatgttcctatgtggccagttccttagaacttctaggaccttccccttgtccctcaagctgacatacagaccctgtggttgtcgaaagatggacccatacttctggcaggcctcacctacagttggtgtataaaccacaggaagcagctcctccacgttatcaattaaaagcttgtagaaaagcctctcgttcctctcctgaaggtccatcatggccatatagcgctgcaaagggacctggtactgccgcaggttgtgcatgatcttcttaatttggagttcttgaggaacaactgcaggaggaagcagcccacgcaagtggtgtgcatccctctccttctccgtgaaagcaagacccttgttgtgatgtggatccctcaagagggtgtaaccgcttgcgacggagaaggcccagggcatgatgggcagctcctcggtgcgcgctgtcctcgccgtagtggtcctcgacgacgacgccgtcc

SEQ ID NO: 258309 - DNA, 1175 bp, Zea mays
gttctagatcgcgagcggccgccctttttttttttttttttttatcgagcgaaagaataacaaacattggtacccaagattgtttgctttcacaacgttacaacatatatatatcatatatgcatggacaggtacaatgcctctccagcagcaccagcaacaagggtggttagcagcagggactataaacaacagagtaccatccgcgttgatagattttttattactgcaaaattgatccccgcagcactaccggtagttgcggtagacgggagtgtacatgcagttctctgcatatttcaccaggtcgctggggggaggcagacgggtcgccagaccgagctcgtaggcttttgcagccacggctgcagcgatgtgcgcagagatctttctgatgctggtgaagggtgggaagatggagcccttctcgaagttgtcctgtgtggcctgatcagctagcgctttcgaggcggcgagaagcatgtcctcgtggacacggacggctccagagatcacaagaccgaggccgagtccagggaaaatgtaggcattgttcgactgcccaggcacaaaagtctttccttcgtactccacgggggcaaatggactgccactggcaaagattgaacggccctgactccaggtatatgcttgttcagcagtgcattcagaatgcgaggttgggtttgacagtgaaaagatgataggcctctcgttgaaggaagacatggcctcaatgatttcttttgtgaatgttcttccaactccagatgtcccgatcagaactgtaggtttgatggactgaacagcatcatacaaggttttcaagggctcgtgctcatgcgcccaaggtttcttgaatggctgaagggagcctttacgagagtcaacaatcaaaccctttgagtccaccagccaaaccttcttgcggcactcttcaattggagccgacgtctgttttgaaatctcaagagcaatgagttctgcaataccagttccagcctgaaatcaaatacattatcagaatcttatctatgggtctactttcctcaaccaaaaaggattcttactaatggtcacaatctcaattcataagatactagttatagtaggcttcgaaagttggtgacaaaggaaataacagttcaccaggacatgttttaactaacctcccc

SEQ ID NO: 258310 - DNA, 664 bp, Zea mays
actcggtccggaattcccgggtcgactccacgcgtatcgcggacgcgtgggcagctcgcttcctcctcctcccagcgcgcagcgtggtcgtcggctggcggcggtgcctggcagacggcgctggtgctgctggctggcggtggctcgggacgggcgtctgcgagcggtgagactgcgtgcgaggtgacgtccgtcggtgtgcgccgtgcactcgggtacgccgatgggctagcgcggcgtcgccactccgcggcagtgctgcagcggggttgcgctcgctcaacagaccgcgccgtcgtcggcgtgcggactcggcatggccactctgcaagctgcctcaagagcactgtacgggcccggctcggcgggcggcgtcagtcatggcccaacgccgacaacatccccggcaagtgcggcgtctccgtcggcgtgcccatcagccccaccgtcgactgcaccaagatcaactgatcgatggaaccatagtggaggtagctcgctcgttggatggcagcgtacgtggccatcagcagcatgcagtcgatgttgtagcacaaatgtcttgttacttttgtttattgtttatttttttcttctttaaatttgttttactttatattttctttcttatttttctagtcttttcttttttttttcttcctta

SEQ ID NO: 258311 - DNA, 1159 bp, Zea mays
ccatgcgtccggtcaaagagagaaccagcacacagcagagtagcacctgatcgatcgatctcctactactagctcgttcgctttcacaaccagggagcagcaatggcatctgctgctactactctcctcaagtcgtcattcctccccaagaaggctgaatggggatccaagcaccagctggttgccgctcatcccaggccggcgaccgtcgtcgtctccatggttgcccgcgctagcgcctacgctgacgagcttgtccagaccgcgaaaaccatcgtcttaattatatttctgcagaaaaccatcgcgtcgccgggaaggggcatcctcgccatggacgagtcgaacgcgacctgcgggaagaggctcgactccatcggcctcgagaacaccgaggccaaccgccaggcctacaggacccttctcgtcagcgctccaggcctgggacagtacatctctggtgccatcctcttcgaggagaccctctaccaaccgaccgtcgacggcaagaagatcgtcgacgtgcttagtgagcagggaatcgtgcctggtatcaaggtcgacaagggtcttgtgccactcgctggctccaacaacgagtcatggtgccaaggtctcgatggccttgcttcacgtgaggcagcctactaccaggccggtgcccgcttcgccaaatggcgcactgttgtcagcatccccaacggtccatctcaactagccgtgaaggaagctgcctggggcctcgcccgctacgccgccatctcacaggaaaatggtctggtgccgatcgtggagcccgagatccttctggatggcgagcacggcatcgagaggaccttcgaggtggcgcagaaggtgtgggcggagaccttcttctacatggccgagaacagcgtgatgttcgagggcatcctgctgaagcccagcatggtgacccctggtgccgagtgcgaggagaaggccaccccggagcaagtagccgagtacaccctcaggctcctgcgcacaaggatccctcccgccgtgccgggcatcatgttcctgtccggcgggcagtctgaggtggaggcgacccagaacctgaacgccatgaaccagagccctaacccgtggcacgtctccttctcctacgccagggcgctgcagaacacctgcctca

SEQ ID NO: 258312 - DNA, 788 bp, Zea mays
cggcccggaattcccgggtcgaccgacgcgtccggaataatctcttcttcacctcactaacaccagctagcaactctttctctcctgcaataatgtccgctcgctcctcctcctggcagccgcagctggtcgcggcggcggcggtcctggcagcggcgctgctgctgctggcggcgggggccgggacggcgtcggcggcggtgagctgcggcgaggtgacgtcgtcggtggcgccgtgcctcgggtacgcgatgggcagcgcggcgtcgccctccgcggcgtgctgcagcggggtgcgctcgctcaacagccgcgcgtcgtcggcggcggaccggcaggccacctgcaactgcctcaagagcatgacgggccggctcggcggcggcgtcagcatggccaacgccgccaacatccccggcaagtgcggcgtctccgtcggcgtgcccatcagccccaccgttgactgcaccaagatcaactgatcgatggaccgtagtggaggtagctatgcctctgcatgctcgttggatggcagcgtggccatcagcagcatgcggtcgtcgtcgtcgtcctagcagatgtcctagctacgtgtgtgtcctcagactggcactgtggcacataataaagaagtagatcatgcacccactagtcatcacttcgtctagtccctccgttcgctgtcgtcgtcgtcgtcgtcatcgtcgtcgtcgtgtacctcgtacgtgacatgccgtagcacgtacgctagcagagcagcacctcaatgtccttgggtttgctttgct

SEQ ID NO: 258313 - DNA, 1091 bp, Zea mays
cggacgcgtgggcggacgcgtgggcgcggccgcgcctttttttttttttttttttgcctttgggcatctttctcctcatcaatatataagacagatctcctgtctgattgtttcaaaaaagtttaatctaaaaacttaagttgatgaaaaaagtgggcaatttccctgtactgtgtactccagcatctacgagcccggattctagtaattcagataagggcgcgggcggtggcggtggcgctggcggcgagcctggacgagccgtagagggtctcctcgaaccggatgatctcgttcttggacccgtaggccacctgggtccgctcgtcgagctcgttgatcaccctgtccagcaccgactgcttgccgtcgctgctgtacccgccggccttctccatcaagaagcccaggggcgccacctcgaagaggagccgcagcttggccttggccgtcggggacgtcacgttggtgaagatgcccttctccttcactatgatctggttgacatcgggaaccattcctccagtgtagcgcaatgtgtacttctccttgacgtagtagttgatgagcttgtcgtactcagggttatcgaatgtcgccctcagattaccaggagagaacatcttcccttccccaatggtcgtggtgtccttcacatgctgccatttaccttcgtcgaggaggaggaactcgtgcgtcccagggcagtccttgagggcgacaatgtaggtcgtgcgagggccgtagatgcccatcgcggcagcgacctggtcgccgccggtcactccggtcagcttgtcgccgggccagactccgaagatggttcccacggtgaagttggtgtcgacaatgctggagccgtcgagggggtcgaacgcaacgctgaaaccaccttcgactgggccacccatgtcctggagctcggggacttcctcggagcacgcatacttacacacatgtgagtactccaaagcctcaaagaggagcttgttagcgagcatgtcgacggccagctgctcgtcgccgaaggaattgacacaggccgtgccgccgcaggacgccgtccggaccttgaacctcgagccgaattc

SEQ ID NO: 258314 - DNA, 606 bp, Zea mays
gaattcggctcgagtgcagatccccaaggcgggcaagatctacgccttcaacgagggcaactacgcgctctgggacgacaagctgaagctgtacatggacagcctcaaggagcccggcgactcggggaagccctactccgcgcggtacataggcagcctcgtcggcgacttccaccgcactcttctctacggagggatctacgggtaccccagggacaagaagagcaagaacggcaagctgcggcttctctacgagtgcgcccccatgagcttcatcgtcgagcaggccggtggcaagggctctgacggccaccagagaattcttgacatcacacctacagagatccaccaaagagtgcctctgtacattgggagcgtggaggaagtggacaaggtggagaaattcctggcttgaatgccagagctctctcatcagatggactcccgaagacatcaagtttagggagggaatatgcatgtactctctctttcccaccccaaataagtcttcttcatctcatatttcgataaatcaaacaatctcaattttgatctaatatatatacacacacaacattagtaaaaaaaaaaaaaaagggcggccgc

SEQ ID NO: 258315 - DNA, 203 bp, Zea mays
ggccacggacagctgctcgtggtaggccttctcagcagaaatgactggagcgtaggacgaaagcatgaagtggatcctcgggtagggcaccaggttggtctggaactcgttcacatcaacgttcagagcaccatcgaacctcagggaagccgtcagggtgggagacaagcctgttgaggttggtgtaggttgggcgctcaatg

SEQ ID NO: 258316 - DNA, 234 bp, Zea mays
ccgaaagtaataatacttcatgaccaggcaaacattgccatcatagattacttgttcacgcgacaactgcaaggatgtcaacaagacgagatattttaagcttccacgaggtaaccaacaagcaagcacagcaccagccagatagatcatttcttcttggcagcaaatcgaccaagaggaggatactgagaaaaggtctccaccaccatgggcttagtgggaaccatcttcacc

SEQ ID NO: 258317 - DNA, 333 bp, Zea mays
gcggcctggctttattatattattatctttatgagatcgccgggagagcaagaaaacaataactccaaacttaataacgcaataccaaagcggggggatagagtcttacaacgtaagttgtaaaccacacaacgacagatagataagaaccgccagaaacataacacgataggagccacttagggcagatcacaggatagcagtggcacacaagcccgacgactccttgccagtagagcgtttagtactctgccttctcgagcgcagccagatccttacgaacctcagaaaaattgtcctttttcatacccttaccgacagaccaattcacaa

SEQ ID NO: 258318 - DNA, 557 bp, Zea mays
atcatgttgtcaccttcgaaaccagagatggaacaaaagtggatcttgtcagggttgtatccacccttcctcaggtagaaagagacttccttcacaatctcatcataacgggccttggagtacttgggtgtggtggcatccatcttgttgcaacagcaaatcatctgcttcactccaagcgtgaaagcaaggagagcatgctcgcgggtctgtccatccttggagataccagcctcaaaaccaccagtagtggagtcaatgataagaacagcgcagtcagcttgggaagtgccagtaatcatattcttgatgaagtcacggtgtccaggggcatcaatgacagtgcagtagtacttggtggtctcgaacttccacaaagcaatatcaattgtgatacctctctcacgctcggccttgagcttgtcaagcacccaggcatacttgaatgaccgcttgttcatctccgcggcctctttctcgaacctctcaatcacacggctagccgtgatctgaggattcagtgacggcgcgtccggacgcgtgggcggacgcgtgga

SEQ ID NO: 258319 - DNA, 478 bp, Zea mays
  unsure (1)..(478): unsure at all n locations
tcagcaggggtaggagatgcaagtgttgatcgtaaaagtaagacatcggtcacgaggtggtcgtttccatgtgaacagatgccgtggtggacagtgaactcctgnagatggccaggccatgaggtgggggctcaggcagaggcagtaaaggtagaaccagtccatcagccaggaagagcacatatgctccatgatattcctgtcttcagatccactcgttccgcccttccatacttcccgaaaaggcgctcgacctcagagatgcgaacatcatagtcaaggttcccgcaaaaaactggcctcattttacaggtcaaagttatattccctggctgatggctggtgctcgtcgccggcgaagacctggcaaagggaccgaaacgacctgggcacctgagggtagggcggcggcggcggcggcggtggctcagttgtcggcgagggcacgcgggtgggtgaagccaggcggacgaatggg

SEQ ID NO: 258320 - DNA, 265 bp, Zea mays
cagggtggatgccgtgctcgagccactctagttcttagcgcgcgttaccgagatggatgcgggcctgaccgatgtgtacgtagatgcactccctcatcttcctcctctcctctcaaacatccgcgcgcgacgccttcggtagagaccgagactggcgtgaaggtcgatcggtgggcggaatggggaattgaagatctgtaaagctcaggcgagagtttgttccgacgtctcccaacacgcccgaacgcgtgggcggacgcatgaa

SEQ ID NO: 258321 - DNA, 276 bp, Zea mays
ccacccgccgcctcgattttacggatgacaaaagatgaacaggggggtaaatgtaaagcatctccgagatgaagcaccaccgtaaacagccataattattctcactaacccggtagcaaggcaggggaataaacaacttttacaacatggggggttgaaaaccacacattcctttagaacagccccccataacccgttggcgggggcacctttgggcaaaccacgggataggggcagcccactggcctgatgctgggtaataagaaaactttttta

SEQ ID NO: 258322 - DNA, 368 bp, Zea mays
gggaaccaagagggcttaaagggacagacttaaattacaaatgcaaatactagagcagttcaacaagggatgatggaaggaaacacccaaacattacccaggggggccaggacacaaacaaaggtttttaaacaccaaaacctggcttgacagccaaacagattcatgcaagcagatcagtattcctcctcctggtaaccgtcatcactgccgccctttggggggacctccttgtagtccttttccaggggggccaggtcctagcgggcctgggagaactcccccttctccatgccctagccgacgtaccagggcacgaacgcccgcttggcgtacatgagggcgaacttgctgttgatgcgggagaa

SEQ ID NO: 258323 - DNA, 409 bp, Zea mays
aataaaacgtcaacataagccgattttcctgaaactcctctggcttcgcatcggatgaacaacttggtctgtttgtcgcttccagctgtccagcaccaagcatggctgaaggaagatcgacaatctctgtcttcagatccactcgttccacccttccatacttcccgagaaggcgcacgacctcagagatgcgaacatcatagtcaaggttcccgcaaaaaactggcctcattttacaggtcaaagttatattccctggctgatggctggtgctcgtcgccggcgaagacctggcaaagggaccgaagcgacctgggcacctgagggtaggtcggcggcggcggcgacaatggctcagttgtcggcaagggcccccgggtgggtgtagccaggtggcgcggaggcgtat

SEQ ID NO: 258324 - DNA, 453 bp, Zea mays
tgcgggcggcctgtctttttttttttttttttttttttttatattttttttttttaccacttcctaaaatcaaattaagaagggcaaaatggtaacataggggggttacagcattcttattttgcacaacgtgaaattacaagaagggcccaaataaatagataaaagtgcacaggctaacagagcttaacagttcacacaataacagcaacgaccacaaacaaaacttgtaatgatgaaaactaggtattgctaaagcaggcccatgatcgcattattttttcttggcagtagccttggtcaccttggcgccggttggttccttttttttcacacttttgataacttcaacaacaaccgtttttcttattgtacggacagcaaacctacctaggggaggattccctttgaatgtcttcaccaccatggtcttggtgggatttatttttacca

SEQ ID NO: 258325 - DNA, 287 bp, Zea mays
tactacagcagctatacacctaaaaaaattcgatctgacacttgatccagtcgaaacaagatagcaagcaagaccgcgcagtagctatcattaatcgcaaacagactaaccgaggacagactacagggacaaggcgacagagtacaaccttgatccagtctctatcgcatcaagcagctaataaaagagttcgagcgagggagaacgaaaacacgagaagaaatgctaccttacaacagaggccaaagccttgtggaggcgcagaacagcagcccggagcagacgat

SEQ ID NO: 258326 - DNA, 257 bp, Zea mays
  unsure (1)..(257): unsure at all n locations
ctggatgccgtgctcggccataacattcccancaccttnncnnanttnnaccccgtccttccccatgtcgacggagatgcactccctcatcttcctcctctcctctccaacaaccgcgcncgacncctcggaagcgtccgagantnncntgcccgtcccctgttgtgtggaatggggaattgaagatctgtcgggctcgggcgagagtttccgccggcgtttgtgaagacgccgagctgaagcgatctagaactagt

SEQ ID NO: 258327 - DNA, 388 bp, Zea mays
gatgcaagcagctgctcttgcaagtaggcggcagggttcaccatggctaggtggctcagtgctggtaggaactgtggttgctgttgcgttgtgatggcttgtattgttagatgtggcaaggattgttgttgcaattgggcaattggttgttgtaagacgctcgcggcaagcgctggttgtgccaggtggcctggccaggttggtggttcaagccccattcaggtactggggggcttccttggcaatctcatcataacgggcctttgaatacttgggtgtagtagcatccatcttgttgcagcagcaaatcatctgcttcacaccaagtgtgaaagcaaggagagcatgctcacgggtctggccatccttggagatacccacgcgtccg

SEQ ID NO: 258328 - DNA, 438 bp, Zea mays
tcctccctgccactgatgagctgctcagggtgtaacacctgacggtacgtgtcagtgcgaacctcgtcgatctcagtgggttctagttcaacaaacagtgcacgaggagcgagcttcccagcaccagtcgggctgaataaggtgctgaaggcatcatcgtgatgtcccacggtcttatctccaggcacatggccatcaggctggataccgtgctcaaggcagtaaagttcacagcaagcgttgccgacatggatgccggcttgccagatgtggaaggagatgcactccctcatcttcctcctctcctctcaaacaaccgcgcgcgacgccttcggaagagaccgagactggcgtgaaggtcgatcggtggacggtatggggaattagagatctgtcgggctcgggcaagagtttgcgccggcgtttgtgaagacgaaa

SEQ ID NO: 258329 - DNA, 428 bp, Zea mays
taagtctcctcttttcctcttcctctcccggtgccatttatggggttggcctagttgtgcccgttgagcactagcagcctccttgaaacctccagatctgtgcctccaaggcccccgttcctcggcaacaagccgtccagatggacaccgccgcgcccctgcaactgaaagcctgcgccggcgacgccgcggagaagctgctgctcgccgtcgcagccgagggtcctatctgtggtgtgccagacttcaagatgacgggatcgaagtgcgacatatgtattgtctattgtgagagcccactcgtgtcaacactgcaaacaattgtgctctggtcatgtcaccttgtatgttcttggtcactttgcaaacaattgcaagtacctcatatcgttttgtgctcgtgctattccgcctattcgcgctaaaaa

SEQ ID NO: 258330 - DNA, 270 bp, Zea mays
acagtacacaataacagtaacaaccgcatacaaaacttcgggatggagtgacaagtcaggtattgcaaaagcagatacaggattaacgacaggttgcatcatttctttttggcagctgccttggtaaccttggcgccggtcgggtccttcttctccacactcttgatgactccaacagcaactgtctgcctcatgtcgcggacagcaaacctaccaaggggtggagacattctccacactcttgatgactccaacagcaactgtctgcca

SEQ ID NO: 258331 - DNA, 400 bp, Zea mays
cccccggggggttttttttaaattgggggggttttattgcaaaaggggaaataccaagagggccccaaataaatagataaaagggcccatgctaacaaatctcaacaggtcacacgataacagcaacgatcacaaacaaaacttgggatgatgaaaactagggattgctaaagccggcccaggaacgcattatttttttttgggagcccccttggacaccttggccccggaggggacctttttttccacacttttgataactccaacagcaaccgtctgccttatgtcacggacagcaaacctaccaagggggggataccctgagaacgtctccaccaccatgggcttggtcggtattattttcaccataccagcatcaccgttcttcaggaactttggc

SEQ ID NO: 258332 - DNA, 432 bp, Zea mays
gaaaaatgtaggcactttagtatatgggttgaccaatttttgggttttgagtttttggtgtgctgtttgccaggtatacaggcataggagaatgttttgttagtgaaagcaatagatttatcttcctgtgttaataagaagctgtccagtgtcattgtatcctcttaggttgtaatacaccaaaatatacccttctcttttgcttaaaatctgagcggagggagtcccgttcttgctattttctagtattagtaggctgttttttttttgtgtcgctaacttcttttctaatattttctgcagtgatgatcccattgtatcattatcagcacaagcacccacacaattccgttttcctgggtctgttcacgttgtgcttgagcttcagcatcggcgtggcttgtgctaacacccaagggaaaatcgttctgg

SEQ ID NO: 258333 - DNA, 418 bp, Zea mays
agaaacagcacatttgctaaagaagcacacaacaccaacaagggtggtaacaaaactaggaaccatatatggctcaccagatgttcggataagtcttaaataacactttggttttaacgaaaataaccattttaaatcgaccaggcaaacgttgggagcatagttcaaacaatgacgtgaacaagacgagatattttatgtttccactagggttcccttaagcaaacacagaaccagccagacacattattttttttttgggggagccttgggcaccttggctccagtgtggatcctttttttccacacttttggtgacttcgacagccaccgtttgcctcatggcacggacaggaaagcgaccaagagggggattttcagaaaagggcttcactaccatgggcttagggggaaccat

SEQ ID NO: 258334 - DNA, 306 bp, Zea mays
tgcggccgcccttttttttttttttttttttttttttttttttttggttttttttttttttttttaaaccatgtatgccttacattcgatgttccataaaaaaaattaaggtttaatagcttcacggtttcaacgaatggaattattctttatgaccaggcaaacattgccattatagattacttgttcacgcgacaactgcaagggtgtcaacatgacgagattttttaagctttcacgaggttaccaacaagcaatctcagtaccagccacatagtttttttttttttggtagatgcctttgtt

SEQ ID NO: 258335 - DNA, 448 bp, Zea mays
cggtcgtttgggcggacgcgtgggctaggagcaagaactggccctgatgacacagttattttggtttttctgttcacttctcctaatatttaaccctttgagtaagtgtgcagattaggtcttaaaaagggattgcgattaagattttattgccagagcctgagctgtagagttttccatttacacacgtggctgtacagggggtaaacttgcaggaatgaatattacttggtgatcctataagatacacatgctgtgaaccctgatttgttttagctgcttttgttcgtttttgtctacttagccttgcacactgaggacctttattgaggttgccggtctgcgagttgaatcatggcggagcacttggcttcgatcttcggcactgagaaggacagggtcaactgccctttttacttcaagattggggcctgtcgtcatggggatc

SEQ ID NO: 258336 - DNA, 1847 bp, Zea mays
atcgtcgaccactacacgtacgttattttgggagatggctgccaaatggagggtattgctaatgaagcttgcgaattcggctcgagctggggtcttggcaagctgattgctttctacgatgacaaccacatttccatcgacggagacacggagattgcattcacagaggacgtgagcacccgcttcgaggctcttgggtggcacacgatctgggttaagaatgggaacaccggatatgatgacatccgcgcagccattaaggaggcgaaggcagttactgacaagcccaccttgatcaaggtgactaccacgatcggttttggatctcccaacaaggccaactcatacagtgttcatggaagtgcactgggtgccaaagaggttgaagcaaccaggcagaaccttggatggccctatgacacattctttgtaccagaggacgtcaagagtcactggagccgccacacacccgaaggtgctgcacttgaggctgattggaacgctatgtttgcagagtacgagaagaagtatgcagatgatgcagcaaccttgaaaagtatcatcacgggggagttacccactggctgggttgatgctcttcctaaatacactccagagagcccaggagatgccaccaggaacctctcccagcagtgcctgaacgcgcttgctaatgttgtgcctggtcttattggaggcagtgctgatcttgcatcctccaacatgactctgctgaagatgtttggtgacttccagaaggatacagctgaagagcgcaatgtccgctttggagtcagagagcacggaatgggcgccatttgcaacggcattgctctgcacagcccagggtttgttccgtactgtgctacattctttgtcttcactgattacatgagaggtgccatgaggatctcggccctgtctgaagccggagtcatctatgtcatgacccacgactctattggtctcggagaggatggcccgacccatcagcccatcgagcacctggtgagcttccgtgcgatgccgaacatactgatgctccgccctgctgatggcaacgagactgccggagcatacaaagtcgcggtcctcaacaggaagaggccgtccatcctcgctctctccaggcaaaagctccctcacctgcctggcacctcgatcgagggcgtggagaagggcgggtacaccatctctgacaactcgaccggcaacaagcctgacctcattgtgatgggcaccggctccgagctggagatcgcggccaaggccgccgacgagctgaggaaggagggcaagacggtccgcgtcgtctcgttcgtctcctgggaactctttgatgagcagtcggatgagtacaaggagagcgtcctccctgctgccgtcacagcgaggatcagcatcgaggccgggtccactcttggctggcagaagtacgtcggagcccagggcaaggccattggcatcgacaagttcggcgcgagtgctcctgccgggacgatctacaaggagtacggcatcaccgtggagagcatcattgcagctgccaagagcttttaagagctaacaacggtctggagttttttttattgtcgtcgttgatgccaaaggaacactgtacctagaggacagtcctatgcctcggagcttggaataatgatgatggagggagcggaaggatgcctgccatttgttggagcgtgcgtggtagtatttctaggcctgtaataaacaatgcctttttccatttacgttgttggttttatccggtgaaaaaaaaaaaaaaaaaaaaaaaggtgagcctggctattaaatcgggtactgtttttttttgggttaaataaaaa

SEQ ID NO: 258337 - DNA, 2321 bp, Zea mays
gcttttcgtacgcccacgcgtccgaacctctagtcctctgttacttctccctccgccgccactcccctcccattctccgccaccgccaattccataccgtcctccgccacctctgctgagagcgagaagagatggcaggcaagggtgatgggccggcaatcggcatcgatctcggcacgacgtactcttgcgtcggcgtctggcagcacgaccgtgtcgagatcatcgccaacgaccagggtaaccgcaccacaccctcgtacgtcgccttcaccgactccgagcgcctcatcggagatgcggccaagaaccaggtcgccatgaaccccatcaacaccgtctttgatgccaagcgtctcattggcaggaggtttagtgatgcctctgtccagagtgatattaagctgtggcccttcaaggtcattcctgggcccggtgagaagccaatgatagttgttcagcacaagggggaggagaaacagtttgcagccgaagagatctcctctatggttctcatcaagatgcgtgagatcgctgaagcttaccttggcagcacgatcaagaatgctgttgtcacggtccctgcctacttcaacgactcacagaggcaggccacaaaggatgctggggtgattgctggcctcaatgtgctgcgtatcatcaatgagccaaccgctgctgctattgcctatggtcttgacaagaaggcaaccagtgtcggtgagaagaatgtcctcatctttgaccttggaggtggtaccttcgatgtctccctccttacaattgaggaaggtatctttgaagtcaaggccacagctggcgacacccatcttggtggtgaggactttgacaacaggatggttaaccactttgtccaggagttcaagaggaagaacaagaaggatatcactggcaacccgagggctctccggaggctgaggacctcttgtgagagggccaagagaactctgtcttccactgcccagaccaccattgagattgactcgctgtacgagggcattgacttctactccaccatcacccgtgccaggtttgaggagctcaacatggacctgttcaggaagtgcatggagcctgttgagaaatgcctgagggatgccaagatggacaagagcagcgtccatgatgttgtccttgttggtggctccactaggatccccagggtgcagcagctgctccaggacttcttcaacggcaaggagctgtgcaagaacatcaatcctgatgaggccgttgcctatggtgctgccgtccaggccgctatcctcagtggtgagggcaacgagaaggtgcaggacctgcttctgcttgacgtcactcctctctctctgggtctggagactgccggaggagtgatgaccgtccttatcccgaggaacaccaccatccccaccaagaaggagcaggtgttctccacctactcggacaaccagcctggtgtgttgatccaggtgtacgagggcgagaggacccggacccgcgacaacaacctgcttgggaagttcgagctctccggcatcccaccggctccccgtggtgtcccccagatcacggtctgcttcgacatcgacgccaacggcatcctgaacgtgtctgccgaggacaagacgacggggcagaagaacaagatcacaatcaccaacgacaagggccgtctgtccaaggaggagatcgagaagatggtgcaggacgcggagaagtacaagtcggaggacgaggagcacaagaagaaggtggagtccaagaactcgctggagaactacgcctacaacatgcgcaacacgatcaaggacgagaagatcgcgtccaagctggctgccgacgacaagaagaagatcgaggacgccatcgacgcggccatcagctggctggacgccaaccagctcgccgaggcggacgagttcgatgacaagatgaaggagctggagagcctttgcaaccccatcatcgccaagatgtaccagggcgcgggtgccgacatgggaggctccggcggcatggacgaggacgctccggctggaagcggtggccctggccccaagatcgaggaggtggactaagcggtttgtgtcagtctcgtgtgtctgctgcagtggctggctggcccagtcgctgctcgatttatcgtcgtcgtcgcggtgtatccgcgttagaaccttttgttggtgaacaatattatcgtggcacgcgttttaagtaatacggtattctggttcggtttaaaaaaaaaaaaaaaaaaaaaaaaaaaaaaaaaaaaaaaaagaaaaaaaaaaaaaaaaaaagggcggccgcccccggaa

SEQ ID NO: 258338 - DNA, 2079 bp, Zea mays
cccacgcgtccgcccacgcgtccgcccacgcgtccgctagtcccctgctccattctcagccgccgccaatcccttcccgtgctccgcaaccgctgagtgagaagaagagatggccggcaagggcgatggcccggctatcggcatcgatctcggcacgacgtactcttgcgtcggcgtgtggcagcacgaccgcgtcgagatcattgccaacgaccagggtaaccgcaccacgccctcgtacgtcgccttcaccgactccgagcgcctcatcggagatgcggccaagaaccaggtcgccatgaaccccatcaacaccgtctttgatgccaagcgtctcatcggcaggaggttcagtgatgcgtctgtccagagtgatatcaagctgtggcccttcaaggtcatttctgggcctggtgagaagccaatgattgttgtccagcacaagggtgaggagaagcagtttgcagctgaagagatctcctctatggttcttatcaagatgcgtgagattgctgaagcttaccttggtagcacgatcaagaatgctgtggtcacagtccctgcctacttcaatgactcacagaggcaggccacaaaggatgctggggtgattgctggccttaatgtgctgcgtatcatcaacgagccaacagctgcagctatcgcctatggtcttgacaagaaggctaccagtgtcggtgagaagaatgtcctcatctttgatcttggaggtggtacctttgatgtctccctcctcaccattgaggaaggaatctttgaggtcaaggccacagctggtgacacccatcttggtggtgaggactttgacaacaggatggtcaaccacttcgtccaggagttcaagaggaagaacaagaaggatatcactggcaaccccagggctctccggaggctgaggaccgcttgtgagagggcgaagaggactctgtcttccactgcccagaccacgattgagattgactcgctgtatgagggcatcgacttctactccaccatcacccgtgccaggtttgaggagctcaacatggacctgttcaggaagtgcatggagcctgttgagaagtgcctgagggatgccaagatggacaagagcaccgtccatgacgttgtacttgttggtggctccactaggatccccagggtgcagcaactgctccaggacttcttcaacggcaaggagctgtgcaagaacatcaaccccgatgaggctgtcgcctatggtgctgctgtccaggctgccatcctgagcggtgagggcaatgagaaggtgcaggacctgcttctgctggacgtcacccctctgtccctgggtctggagactgctggaggagttatgacagtgctgatcccgaggaacaccaccatccccaccaagaaggagcaggtattctccacctactcggacaaccagcccggtgtcctgatccaggtctacgagggtgagaggacccggacacgcgacaacaacctgctgggcaagttcgagctctccggcatcccccctgcaccccgtggtgtgccacagatcaccgtgtgctttgacatcgacgccaacggcatcctgaacgtgtctgccgaggacaagacaacggggcagaagaacaagatcacaatcaccaacgacaagggccgtctctccaaggaggagatcgagaagatggttcaggacgctgagaagtacaagtctgaggatgaggagcacaagaagaaggtggaggccaagaactcgctggagaactactcctacaacatgcgcaacacgatcaaggacgagaagattgcgtccaagctgccggccgatgacaagaagaagatcgaggacgccatcgacgcggccatcagctggctggacgccaaccagctcgccgaggcggacgagttcgaggacaagatgaaggagctggagagcctctgcaaccccatcatcgccaagatgtaccagggcgcgggtgaagacatgggcggcgctggcggcatggacgaggactcccccgcttgcagcggctgccctggccccaagatcgaagaagtggactaagcggtttgttgtcagtcttg

SEQ ID NO: 258339 - DNA, 1143 bp, Zea mays
gttgcaccttgtgcacaaacagcaatggtgctccaagaatttgaaagtggattagtatttgaagctggggttccagttgtagactccgaaacctatagttggagtatatgttgcaggttgaccttgaccaggttggttagacccctggttgccaagaagagctgagaatgggtttgaggctgtgttcccttccccacccattgttgttgcatttagaaatggctcctggacagtttcatacatgcgacggagcatattaaaaccttcaggagaggactcaatgttgctcatagctctgtctgtgttccgcatcatctctctcatgatttcagggttcctagcagcttcgagggtttggcggaggacacttgggtcattgagcacatgggcaagatcaggattccgatccatgatctcgcgcatttgtgggttgctcataatcatattgcgtattaaatcagggttattcatgagattttgcatcgctggcatattcattatctccctcatcaagttgggattctggcttaaatgctgctcaacttgctctaactctggaaatcctggcccaaatatacctgatgacctgccacttcctggagcaccaacacctgaaaatagatctcccaggccacctgccgggacgctactaagagtagatgaagcaagggagctggcagcagcaggtgcactggatgcagctggtggggcaacaccacgcaccaagtgaattgtgtgatctgtctcaacgccgtagctttctagggtttgctcgtccttgaggatgcggcccttgtagatcagacgctgctgcggcgccggcacgtcgcagctcccggctacgacctccttgaacccgcccaccgtggcgcccaggtccgtctgcaccgtgaacttagagccgttcgcgcaccggatgtgcagcgtcgcctcccccgctgccgcctccactgaggcagcgggaggggactcgccgctccctgcgccctcgcctccgcttgccatggcctcgagccctatctccggcccggtccacggctccgattgggttttgccttgtgcgcgtcagctgcgaggtctcgctccttgttttttctcctcctgttgcttgcaatggattgagggaagaagcggacgcgtggg

SEQ ID NO: 258340 - DNA, 527 bp, Zea mays
atccccagggtgcagcagctgctccaggacttcttcaacggcaaggagctgtgcaagaacatcaatcctgatgaggccgttgcctatggtgctgctgtccaggccgctatcctcagtggtgagggcaacgagaaggtgcaggacctgcttctgctggacgtcactcctctctctctgggtctggagactgccggaggagtgatgaccgtccttatcccgaggaacaccaccgccacccaccaagaaggagcaggtgttctccacctactcggacaaccagcctggtgtgttgatccaggtgtacgagggcgagaggacccggacccgcgacaacaacctgcttgggaaattcgagctctccggcatcccaccggctccccgtggtgtcccccagatcacggtctgcttcgacatcgacgccaacggcatcctgaacgtgtctgccgaggacaagacgacggggcagaagaacaatattatcgtggcacgcgttttaagtaatacggtattctggttcggtttcgtat

SEQ ID NO: 258341 - DNA, 504 bp, Zea mays
gcatcgacaagttcggcgcgagtgctcctgccgggacgatctacaaggagtacggcatcaccgtggagagcatcattgcagctgccaagagcttttaaaagctaacaccggtctggagtttttttttattgtcgtcgttgatgccaaaggaacactgtacctagaggacagtcctatgcctcggagcttggaataatgatgatggagggagcggaaggatgcctgccatttgttggagcgtgcgtggtagtatttctaggcctgtaataaacaatgcctttttccatttacgttgttggttttatccggtgaccctcacacgattcatcaaggtggtgagcctggctattaaatcgggtgctgttttttttttgggtaaacattggcaatggccttactgtcttgcagcagtgcttcgttcgtttgctggattgaaggcttaatatgataaaattccccccttttgttgattcgttttggcggaaggagggaaaaaaagaacga

SEQ ID NO: 258342 - DNA, 924 bp, Zea mays
ccctcgcgtccggcaaaatttagggtttctttgcatctctcccgtcggctcctcccctcccaagtcccacctcacctctcctatatgccgatgaggcctgcgcggccgggcccgccgatgcagcaccgtggtccgcccccgatggcgcgcctccgccccgaaccaatcgaccgcgagaagacctgtcctctgctgctcagggttttcacaagggttgctggtcaccaccaaaatgaagagtttgcagtgagagggaaggaaccaaaggatgaagttcagatttacacatggaaggatgcgaccctccgcgagctcactgatcttgtgaaagaggttgctcttccagcaagaaaaaggaatgcaaggctttcttttgcatttgtatacccagacaagaatggtcgttttgttgtcagacaggtgggttcgaccttcgcttacggtcatggaagaggcgacgatgccaaaactcttgcagagctcggattccagatcggtgattacttgagcgttgcaatcatgtagacggtgcctgcaccggatgtaattgctgtgatgtcaaaagggctctggttgcaacagtaaggcatgattctctgttagcactaggaactgcaaccagaattgtctgtaataccggtagtatcaaatttacctagacacttcgaacgagcaaggcgtctgtaataccggtacttacatgtggtgcctggagcttccaaatctggatagcgtgggtttttcattgagaatgttaagttggctcgggttcctatgaagtcaaacacaggaaagtttgcatcttggagccagaccagagtttgcatcttggagccagaccagttgggcaaagtttgtttcgccatttctaaaatcttgtagccaggctagatttgagataacagtttagataatagttactct

SEQ ID NO: 258343 - DNA, 910 bp, Zea mays
cgaggtcttcattgatctcaagggaggaaactgcaaaatttagggtttgtttggccctattcgcacacacccacgccgtcggatcctcctgccctccccacgtccacctctctccgccgaagaatcggcggcggcggcggcggcggcgagcgccttcccttgtcaaaatccacccggcggcagagcagagcctcgttgctgaggaggggagatggcaggcatgaccgatatgccgatgaggccggcgcggccgggcccgccgatgcagcaccggggccctccgccgatggcgcgcctccgccccgaaccaatcgaccgcgagaagacctgccctctgctgctcagggttttcacaagggttgctggtcaccaccaaaatgaagagttttctgtgagagggaaagaaccaaaggatgaagttcagatttacacatggaaggatgccactctccgtgagcttactgatcttgtgaaagagggtgctcttccagcaaggaaaaggaacgcgaggctttcttttgcatttgtatacccagacaagaatggtcgttttgttgtcagacaggtgggttcgaccttcgcttatggccatggaagaggtgatgatgccaaaactcttgcagagcttgggttccagattggcgattacctgagcgtcgcgatcatgtaagccggtgcccgcaatgagttccggcgactgcaccggatataactgatgtgatgtaaaaaatgcattggttgcgacgagcaagggatgagtatctgttagcgctaggaagtggaaccaaaactgtctgtaatgccggtactaccaaagttggctagacactttgaacgatcaaggcgtatggtatggtttcaagaaaaaaaaaaaaaaaaaaaaaaaaaaaaaaaaaaaaagggcggccgc

SEQ ID NO: 258344 - DNA, 458 bp, Zea mays
cccaagaaccacgctgacctctcctcctcgcgaagtatcggcggcggcgagcgcggcaggctagagcctcgttgctgaggaggggagatggcgggtatgggcgatatgccgatgaggcctgcgcggccgggcccgccgatgcagcaccgtggtccgcccccgatggcgcgcctccgccccgaaccaatcgaccgcgagaagacctgtcctctgctgctcagggttttcacaagggttgctggtcaccaccaaaatgaagagtttgcagtgagagggaaggaaccaaaggatgaagttcagatttacacatggaaggatgcgaccctccgcgagctcactgatcttgtgaaagaggttgctcttccagcaagaaaaaggaatgcaaggctttcttttgcatttgtatacccagacaagaatggtcgttttgttgtcagacaggtgggttcgaccttcgc

SEQ ID NO: 258345 - DNA, 555 bp, Zea mays
gcggacgttgcataaagtatcttaatggttctgtaatggaaggtcgaaacatcacagttgaaaagtcacgccgtggtcgcccaaggacaccaactcctggaagctatcttggccatcggtatgagcgcagggagcgtgggaggttccatagaggctatggtggtgggcgtgatgagtattacggcaatggcggcggcgggtatggctaccgcaggtctccgcctcccatgtactcttcatacagggagagtcgggattattatccctcctacaaggacagccgggactaccctccctacagggacggcagggactactctcctccccacagggaccctcgggactactacgaaagcaggggtggccggggctactcgccgcctccttatggtggtggtaggtcaaggagggaccgatcgcctccaccgtatcggatgcctgctaggggctccggtggtagcagctgcgtattcacttcatcagttgtagcacctcgtcattactaaaatgtgagttgtcttgaagaacgaagggatccatcttcttcgtcacaaa

SEQ ID NO: 258346 - DNA, 719 bp, Zea mays
ccaaaatgaagagttttctgtgatagggaaagaaccaaaggatgaagttcagatgtacacatggaaggatgccactctccgtgagcttactgatcttgtgaaagaggttgctcttccagcaaggaaaaggaacgcgaggctttcttttgcatttgtatacccagacaagaatggtcgttttgttgtcagacaggtgggttcgaccttcgcttatggccatggaagaggtgatgatgccaaaactcttgcagagcttgggttccagattggcgattatctgagcgtcgcgatcatgtaactgcagattggcgattacctgagcgtcgcgatcatgtaagccggtgcccgcaatgagttccggtgactgcaccggatagaactgatgtgatgtaaaaaatgcattggttgcgacgagcaagggaggagtatctgttagcgctaggaagtggaaccaaaactgtctgtaatgccggtactaccaaagttgcctagacactttgaacgatcaaagcgtatggtatggcttcttgttagtatggtgcttgtctgcacgtcaatggctccatgttaagatgggctgaacggtattccaaggggcgggcatgataaccattatctgaaccattatccatacctgaactacctgaacctgtacccgacctacccgaacctaaataacccaaacactagttcagatcctaagtctcaaaacccaaaat

SEQ ID NO: 258347 - DNA, 642 bp, Zea mays
tctcacgcgcccgcccctccttgcgctggccctctggtactgctccctgggccttctctccagtaccaccctccgtcaccgacgattccataccgggctacgacacctctgctgagagcgagaagagatggcaggcaagggagatgggccggcaatggggatcgatctcggcacgacgtactatggcggcagcgtctggcagcacgaccgtgtcgagatcatcgccaacgaccagggtaaccgcaccacaccctcgtacgtcgccttcaccgactccgagcgcctcatcggagatgcggccaagaaccaggtcgccatgaaccccatcaacaccgtctttgatgccaagcgtctcattggcaggaggtttagtgatgcctctgtccagagtgatattaagctgtggcccttcaaggtcattccagggccccgctgagaagccaatgatagttgttcagcacaagggggaggagaaacagtttgcagccgaagagatctcctctatggttctcatcacccgtgccaggtttgaggagctcaacatggacctgttcaggaagtgcatggagcctgttgagaagtgcctgagggatgccaagatggacaagagcagcgtccatgatgttgtccttgttggtggct

SEQ ID NO: 258348 - DNA, 763 bp, Zea mays
tcggacgcgtgggcggacgcgtgggcggacgcgtgggcttgacgcgtgggcggacgcttgggcggacacgtgggatcacggtctgcttcgacatcgacgccaacggcatcctgaacgtgtctgccgaggacaagacgacggggcagaagaacaagattaccatcaccaacgacaagggccgtctgtccaaggaggagatcgagaagatggtgcatgacgcggagaagtacaagtccgaggacgaggagcacaagaagaaggtggagtccaagaactcgctggagaactacgcctacaacatgcgcaacacgatcaaggacgagaagatcgcgtccaagctggctgccgacgacaagaagaagatcgtggacgccatcgacgcggccatcagctggctggacgccaaccagctcggcgaggcgttcgagttcgatgacaagatgaaggagctggagagcctttgcatccccatcattgccaagatgtaccagggcgcgggtgcttacatgggaggctccggcggcatggacgaggtcgctccggctggaagcggtggccctggccccaagatcgaggaggtggactaagcggtttgtgtcagtcttgtgtgtttgttgcagtggctggctggtccagtcgctgctcgatttatcgtcgtggtcgcggtgtatccgcgttagaaccttttgttggtgggctttaacccccaggcatttttaaaaactcctccggttttttggttcggtttaaaaaggaggaaaaa

SEQ ID NO: 258349 - DNA, 356 bp, Zea mays
ctccttatggtggtggtaggtcgagcagggaccgatcggtttccccgtatcggatcccagaaaggggcttcggtgaaggccgccgggtgggtgacggtgcatatgacaggtaatgtagaggttttctctcccccggtggctgctgttgcgatggctgcgtatggctctcgcagctccggtgatatggttaggctgctgcctgcagcggtgtacttggtgtactgtcttcccgcgtatgtggatttggtgaaaccttctgtatgagcaccttttatttgtagcccgccatgattccttctttagccagactggggactttgcctcccaaaaaaaaaaaaaaaaaaaaaaatataaaa

SEQ ID NO: 258350 - DNA, 980 bp, Zea mays
gtcgacccacgcgtccgcccacgcgtccgcggacgcgtggggcaagcaagctcgatctactactactactagctggtacacatactagccagcctgccagccagcttgccatggcgcccaccgtgatgatggcctcgtcggcaaccgccgtcgccccgttccagggtctcaagtccgccgccagcctccccgtcgcccgccgcagcaccaggagcctcggcaacgtcagcaacggcggaaggatccggtgcatgcaggtgtggccggcctacggcaacaagaagttcgagacgctgtcgtacctgccgccgctgtcgacggacgacctgctgaagcaggtggactacctgctgcgcaacggctggataccctgcctcgagttcagcaaggtcggcttcgtgtaccgcgagaactccacctccccgtgctactacgacggccgctactggaccatgtggaagctgcccatgttcggctgcaacgacgccacccaggtgtacaaggagctgcaggaggccatcaacgcgtacccggacgccttccaccgcgtcatcggcttcgacaacgtcaggcagacgcagtgcgtcagcttcatcgcctacaagccccccggcagcgagtagagaccgtggctagatcgacccatggccatgcctctgcctgttgatcggatcaccttcttgcattggttcctctctctctctccctccttttttttccctttatctcatcatttcttttctcctgcatgcaatggttccttttgcttccaacaattctcctgctgatgtatccagcatggcatcatccatctacaattacgtacgtagtgcaacgactgtcgattcgttgggtgaggaacatatatgtgaatgcaagctccggctaccatacatgtgtaatgtgtaatagatatatatacaaaactgccgaggcgccgacaatactttaaaaaaaaaaaaaaaaaaaagggcggccgc

SEQ ID NO: 258351 - DNA, 1086 bp, Zea mays
cccacgcgtccgcccacgcgtccgcccacgcgtccgcctacgcgaattcgagcaagcaagcaagcagcgagtacatacatactaggcagccaggcagccatggcgcccaccgtgatgatggcctcgtcggccaccgccgtcgctccgttccaggggctcaagtccaccgccagcctccccatcgcccgccgctcctccagaagcctcggcaacgtcagcaacggcggaaggatccggtgcatgcaggtgtggccggcctacggcaacaagaagttcgagacgctgtcgtacctgccgccgctgtcgacggacgacctgctgaagcaggtggactacctgctgcgcaacggctggataccctgcctcgagttcagcaaggtcggcttcgtgtaccgcgagaactccacctccccgtgctactacgacggccgctactggaccatgtggaagctgcccatgttcggctgcaacgacgccacccaggtgtacaaggagctgcaggaggccatcaaatcctacccggacgccttccaccgcgtcatcggcttcgacaacatcaagcagacgcagtgcgtcagcttcatcgcctacaagcccccgggcagcgactagaccgcgcccgccggccgccccccgccggctagctagctagctagctcctgcgtgagctagtagctagtgccatgcgtcgtctctgtcgttcggttttgcttcgggtcaccgtgtaccctttgcttgcttggtttcttctttccttttttccttttttttttcttttccccggccatggttcctttgctttccagttttctctgctggatgtgatgtatccattgttgcaagcatggccttgcattggctacctctatacctgctgctacaaaactactgcaacgcctatatatacttggggtgaggaacatgtgaatgcaagctccggctatcatatacatgtaatatggatacaaactatatatataaaaaaaaaaaaaaaaaaaaaaaaggcggccgccgaggcgccgacaatactaaaaaataaaaataaatctcaaaaccctaattaacaatacaaaaaagaactagatt

SEQ ID NO: 258352 - DNA, 948 bp, Zea mays
gtcgacccacgcgtccgagcaagcaagcaagcagcgagtacatacatactaggcagccaggcagccatggcgcccaccgtgatgatggcctcgtcggccaccgccgtcgctccgttccaggggctcaagtccaccgccagcctccccgtcgcccgccgctcctccagaagcctcggcaacgtcagcaacggcggaaggatccggtgcatgcaggtgtggccggcctacggcaacaagaagttcgagacgctgtcgtacctgccgccgctgtcgacggacgacctgctgaagcaggtggactacctgctgcgcaacggctggataccctgcctcgagttcagcaaggtcggcttcgtgtaccgcgagaactccacctccccgtgctactacgacggccgctactggaccatgtggaagctgcccatgttcggctgcaacgacgccacccaggtgtacaaggagctgcaggaggccatcaaatcctacccggacgccttccaccgcgtcatcggcttcgacaacatcaagcagacgcagtgcgtcagcttcatcgcctacaagcccccgggcagcgactagaccgggcccgccggccgccccccgccggctagctagctagctagctcctgcgtgagctagtagctagtgccatgcgtcgtctctgtcgttcggttttgcttcgggtcaccgtgtaccctttgcttgcttggtttcttctttcctttttttcctttttttttcttcttttccccggccatggttcctttgctttccagcagttctctgctggatgtgatgtatccattgttgcaatcatggccttgcattggctacctctatacctgctacaaaactactgcaacgcctatatatacttggggtgaggaacaaaaaaaaaaaaaaaaaaaaaaaaaaaaaaaaaaaaaaaaaaaaaaaaagggcggccgc

SEQ ID NO: 258353 - DNA, 591 bp, Zea mays
ccggagccggccatcccgtcgcacactctccccctctatatatgccgtcggtgtgggggagcctactacaggacgacccaagcaagcaagcaagcagcgagtacatacatactaggcagccaggcagccatggcgcccaccgtgatgatggcctcgtcggccaccgccgtcgctccgttccaggggctcaagtccaccgccagcctccccatcgcccgccgctcctccagaagcctcggcaacgtcagcaacggcggaaggatccggtgcatgcaggtaacaaatgcatgcatggactgtgtgttgcccatcccaattcccaaccccaaccaaaccaaacacgcgtgcaggtgtggccggcctacggcaacaagaagttcgagacgctgtcgtacctgccgccgctgtcgacggacgacctgctgaagcaggtggactacctgctgcgcaacggctggataccctgcctcgagttcagcaaggtcggcttcgtgtaccgcgagaactccacctccccgtgctactacgacggccgctactggaccatgtggaagctgcccatgttcggctgcaacgacgccacccaggtgt

SEQ ID NO: 258354 - DNA, 637 bp, Zea mays
cccacgcgtccgcggacgcttgagcggattcatggtcacacacgtggggggctcttagggcgcctcccaggtgtacaaggagctgcatgaggccatcaaatcctacccggacgccttccaccgcgtcatcgacttaaacaacatcaagcatacacactgcgtcagcttcatcacctacaagcccccggtcagcgactataccgagctcgtcggccgtcctcctgcggctagctagctagctagctcctgcgtgagctaatagctagtgccatgcgtagtctatgacgatcggttttgcttcgggtcaccgtgtaccctttgcttgcttggtttcttctttccttttttcctttatttttcttcttttccccggccatggctcctttgctttccagcagttctctgctggatgtgatgtatccattgttgcaatcatggccttgcattggctacctctatacctgcctacaaaactactgcaacgcctatatatacttggggtgaggaacatgtgaatgcaagctccggctatcatatacatgtaatatggatacaaactatatatataaatccgccgaggcgccgacaatactatacgacaccgggtaagttatatataactggtgctttttattta

SEQ ID NO: 258355 - DNA, 1075 bp, Zea mays
cggacgcgtgggccgaactgcagcacctcttctcccgccacccacacgtgctcccatggccgccaccgcgatctcagtccgcctcctcccaaccgccgcgcgccatgtggcctccgcccgccgcgcccgcctcggggccgtccgcgcgcagtccgcgccggcggcggcggcggcggcgctgacgcaggacgacctcaagcggctggcggcggtgcgcgccgtgtcgacccacgcgtccgggatggtgctcgggctcgggacgggctccacggccgccttcgccgtcgccgagatcggcgcgctcctggccgcgggcaagctcgagaagatcgtcggcgtgcccacatccaagcgcaccttcgagcaggcgcagtcgctcggcatcccgctctccacgctcgacgacaacccgctcatcgacctcgccatcgacggtgccgacgaggttgaccctgacctcaaccttgtgaaagggcggggtggtgctcttcttcgtgagaagatggttgaggcagcatcggacaagtttattgttattgttgacgagacaaaactagttgatgggttaggaggtagtggtctagccatgccagtggaagttgtgcagttctgctggaagtacaaccttgtaagattgcaggaactgtttaaggaggaaggagtcgaggcaaagctaaggtttgaaggcgacaagccctatgttactgacaactcaaactacatcgtcgatttatacttcaagacgccaatcaaggatgcgttggcagcaggacaggaaattgcagctctggaaggagttgttgaccatgggttgttcttgaacatggcgagttcagtgatcattgctggaacggacggtgtcagtgtcaaaacgaagtgagtttttgagttgctttgttgtttgtgttgagttttacaatttaatgtacaagctattggtgtaaaagcagctgataagatgcttcaataaaggtgttcccccaatgtggggattgactatcaaaaaaaaaaaaaaaaaaaaaaaaaaaaaaaaaaaaaaaaaaaaaaaaaaaaaaaaaaaaaaaagggcggccgc

SEQ ID NO: 258356 - DNA, 766 bp, Zea mays
gaattcggctcgagctcccctcccctcccctccctttctcccctgactcctgctctactggatcctccgcctccatcgcctctcgcgcctccaatcgccctcggcgcctcgtccgtcctgctccacctcttcttacgccggttgaccctgacctcaaccttgtgaaagggcggggtggtgctcttcttcgtgagaagatggttgaggcagcatcggacaagtttattgttattgttgacgagacaaaactagttgatgggttaggaggtagtggtctagccatgccagtggaagttgtgcagttctgctggaagtacaaccttgtaagattgcaggaactgtttaaggaggaaggagtcgaggcaaagctaaggtttgaaggcgacaagccctatgttactgacaactcaaactacatcgtcgatttatacttcaagacgccaatcaaggatgcgttggcagcaggacaggaaattgcagctctggaaggagttgttgaccatgggttgttcttgaacatggcgagttcagtgatcattgctggaacggacggtgtcagtgtcaaaacgaagtgagtttttgagttgctttgttgtttgtgttgagttttacaatttaatgtacaagctattggtgtaaaagcagctgataagatgcttcaataaaggtgttcccccaatgtggggattgactatcacttattgtgggataaaaaagccattttaataggttgaaaaaaacaaaaaaaaaaaaaaagggcggccgc

SEQ ID NO: 258357 - DNA, 750 bp, Zea mays
taaccacacgtctgctaacgcgtccgcccacgcgtccgcccacgcgtccgcaaatatatctccccgcgtccgctagccctagccgccgtccgccgacttcatcgtcgccgtcgtctagacctcttcacgcactggaaaggttaaagtccgacatcaatggcgaagcatcatcctgatctcatcatgtgccggaagcagcctggcatcgcgattggccgcctttgcgagaaatgtgatggcaagtgtgttgtctgcgactcgtacgtgcgcccatgtacgcttgtccgggtctgcgacgagtgcaattatggttcgttccagggaaggtgtgtgatctgtggaggagtcggcatctcagacgcttactactgcaaggagtgcacccagcaggagaaggaccgggacggttgccccaagatcgtgaatctcggaagcgccaagacggatctcttctatgagcgcaagaagtatggttttaagaagagatgaccgagaagatggagctgtgtgtggttcactttggctgtgtggtctgttctatggcactgaatactgagagtaggcagctgagacagcagctttgtattcctgttatggtttgataattgatactcgcatggaaatacagctgtgatatgcgttgtaataactaagtccaactgtatgatgcaagagactgcttatgtaatctgtgcttgatggtaatggttatgaatggacttgaaatattggcacgatagctgtcatcat

SEQ ID NO: 258358 - DNA, 602 bp, Zea mays
ctggttcctccgcctccatcgcctctcgcgcctccatcgacctcggcgcctcgtccgtcctgctccacctctgcttacgccgggttaacatttgaggcatggcgaaacaccacccggacctgatcatgtgccggaagcagcccggcatcgccatcgggcggctgtgcgagaagtgcgacggcaagtgcgtcgtctgcgactcgtacgtgcggccgtgcacgctggtccgcgtctgcgacgagtgcaactacgggtcgttccaggggcggtgcgtcatctgcggcggcgtgggcatctcggacgcctactactgcaaggagtgcacccagcaggagaaggaccgggacgggtgccccaagatcgtcaacctcggtagcgccaagaccgaccctcttctacgagcgcaagaagtacgggttcaagaagaggtgacggatcagtcaggtgagcatccgtgatgtgcttctcgtggttctgtgtctgagcagcgtaccgtgactgatcatatgggcacacaatgcagttgtgtaccatgtgcatgtatgtgttcagaaatttttctgttgacagattgaagcaggagagtacgctcaagtttgacc

SEQ ID NO: 258359 - DNA, 1233 bp, Zea mays
gttcggcttccttgatataaccgtccatctcgattcgatccgcctcgtccctcccgaacgcacgaattcaccaaccaaactccactgtctccaactctccatcgcgtctgctacgcctctcctgcaggacgaccaatggcttccaggaagttcttcgtgggtggcaactggaaatgcaacggtactggcgaggacgtgaagaagatcgtcaccgtgctcaaccaagccgaggtgccctctgaagacgtcgtcgaggtggtggtgagtccgcctttcgtttttctgcagcaggtcaaggggctgctgcggctggacttcgccgtcgcagcgcagaactgctgggtgcgcaagggcggcgccttcaccggcgagatcagtgctgagatgctggtaaacctgcaggtgccctgggtcattttgggacattctgagcgcagagctctgttgggtgaatccagtgattttgttgctgataaagttgcatatgcactcactcaaggtctcaaggtaattgcttgcattggtgagacccttgagcagagagaggcaggaacaacaatggatgttgttgctgcacaaacaaaggctattgctgaaaaaatatcagattggacaaatattgtgttggcatatgaaccagtttgggctattggtaccggcaaagttgcaactcctgctcaggctcaggaggttcatgatggtctgagaaagtggctccactccaatgttagccctgcagttgctgaattgacaaggataatttatggagggtctgtaaatggagctaactgcaaagaacttgcagctcaaccagatgttgatggattccttgttggtggagcctcattgaagcctgaattcgtggacatcatcaagtctgccactgtcaagtcttcatctgcctagtgttttgactttcaatgcacctggatgcttgtcgtactgaatgctgttgatcttttaaagctattgccattttaccatctcgttttggtattctagctccagtgcatcgtttgtatatcatcatctcctgcgtatgtgcacagagtagtcatttacctgaatcatccttgtgtaccctttggaactgcataattgaactgcgctattctagatctgtcctctcatggttacttcaatttatgaggtgttgcatcatgagtcaactcttcaaatttgatggaataattccatttatcataaaaaaaaaaaaaaaaaaagggcggccgc

SEQ ID NO: 258360 - DNA, 418 bp, Zea mays
  unsure (1)..(418): unsure at all n locations
aagaataatttatgaagggtctgtaaatggagctaactgcaaagaacttgcagctcaaccagatgttgatgaattccttgttggtgaagcctcattgaagcctgaattcgtggacatcatcaagtctgcccctgccaagtcttcatctgcctagtgttttgcctttcaatgcacctgaatgcttgtcgtactgaatcctgttgatcttttaaagctattgccattttaccatctcgttttggtattctagctccagtgcatcgtttgtatatcatcatctcctgcgtatgtgcccagagtagtcatttacctgaatcatccttgtgtacccttcgganctgcataattgagctgcgctattcttagggtgaggtatagaaaaaaaaaaaaagggcggccgcccgggaattcggccggt

SEQ ID NO: 258361 - DNA, 1080 bp, Zea mays
cgcatacgcacagtcgcactcgctccacttgtcgacccacgcgtccggcccgcccggaggcgtcgcacctgcacgctgcggcagcgggcagccgccaagcctctctcgtgcggcaagcaccacacagacacccgatggcgctgctgctgctgcgcggctgcgccgcgccgccagccgtccacgcggccccggcggggtcccggctgctccctccggcgctgccgcggcggcggctcgtggccgtcgcctcttcggcctcctccgcgccgtccggcgaggtggcgtcgtcgtcccaggacggccgcggctacgggatcgtgggcgggcccaacggccacgccatcgctcccgccacagacaccaagtccaccgccgtcgagaccaccgtcgagagggtgatcttcgacttccggttcctggcactcctcgccgtcgccgggtcgctcgccggctccgtcctgtgcttcctcaatggctgtgtcttcatcaaagaggcgtaccaggtttactggtcgagctgtgtcaagggggttcatacggggcagatggtcctcaaggtcgtcgaggccatcgatgtgtatcttgctggaacagtcatgctgatatttgggatgggtctctacggcctcttcatcagcaacgctcccgccggtgttcctcctgaatccgaccgtgccctcagcggctcgtcgctgttcgggatgttcgctttgaaggaacgcccgaagtggatgaacatcacctcgcttgacgagctcaagacaaaagtggggcacgtcatcgtgatgattctacttgtgaagatgttcgagaagagcaagatggtgacgatagccacggggctggacctcctcagctactcgatctgcatcttcttgtcgtcagcttctctctacatcctgcacaatcttcacaagggcgaccatgaggagtgacgagagtgaaatgccgaatttgtagcctattcgagagagagagttgacggtcttgtccaataatcaatactggatttttaaaaaaaaaaaaaaagggcggccgctcataaaatatataatgagaaatgtatgatacaatttatct

SEQ ID NO: 258362 - DNA, 451 bp, Zea mays
gaaatatccatcatttattttgttttatataccttttgaagtacagtatatatgaaacaagtcatattcttctgtttgcttacattggactcgcacacgcatgcatcatgtctgagaactgcactcatcatttctagtgattaattcttgttcgtgcaggaacgccccaagtggatgaagatcacctccctcgacgagctgaagacaatagtggggcacgtcatcgtgatgatcctgctggtgaagatgttcgagaggagcaagatggtgacaatcgccacggggctggacctcctcagctactcgatctgcatcttcttgtcgtcggcctctctctacatcctgcataacctccacaagggcgacgacaatgaggagtgaggagagtgcaatataatgccgaatctgtagctctatgacagaagagataatggttaggcttgggttcagc

SEQ ID NO: 258363 - DNA, 504 bp, Zea mays
gcgctctcacgcgtgcgcccacgcgtccgcccacgcgctcggttcacttgtgcaagcacgatcttctgcagatgtgtatcttgctggaacggtcatgctgatatttgggatgggtctctacggccccttcgtcagcaaccctcccgcgggtgttcctcctgaatccgaccgtgccctgagcggctcgtcgctgttcgggatgttcgctttgaaggaacgccccaagtggatgaacatcacctccctcgacgagctcaagacaatagtggggcacgtcatcgtgatgatcctgctggtgaagatgttcgagaggagcaagatgctgacgatcgccacggggctggacctcctcagctactcgatctgcatcttcttgtcgtctgcctctctctacatcctgcataacctccacaagggcgacgaccatgaggagtgaggagagtgcaataatataatgcccaatctgtaactctatgacagaagagataatggtaaggcttgggt

SEQ ID NO: 258364 - DNA, 381 bp, Zea mays
gctctccgcagtgatcttcgacttccggttcctggcactcctcgccgtcgccgggtcgctcgccggctccgtcctgtgcttcctcaatggctgtgtcttcatcaaagaggcgtaccaggtttactggtcgagctgtgtcaagggggttcatacggggcagatggtcctcaaggtcgtcgaggccatcggtgaggtgtttgttcttgtagctgacctctgttcagccaactagcgtcgtcagttaactgttcctttgctggtacacttgtgcaagcacgatcttctgcagatgtgtatcttgctggaacagtcatgctgatatttgggatgggtctctacggcctcttcatcagcaacgctcccgcgagtgttgctcctgaa

SEQ ID NO: 258365 - DNA, 1291 bp, Zea mays
gcggccgccctttttttttttttttaaataatgggatacagatgcatgtgtttctcagaatctgctgaagcaaatgtcatctctttaatattacaacaaaactagagatatatagcgataggacatatggtacgtagacacatacataagctgatgaatatgtatatatctaattatgtaattagctagctagtaggtatcgccagctgctgcgtggtgaataatgcactctggggtgaggctgtggtctcgcttggggtcgaggcagtagttgtagaccatgtggttgcgctgcacccaccgcatggcggcctcctgctgcgggctaagcgcatcgccgccgccgccgccggtcgggccgccgcttggcgcgcggcaccttggcggcgcgcgcggcgagcaggcgcggaggagcagcccgagaagcgcgctacgaaggggctgtagcggtagtcggccttgtacctgccgtcgtcggtggcccaggaggaggcgtcccagatggagccgtacacccacatcggccgccgcgggaacgtctcgctccgccgcgggtaccgccggatcggcacgttcgtccacgtagaagatgatgtgcgtggggctccagaggatggcgtagttggtggaagtcggcggtgtgggtcgaaccagtccaggcggaacttgacctcccgcccgacgaccctgccaggcccgccgtcgccggagccgaggacgtacacgttggtctgcagcgtgtacggctgccccggcgtggtgcccaggaactccatgtccacctcgtcgtggaatcccgggtgcgcgtccgcgttcgacaggtagaaggccgtgatgacaccggccgtgtacccggcctgcagcttcaccgacgcgccgaagtagcccgaccggaacgcccgccgcgacttgaacccgctcccggacgtcgagtccagccagatggtcacgccgccgccgccgccggacaccgactggtgctgcgccccccacagggtgcggaagtcgcgggagaagggacgcgcgcggtaacgcttgctcgggtagaaccccggcgacggcggatgctgcgcgtctgctcctgctgcagctgcagtaacaacaacaaaaataagcagcgcgtgccggtgccgggcaggaggagcggcgggccataggtggcgttggacgggacgatgcgaccagcgagctgcaagctcgacgatggttggcaatggagctggccggcctgcaggcgtgtgagcgtgacagagggaaagctgccgccggacgcgtgggtcgacactgccta

SEQ ID NO: 258366 - DNA, 1471 bp, Zea mays
  unsure (1)..(1471): unsure at all n locations
cggntttgaaaaaccgggccgacccagtcgacccacgcgtccgcaacccagctcgctcgtcccagctgatcaggtcgagcacctagtagcgacctgctcgatcatcagtgtagagtgtcggtaggtgtctgtctctcttggtggctggttgcaacggtcatggcgacgtcgtctcgtcgggtgcccttgctgctgctgtgcctgggcgtgctggtgtcctgctccttcgcggcgggcagcttggaccaggagctggacatcacgtggggcgacgggcggggcaaggtccttgacaacgggcggctgctgacgctgtcgctggaccgcacgtccggctccgggttccagtcccggcacgagtacctgttcggcaagatcgacatgcagctgcggctggtgccgggcaactccgccggcaccgtcaccgcctactacctgtcgtcgcagggcggcgcgcacgacgagatcgacttcgagttcctgggcaacgtgtccggcgagccctacacgctgcacaccaacgtgttcacgcgggggcaggggcagcgggagcagcagttccgcctctggttcgaccccaccgccgacttccacacctactccatcctctggaaccccaagcacgtcatcttcatggtggacgacatgcccatcagggacttccgcaacctggagagcaagggggtggcgttccccaagagccagccgatgcggctctactccagcctgtggaacgcggacgactgggcgacgcagggcgggcgcgtcaagacggactggtcccacgcccccttctccgcctcctaccgcgggttcaaggccgacgcttgcgtcgccgtcgcgggcggccggacccgctgcggcgccaccgtcggcaccgagggcaccggcgcccccgcctccgccgccggcgccggggactggtacaaccaggagctggacctcaccctgcagcagcggatgcgctgggtgcagcgcaagtacatgatctacaactactgcaccgaccccaagcgctaccagcagggcctccccgccgagtgctccatgcagtagcgcccggttattcctcgcccgtccaacaatggcgcgcgcgcgcgtgtgtgtgcatgtggtccgctctactgctaccgctacgacgatcggtgtcgatcaccggatcaaggcaagacgaaaggcatcgaaacatggtagataaataaaggacttgacgatttgtaacgcagtagctggtgcgtgcgtggtgtggtggtaagaaattcttctgctgcctgtgttcttgtagcctcctcgtcctcgcccaccctgttggtacgtgtacggtgtacgtagtctgccgccgcgcgctgttcgtgttcgtcgtgtctcgtgtctgtattatactcgtcctccccatcaaaaaaaaagttgttccatgtaaaaaaaaaaaaaagggcggccgcgtcgtcggacgcgtgggcggacgcgtggg

SEQ ID NO: 258367 - DNA, 919 bp, Zea mays
agcagttccgcctctggttcgaccctaccactcgccctgcccgctcgacttcgagttcctgggcaacgtgagcggggagccctacacgctgcacaccaacgtgttcacgcgcggacagggccagcgggagcagcagttccgcctctggttcgaccctaccactgccttccacacctactccatcctgtggaacccgcagcacgtgatcttcgcggtggacggcaccccggtgcgggacttcaagaaccacgaggcgcgcggggtggcgttcccgaggatgcagcccatgaggctgtacgccagcctgtggaacgccgacgactgggccacgcagggcgggcgcgtcaaggcggactggtccaaggcccccttcgtcgcctccttccgcggtttcagcgccgacgcctgcgtctgggacggcggcaggcagcgctgccctgagggcaccatggaggccgccgccgtcgcgggtgccggctccggccgcggctggtggaaccagcagctcagcgacatgagctaccgccgcatgcgctgggtgcagcgcaagttcatgatctacaactactgcgccgacgccaagcgcttcccgcagggcgtgcccgccgagtgcaagctccggtgagggagcgaggtttgttgggacgtccgtggggcatcaaaaccaagcacgatccctagtcgtggaaagtagaaaccaggcatcgattcgatcgtcgtcgacggtcttagtagtagctacttattttgcagtgggcgatgaaagaatggtgtcatgtaaatgtagctccagtcgtgtcgcattctttgatttgttgtttcagcagcaccggatgtacaagtactgagtttgggctagcaagaataagtaatctttttcggccaaaaaaaaaaaaaaaaaaaaaaaaaaaaattaaaa

SEQ ID NO: 258368 - DNA, 555 bp, Zea mays
cctactatgtgaggctggtcccctgacggaccgggccggatttgccggaccctcccacgcgttacttacgcgcggacgcatgcttttgctcctccgccagcttcatggtggacgacatgcccatcagggacttccgcaacctggagagcaagggggtggcgttccccaagagccagccgatgcggctctactccagcctgtggaacgcggacgactgggcgacgcagggcgggcgcgtcaagacggactggtcccacgcccccttctccgcctcctaccgcgggttcaaggccgacgcttgcgtcgccgtcgcgggcggccggacccgctgcggcgccaccgtcggcaccgagggcaccggcgcccccgcctccgccgccggcgccggggactggtacaaccaggagctggacctcaccctgcagcagcggatgcgctgggtgcagcgcaagtacatgatctacaactactgcaccgaccccaagcgctaccagcagggtctacccgtcgagtgctccatgcagtagcgccctggtattcctgcgccgtccaaca

SEQ ID NO: 258369 - DNA, 507 bp, Zea mays
cggacgcgtggcgagacgcgtgggcggacgcgtgggcggacgcgtgggcggacgcgtgggcagacgcgagggcggacgcgcgcgctcgtcccagctgatcaggtcgagcacctagtagcgacctgctcgatcatcagtgtagagtgtcggtaggtgtctgtctctcttggtggctggttgcaacggtcatggcgacgtcgtctcgtcgggtgcccttgctgctgctgtgcctgggcgtgctggtgttctgtttctttgctgtggactttttggtcctgtgttttgtcatcttgtgtggctgattgtattctgttcggtctttatttcttttcgttcttctatctttcactgttttctttttcatttcctctcttttcttctttcttgctacctttttagtttattttcttttttattttatttctttccattttatttcttttattcttttattttatttttttttttttttaacttttttttttcctttcatttttcatatatttt

SEQ ID NO: 258370 - DNA, 749 bp, Zea mays
  unsure (1)..(749): unsure at all n locations
gtcgaccagcgtcgccagtcgtcgtccactgacagtcgacacctatagcacctgctcgacagaggtanaggcggaggtgtctgctctcttggggtggacctacctgcacacggatgcgctgggcagcgcagtcatgatctacaactactgaccgaccccaagcgctaccagcaggcctcccgccgagtgctccatgcagagcgcccggttatcctcgccgtccaacaatggncgcgcgcgcgtgtgtgtgcatgggccgctctactgtaccgtcgacgatcgggtcgatcaccggacaaggcaagacaaggcatcgaaacatggtagataaataaaggacttgacgatttgtaacgcagtagctggtgcgtgcgtggtgtggtggtaagaaattcttctgctgtctgtgttcttgtaacctcctcattctcgcccaccctgatggtacatgtaccgtgtacgtagtctgccgtcgggcgctgatcatgctcgacaagtctagtgtctgcattatactcgtcatacccatcaatacaaaagttagtctaatggtgaacacaaagctggagagtaccatggtgagcacaagccaaaagcacaaagaggggttcctagacaaagtcaaggacaagaatcatggtgagcgctgtaccggatccagccttacgaacaataacggcaacaagaataatgagcattggcatgaccatagtcatgacaactggaccagcatttacaacgattaaact

SEQ ID NO: 258371 - DNA, 608 bp, Zea mays
cggacgcgtgggcggacgcgtgggcggtacgcgtggggtccatgctcttttgctcctgcgccgagcttcatggtggacgacatgcccatcagggacttccgcaacctggagagcaagggggtggcgttccccaagagccagccgatgcggctctactccagcctgtggaacaagcggacgactccgcgacgctatgcccggcgcgtcaagacggactggtcccacgcccccttctccgcctcctaccgcgggttcaaggccgacgcttgcgtcgccgtcgcgggcggccggacccgctgcggcgccaccgtcggcaccgagggcaccggcgcccccgcctccgccgccggcgccggggactggtacaaccaggagctggacctcaccctgcagcagcggatgcgctgggtgcagcgcaagtacatgatctacaactactgcaccgaccccaagcgctaccagcagggcctccccgtcgagtgctccatgcagtagcgcccggttattcctcgcccgttcaacaatggcgcgcgcgcgcgtgtgtgtgcatgtggtccgctctactgctaccgctacgacgatcggtgtcgacaccggataaggcaaga

SEQ ID NO: 258372 - DNA, 728 bp, Zea mays
ccggaccgcaaaacccggttcgacccacgcgcacagcaacgctcgctcgacactgtcactagctagttgctctactagagggcgggtatagagctgcctgcaatccgccgctgagaagggaggatcggaagcgacgatgaggtcgtttgctcctgtctttctgtcggcggtcgtggcctggctggagctggcgggcaccgcgcagggcggcaacttctaccaggacacagagatgacctggggcgatggccgcggcaaggtagtggacggcgggcgcgggctggacctgacgctggaccgcacgtccggctccgggttccagtccaagagcgagtacctgttcggcaagatcgacatgcagatcaagctggtgccaggcaactccgtggcacggtcaccaccttctacctgtcgtcccagggcgacgcgcacgacgagatcgacttcgagttcctgggcaacgtgagcggggagccctacacgctgcacaccaacgtgttcacgcgcggacagggccagcgggagcagcagttccgcctctggttcgaccctaccactgccttccacacctactccatcctgtggaacccgcagcacgtgatcttcgcggtggacggcacgcccatgagggacttacgcaacctggcgagcaagggggtggcgttacccaagagccagacgatgcggctctactgcagcctgtggaacgcgtactactggccgaccca

SEQ ID NO: 258373 - DNA, 665 bp, Zea mays
  unsure (1)..(665): unsure at all n locations
gcggccgcccttttttttttttttttttttttttttttttttncaaactggtccttctcccacggactagtaatctgttttgcacacgaaaatcatcgttctgagaccaaccaggttttaacagcagacagtagtttcactagaagtggacaccacatcactttcttatgtaggttaacataggacaggacgcatgactgacgggaagataacacggaatgaacaccctcaacacaaggaacgccccctggcccgatcgtagtgaccaaaccagcgctggttgctaagttcaggcctttcacttcttcagatgggggaagcactggtacacgtctgtcttgggatgcttggcctcggcgtgctcccggcacttcacttcagtcgtggtacacatgaatgtttgcatgcacactttgcactggatgctcatggccttcttgttggtctcgagctggctccccttggcccccttgttcttctccaagttgcgctcgcgggccatcttggacttctggccgttgccaccgcccatggtggatggatccggcgacgatcgacggcaggtacgcgcacctcgcccggcggccggcccgcgccgtccgcgttaggtttgtggttcacaggaaggagcgtgggaatggcagaccagatctctccggtggatc

SEQ ID NO: 258374 - DNA, 563 bp, Zea mays
gcacacgaaaatcatcgttctgaaaccaaccaggttttacaagcagacagtagtttcactagaagtggacaccacatcactttcttatgtaggttaacataggacaggacgcatgactgacgggaagataacacggaatgaacaccctcaacacaaggaacgcccctggccaaaccagcactggttgctaagttcaggcctttcacttcttcagatgggggaagcactggtacacgtctgtcttgggatgcttggcctcggcgtgctcccggcacttcacttcagtcgtggtacacatgaatgtttgcatgcacactttgcactggatgctcatggccttcttgttggtctcgagctggctccccttggcccccgtgttcttgcccaagttgcgctcgcgggccatcttcgagttctggctgttgtcacggcccatggtggatggatcctgcgacgatcgacgccgggtacgtgcacatcgccagtcggctgggccgcgtcattgctcgtttggtttgtgggacacatgatggtggatcggaggcgtttcctgcacgtctttt

SEQ ID NO: 258375 - DNA, 645 bp, Zea mays
gcaaaggaattcttgcgctgggcaggaggcacatactaagacaatgcaaactggcccaactcccacggaccagtaatctgttttggaccacaaaaatcatcgttctgaaaccaaccaggttttaacagcagacagtagtttcactagaagtggacaccacatcgctttcttatgtaggttaacataggacaggacgcatgactgacgggaagataacacggaatgaacaccctcaacacaaggaacgccccctggcccgatcgtagtgaccaaaccaagcgctggttgctaagttcaggcctttcacttcttcagatgggggaagcactggtacacgtctgtcttggaatgcttagcctcggcgtgctcccggcacttcacttcagtcgtggtacacatgaatgtttgcatgcacactttgcactggatgctcatggccttcttgttggtctcgagctggctccccttggcccccttgttcttctccaagttgcgctcgcgggccatcttgaacttctggccgttgccaccgcccatggtggatggatccggcgacgatcgacggcaggtacgcgcacctcgcccggcggccggcaaaaccgctccgcgcccacgaagaccgcccccgcgtccgcccacgcgtcc

SEQ ID NO: 258376 - DNA, 1636 bp, Zea mays
gtcgacccacgcgtccgcccacgcgtccgctcttcaagtgccactcccatccaccacaaggcttggcttggtgggaagaagacaaacgccggcacgcgcacgcagacacgatggcgatctgcagcgcgcacactaccacctccctgcgctccccatgcacgaccgtctcgaacgcaggtctgaggcagaagcaagtcatcttcgtcaccagcaacaggaggagcggcggcggcaggaggcacggaggggcaaggagcttccaggtctcgtgctccgtcgacaagccggtggtgattggcctggcggcagactcagggtgcggcaagagcaccttcatgcgccggctcaccagcgtcttcggtggcgccgcggagccgcccaagggcgggaacccggactccaacacgctcatcagtgacaccacgacagtgatatgcctcgacgactaccattccctggacaggaacggcaggaaggagaaaggtgtgaccgccctcgaccctagggccaacaactttgatctcatgtatgagcaggtgaaggcgatcaaggaaggccaggcagtcgagaagcccatctacaaccatgtcactggcctcctcgaccctccggagcttatcgcgccaccaaagattttcgtcattgaaggtctgcacccaatgttcgatgagcgagtgagggacctcttagatttcagtatctacttggacatcagtgatgaagttaagtttgcatggaaaatccagcgggacatggcagagcgtgggcacagccttgaaagcatcaaggccagtatcgaggccaggaaaccagattttgatgcctttattgatccgcagaagcagtatgctgatgctgtgattgaagttctgccgacccagttgattcccgacgacaacgaaggaaaggtgctgcgtgttaagctcatcatgaaagaaggggtgaagaacttcaacccggtttatctctttgacgaaggatcgaccatcagctgggtgccttgtggaagaaagctcacatgctcttaccctggcatcaaattttcctatggcccggacacttacttcggaaacgaggtatctgttctggagatggatgggcaattcgacagactagatgagctcatctacgtggagagccatctaagcaacctttcaaccaagttctacggagaggtgacacaacaaatgctaaagcatgcagacttcccaggtagcaacaacgggacaggtctcttccagaccatcattggactgaagattagagacctctatgaacagattgttgctgagagggctggtgtaccagcggaagcagcaaaagtttaacgatctatgcattcagatgtcctaaaactacagctctccgaactcaatgggagtaacaaccttcgcatctgttgggatatatggcgagctaggaggtatagaaatgtcattgcagaactcaggaaaacgtgcaatggaatttcttgaaatccctcttgaagagagtgagaactcgatagatcaagaatcaccacacgttgtattaatcgtatggtataatatttatacatgtacaggatgagctatgcaaaaaaaaaaaaaaaaaaaaaaaaaaaaaaaaaaaaaaaaaaaaaaaaaagggcggccgc

SEQ ID NO: 258377 - DNA, 1470 bp, Zea mays
gtcccggcgtctccagccccacttctgccgtgcggataacgaacgactggcgggggctcgggtcagccttcctcctctccgtcgacccacgcgtccgatcgcagtcgcagcaggcaacaaaccaaatcgcttaccgcccccgaagcgtctcggttcgcatagcagagctgctcttgcaacaagccaaacaacccagtggctgctagccgagacaggggatagattgagagagaggcgcgcagatggcgacgccgtcgtcgtcgctttgctccagcttcgcctccctgcggaccgcctccatcggccacccccgtggcatcgcctcctccacgcccaggaaggcattccatgtgagggcatcagctcgggttgacaaattctcaaagagtgacatcatcgtgtccccttcgattctgtctgcaaactttgcgaagcttggtgatcaggtaaaagctgtggaggtggcaggatgcgactggattcatgtcgatgtcatggacgggcgctttgtgccaaacatcacaattggacccttggttgttgatgctctgcgtccagtgactgatcttccgttggatgtacatctgatgattgtggaacctgagcagcgagtccccgattttatcaaggcaggtgctgatattgttagtgtccactgtgaacagacatcgaccatccatttgcaccgaacagtcaatcagattaaaagtctaggagcaaaggcaggagttgttttgaatccagcgactccactcactgcaattgattatgttcttgatgttgttgacctggtgctgattatgtctgtgaatcctgggtttggtggccagagctttatcgagagtcaagtaaagaaaattgcagaactgagaaggttatgtgcagagaagggagtgaacccctggattgaggttgatggtggtgttggtccgaaaaatgcctacaaggttattgaagctggcgcaaatgccattgtcgcaggttctgcagtttttggggctccagactacgctgaagctatcaaaggaataaagaccagccaaagacctctagctgtagccgcataaggagctggacgtgtaatcatttactctgtgcaagtttaccagtgatgcaatctgtatagatgtgtgtcttgtccagccatacgtataccggagatgaaaggagacggaggcagtgaagaaatatccttttttttcttctcatttttcacgaggatgcggtgcactgctcccagaatgctgtgtccaatttacaaacgcacaggtggcacatgaactagcagagtagctttatcttgaaaggaaactgtatttggggtcgatgaaccctctggtgttattcttcagactggtaaacgatgtaacatgtttgataatcaataaagtgcgtcgtatggctttcctaaaaaaaaaaaaaaaaaaaagggcggccgcaaaaaaaaaaaaaaaaaaaaaagggcggccg

SEQ ID NO: 258378 - DNA, 902 bp, Zea mays
tctcactcgtgcgcccacgcgtccgcccacgcgggcggctacgtttgaacccacgcgggggtcaatggctgctagccgagacaggggatagattgagagaggggcgcagatggggacgccgtcgtcgtcgctttgctccagcttcgcctccctggggaccggctgcatcgggcacccccgtgggatcgtctccttcacgcccaggaggggattccatgtgagggcatcacctcgggttgacaaggtctcaaagagggacatcatcgtgtgcccttcgattctggctgcaaactttgcgaagcttggtgatcaggtaaaagctgtggaggtgggaggatgcgactggattcatgttgatgtcatggatgggcgctttgggccaaacatcacaattggacccttggttgttgatgctttggggacagtgactgatcttcccgtggatggacatctgatgattgtggaacctgagcagcgagtccctgattttatcaaggcaggtgctgatgttgttagtgtccactgtgaacaaacatcgaccatccatttgcacagaacagtcaatcaggtaatatctgtaccaccttatatttacaagttaatgctcagataatagtatggaacttcaatgtatttggatataaataccaacgaatgtggcttttaccttcttgcttggtgttgtacaacacaaatggcttcaacgaatattttgcttaaacccttcactgtatttttttcattcaggatttagctaatcatggactattacgtaatgaatgtttttctttgtgtgtgtgtgtgtgtttgtttgttttgtgaggctgaattattactaattactgggctccaacaatagctataggagcacatttgctacttgctagtgttaggcctacaac

SEQ ID NO: 258379 - DNA, 524 bp, Zea mays
  unsure (1)..(524): unsure at all n locations
ccgggctcaaccaacgcgtcaggatgttttgaaccaaccaacccaatcaacggaaattgataacttcctggaggtggttgacctgtggcggataaggtcggtaaacccggggttggggggcaaaaccttaaccaaaagtcaagtaaggaaaattgcagaactgagaaggttatgtgcagagaagggagtgaaccccgggattgaggttgatggtggtgttggtccgaaaaatgcctacaaggttattgaagctggcgcgaatgccatcgtcgctggctctgcagttttcggggctccagactacgctgaagctatcaaaggaatcaagaccagccaaaggcctccagctgtacccgcataaggagctggacgtgtgatcgtgctctgttcaggtttagcagtgttgggattcgtatagatagatgtgtcttgtttcgagccatacgttatactggagatgaaaggagacngaggaaatatttctctacgtgggtgaatcaatcatgtggacggtaatcacatga

SEQ ID NO: 258380 - DNA, 432 bp, Zea mays
cccacgcgtgcgcggacgcgtggtcggacgcgcggccgccctcaccatggtcatgcgcgacgacatggtcaaggtcatctcctggtacgacaacgagtggggctactcgcagacggtcgtcgacctcgctgacatctgcgccaaccagtggaagtgaagcgttgcattgtaatagcactttgtaactcctcaccctccacagggctttgggattcaccccgaaatgactcactttcggtgaaattcacccgtttcggcgaggtcgtccgaatataccggccaaatgtttccattggatttcaattattagtcaactctagagttgaaacaaacatacaagttcttcattcaataatcaatatagaagtgcatatctgtttcctcttcaaaaaaaaaaaaaaaaaaaaaaaaaaaaaaaaaaagggcggccgc

SEQ ID NO: 258381 - DNA, 2024 bp, Zea mays
cccacgcgtccgagatcgcgagcggcctcccttttttttttttttttttttttttcaagatgcaagctaatgtagccataaatgggcaaagataatacagcatttctttggtatacaagtttatccttccgtatgacagaattccagcttatgttggaacacttctaagtttgtgccgcaatcaacactgcacatctcatttaaaaaacgaaggcctaatagatgtagaaattaaactaaaatctgaaagcttcacaaaatgtttgtatccgctcctctagcatttttggtgttgtaaaccacacctctggttaccttaactagaaacaagcaactaacctgtatattaatctgacatcaccaattcacagtcatgcacctgaaagcctgatatagtagtgggtatttcacctatcccaagtcatgtatgaatataataatactcttcctaggaagtgatacctctgcttgtctgattattattaacagtatagttgcccatatagtttgctgatatttctgatttaatatctggatcaacatttccaagatcatgaccaaaaggaggtatatcaacctcagatgagttgaacctccaggtggagtcaccataaatagaactgctgccatatgcacctagattgttcgattcatatgcattggctgatgcagaaaatggctcaccaattgtaccagttgagttgctcctaacatagtttccagaaggcaagccaaagttgttatctccggttccacggccaaggtttcccgatccaaggcttgaaatgttgcccatcccatgagcagaagtaaggcttccccaactaatttcatcaccagaaatacccccaccacttccaggttgaggaaaagaattcatgtttgtagggttgcctgtgtagttaagatttccattgccccaaacatttctagacattgaactcagtattgatcctgaatcatcattaaggccaacataaccaattggactgcctaatctgtttgaactactattgaagtaagaacctatttgccgcccattggagctattggcaaaaccagaacttgcaccaaaatatgcactcattccaccttcagcgctcatgcccattccataacctggaccaaacgaagagaacccattccgtgcacccgtaaggagaccataccttccatccaccctcatgccataaccacccagggggttcgggttgtaaccctggttgaagccatttaggaagttatgaaccctgctcatagcatagttctgccctcccgcaggtgaacgtgcaataggtccaggagactgctcctttggcacagccctcttaacctcgaccattttaccattcagctcatggaagttcttgtgcagtgccttgtccactgcgtcttctgagtcatatgtgatgaaaccaaagcccctgggcctctgcgtgttgtggtcatacatcaccaccacatcggttatcacaccgaattgctcaaagtacctcctgaattcgacctcggtaacatttgaggccagacccccaacgaagatctttctagtgcgtcctggtccaggtgaccctatgctgctgttgttcttgctcgcaatactctggtcgtccctaggaacggccttctttgcttccaccatgcgcccgtcgatcatgtgcttatcgagggtgacgcgttcggcgatcccggaatcggcgaagacgacgaacccgaacccacgggcgcggccggtgttgcggtcccgcatgataacggcctcggtgacctcgccaaagcgaccgaagtacgcgcggaggcgatcctcgtccgtctcccaagagatgccgccgacgaagagcttcccggagtccgcctccatcgtgtccgtcctccccctcccctcctcctcccccggtcggtcggtcggcggcggcggcgaggagggatcagggggcgcccgcgtcggcgtcgcctctcctctcgctgtcccgctaagatctcgatgcgggcatgggagggaggaggtggtgcggacgcgaggg

SEQ ID NO: 258382 - DNA, 499 bp, Zea mays
tttgaatagtaagtcaagcaactgtctagtatacagatgaaatggttaaagagaatagaaacaagcaagctaatgtagccataaatgggcaaagataataatacagcattcccttggtatacaagtttatcctcccgtatgacagaattccagctttatgttggaacacttctaagtatgtgccgcaatcaacactgcacatctcattcaaaaaacaaaaggcctaatagatgtagaaattaaactaaaatgaatgtttgtatcggctcctctagcattttggtgttgtaaaccacacctctggttacctagaaacaagcaactaacctgtatattaatctgacatcaccaattcgcagtcatgcccctgaaagcctgatatagtagtgggtgtttcaccggtcccgtgtcatatatgaatataatagtactctccctaggaagtgatacctctgcttgtctgattgttattaacagtatagttgcccatatagcttgc

SEQ ID NO: 258383 - DNA, 747 bp, Zea mays
  unsure (1)..(747): unsure at all n locations
tagttgcactttatatgaattctgaagtgtcctccaagaaaagtatgtagctaatgcttgtttgattattattaacagtatagttgcccatatagtttgctgatatttctgatttaatatctggatcaacatttccaagatcatgaccaaaaggaggtatatcaacctcagatgagttgaacctccaggtggagtcaccataaatagaactgctgccatatgcacctagattgttcgattcatatggattggctgatgcagaaaatggctcgccaattgtaccagttgagttgctcctcacgtaggttccagaaggcaatccaaagttgttatctccggttccacggccaaggtttcccggtccaaggcttgaaatgttgcccatcccatgaacagaagtaaggtttccccaactaatttcatcattaaggccaacataaccaattggactgcctaatctgtttgaactactattgaagtaagaacctatttgccgcccattggagctattggcaaaaccagtacccacccctccggttgaaacaaacatacaagttcttcattcagtaatcaatatagaagtgcatatctgtttcctcttcatgcctcttgaccaagttttggccanaaattcagtcaaatcttagttaaatctgtttccatctttttttctctctatcacgtgaattgtaataggtttggcctggtaggcctacaactgcagatagtttgcgaagggatttacat

SEQ ID NO: 258384 - DNA, 1733 bp, Zea mays
acgcacaccgccgcccggctcggttcccgtcgacccacgcgtccgatccgatcccacccggcagcggcgctgcgcaatggccacccacgcagctctcgccgcctcccgccggcgtcgtccaggcacggcgtgcagaggctggacttcgccgacttctccgggctcaggccggggtcgtgctccgtgagcgctgccgcgcgggaggcgtccttctccgacgtccttggcgcgcagctcgtcgccaaggccaccggggagaacgccgtgagggcgcccgcagaggcgaactgaaggtggcgatcaacggcttcggccgcatcggccggaacttcctccggtgctggcacggccgcgaggactcgccgatcgacgtcgtcgtcgtgaacgacagcggaggcgtcaggaacgcgtcccacctcctcaagtacgactcgatgctcggcaccttcaaggccgacgtcaagatcgtggacgacactaccatcagcgtcgacggcaagcccatcacggtcgtctccagcagggacccgctcaagctcccatggggtgagctcggcattgacatcgtcatcgagggcaccggagtcttcgtcgacggccccggcgccggcaagcacatccaggccggcgcgaagaaggtgatcatcacggctcccgccaagggcgccgacatcccgacctatgtcgtcggcgtcaacgagggcgactacgaccacagcgtcgccgacatcatcagcaacgcgtcctgcacgaccaactgcctcgcgccattcgtcaagatcttggacgaggagttcggaatcgtcaaggggaccatgacgacgacgcactcgtacaccggcgaccagaggctgctggacgcgtcccaccgcgacctccggcgggcccgcgcggcggcgctgaacatcgtgccgacgagcacgggcgccgccaaggccgtggcgctggtgctgccgcagctgaaggggaagctgaacggcatcgcgctgcgggtgccgaccccgaacgtgtccgtggtggacctggtgatcaacaccgtgaagactggcatcacggccgacgacgtgaacgcggcgttccgcaaggccgccgccggcccgctgcagggcatcctggatgtctgcgacgtgccgctcgtgtccgtcgacttcaggtgctccgacgtgtcctgcaccatcgacgcgtcgctcagcatggtcatgggcgacgacatggtcaaggtcgtcgcctggtacgacaacgagtgggggtacagccaacgcgtggttgatctggcgcacctggtggcggccaagtggcccggcgcggcggcggccggcagcggcgaccctctggaggacttctgcaaggacaaccccgagaccgacgagtgcaaggtgtacgaagcatgaggccagggttctttccacgacgaaacgtacagcacgggcgcgagggttctttccatagagaataatatacagattattcgcccaaagagacgtatgttatatatatatgagttgtatgcagtcaccgaactcggtacaggcttccgctttccatttcctgttgggagtcgtgtagtgtaatcctggggtgtgtatttgtttcatcaaccatgcctgccgatttgaatctcgtttcaccaaaaaaaaaaaaaaaaaaaaaaaaaaaaaaaaaaaaaaaaaaaaaaaaaaaaaaaaaaaaaaaaaaaaaaaaaaaaaaaaaaaaaaaaaaaaaagggcggccgc

SEQ ID NO: 258385 - DNA, 1876 bp, Zea mays
cggatatcgcccgcccgaacgggtggctgcggcgcatgcaatcgccttatccccccggcccgccggcccgcggccacaagcgcaagcagtgaacacggcgcctcctcgctcgcgcggccacgcccccgtcgtcgtcttctcccggcaggtactacagcgcataaatacgcagcaccgccgcccggctcggttcccgtctggccacccatccgatcccacccggcagcggcgctgcgcaatggccacccacgcagctctcgccgcctcccgcatccccgccggcgcccggctgcacagcagggcgccggcgtcgtccaggcacggcgtgcagaggctggacttcgccgacttctccgggctcaggccggggtcgtgctccgtgagcgctgccgcgcgggaggcgtccttctccgacgtccttggcgcgcagctcgtcgccaaggccaccggggagaacgccgtgagggcgcccgcagaggcgaagctgaaggtggcgatcaacggcttcggccgcatcggccggaacttcctccggtgctggcacggccgcgaggactcgccgatcgacgtcgtcgtcgtgaacgacagcggaggcgtcaggaacgcgtcccacctcctcaagtacgactcgatgctcggcaccttcaaggccgacgtcaagatcgtggacgacacgaccatcagcgtcgacggcaagcccatcacggtcgtctccagcagggacccgctcaagctcccatggggtgagctcggcattgacatcgtcatcgagggcaccggagtcttcgtcgacggccccggcgccggcaagcacatccaggccggcgcgaagaaggtgatcatcacggctcccgccaagggcgccgacatcccgacctatgtcgtcggcgtcaacgagggcgactacgaccacagcgtcgccgacatcatcagcaacgcgtcctgcacgaccaactgcctcgcgccattcgtcaagatcttggacgaggagttcggaatcgtgaaggggaccatgacgacgacgcactcgtacaccggcgaccagaggctgctggacgcgtcccaccgcgacctccggcgggcccgcgcggcggcgctgaacatcgtgccgacgagcacgggcgccgccaaggccgtggcgctggtgctgccgcagctcaaggggaagctgaacggcatcgcgctgcgggtgccgaccccgaacgtgtccgtggtggacctggtgatcaacaccgtgaagactggcatcacggccgacgacgtgaacgcggcgttccgcaaggccgccgccggcccgctgcagggcatcctggatgtctgcgacgtgccgctcgtgtccgtcgacttcaggtgctccgacgtgtcctgcaccatcgacgcgtcgctcagcatggtcatgggcgacgacatggtcaaggtcgtcgcctggtacgacaacgagtgggggtacagccaacgcgtggttgatctggcgcacctggtggcggccaagtggcccggcgccgcggcggccggcagcggcgaccctctggaggacttctgcaaggacaaccccgagaccgacgagtgcaaggtgtacgaagcatgaggccagggttctttccacgacgaaacgtacagcacgggcgcgagggttctttccatagagaataatatacagattattcgcccaaagagacgtatgttatatatatgagttgtatgcagtcaccgaactggtacaggcttccgctttccatttcctgttgggagtcgtgtagtgtaatcctggggtgtgtatttgtttcatcaatcatgccagccgatttgaatctcgtttcaaaaaaaaaaaaaaaaaaaaaaaaaaaaaaaaaaaaaaaaaaaaaagggcggccgc

SEQ ID NO: 258386 - DNA, 617 bp, Zea mays
cggacgcgtgggctgcctcgcgccattcgtcaaggtgctcgaccaaaagttcggcatcatcaagggcaccatgaccaccacccacgcctacaccggcgaccagaggctgctggacgcgagccaccgcgacctgcgccgcgcccgcgccgccgcgctcaacatcgtgcccacgtccaccggcgccgccaaggccgtctcgctggtgctccccaacctcaagggcaagctcaacgggatcgcgctccgggtgcccaccccgaacgtctccgtcgtcgacctcgtcgtgcaggtctccaagaagaccctcgccgaggaggtgaaccaggcgttccgcgacgccgcggccaacgagctcacgggcatcctcgaggtctgcgacgtgccgctcgtgtccgtcgacttcaggtgctccgacgtctcctccaccatcgacgcctccctcaccatggtcatgggcgacgacatggtcaaggtcatctcctggttcgacaactagtggggctactcccagagggtcgtccacctcgctgacatctgcgccaacccgtggaagtgaagcgttgcattgtactcgcactttgtacctcctcaccccccacaagggctttgggattcac

SEQ ID NO: 258387 - DNA, 963 bp, Zea mays
accgggaaggaagggtcggatcacgcgtgcgaccgccgaacggactgaccgatagcacgtaatggtcatgaacgacagggggcgcgtaaggagcgcgtgccacctacgcacggacgactcgacgctcgaagcctttacagccgacgtcaggatcgagaacgacacgagcatcagcgttgacagcaagcgcatgacgggcgtcttcagcagggaccctgtcaagctccgatggagtgagctcggcactgacatcgtcatagatggcacccgagtcttcgtcgacggaccccgcgccggcaagcacatccaggccggcgcgaagaacgtgatcatcacggctcccgccaagggcccccacatcccgacctatgtcggcggccgcaacgagggcgactacgaccacagcgtcgcggacatcatcagcaacgcgtcctgcacgaccaactgcctcgcgccattcgtcaagatcttggacgaggagttcggaattgtcaaggggaccatgacgacgacgcactcgtacaccggcgaccctctggaggacttctgcaaggacaaccccgagaccgacgagtgcaaggtgtactaagcatgtcgccacggttctttccacgacggaacgtacagcacgggcgcgagggttctttccatagagaataatatacagattattcgcccaaagagacgtatgttatatatatatgagttgtatgcagtcaccgaactggtacaggcttccgctttccatttcctgttgggagtcgtgtagtgtaatcctggggtgtgtatttgtttcatcaaccatgcctgccgattggaatctcgtttcaccagcatggcagcattatctgatttgggtatacaagtataaacgcaacgagcgatcttgtaaaaagagaaaccgagttgcagagggttaagggtttctctccaagatacatatcttggatagaaaatttcatc

SEQ ID NO: 258388 - DNA, 266 bp, Zea mays
gtatgttatatatatgagttgtatgcagtcaccgaactggtacaggcttccgctttccatttcctgttgggagtcgtgtagtgtaatcctggggtgtgtatttgtttcatcaatcatgccagccgatttgaaacaaatacacaccccagggttctttccacgacgaaacgtacagcacgggcgcgagggttctttccatagagaataatatacagattattcgcccaaagagacgtatgttatatatatgagttgtatgcagtcac

SEQ ID NO: 258389 - DNA, 1794 bp, Zea mays
gtcgacccacgcgtccgcagcggcccagctcacctgagaagacagtacgcacacgccgcatcgtctgcatctccggtggccatccatcctcctcccttctctcgtcgttccctccactcctaggcggaagcggccggcgcagagtggagatcgacccggactttgaaattgcctcttccttttgatgggtaccatgaagaggttggtttcgaccgccctcgccgcgagagggctcctgagatctcacggactgccgaccacaacttcttggcggatccaggattggatcaaaggaagggctataagttaaaacatgtttggcggagccaccagcgtccattttgggggtgagtgtcacgacgacgttctcacaggcctgatgtactagcgtgctgcagcaggcctgccatggtgctgattgcagcaggcgcgaagccaggatccaaaattaggggaaccaaattagattaaggaggttgttagaagcattttttacactatttacatgagaattagctaaaaaaatagcatgtcctatagaaatagggaagcattaggcaggacattgctcccctgtccccctggcttgcagtctgcctcttgcgtcgggcatatgcgcgctgctaactgttagatgtgcattggccgtgcgcgctagctcatgattgcgtcctgtgtggtagcgtggatttgcactgctgaagcatggacgggtccaacgtggatacgcgcgctaccacctagcgtgctggtggcacggatggaggccaaatacatgtgctgaatgacacgatcagaaagaaggttatgtaccaaccagcattccagcaatttatgaactattcatcaccacatggtggtgatcccaatgcaaacacgaactcaactacaacacgaatagctgctgatcctgatacacatcaagatttcgagccaaagagcagaatttcagacatgactttgcatgacgctattgctcaggatatcaaggagaacccagtcttgatctacatgaagggttttcctgagtctccaatgtgtggcttcagtgcactggctgttaaggtcttccagcaatatggcgtccctgtctgtggtagagacattcttggggatcttaagctcaaagagtgtgttaaagcccacactaactggcctacatttccacaaatatttatcaaaggagagtttgttggggggtctgacatcatattaagcttgcaccagaagggtgagcttaaggatcttcttggggatattgcacaaagagacgaacaaaaagtgcatgctcacgattcatgaagcaatcaacagtaggttcttttactatgcgctatctactctgccactaaaatgttctatctcggagtctttaggcgacagcgtacgtgacattgtgaactgtccctacgcattggacatggatgaccggatgtgttcccagaatcaggttgtaggcatctggtattctggaagaggcaaaataatgatctgatacccatatgccgggttctctgtcaatgaataagcgacacttttagcaatagcaatgctgttctttggtgccttgtagtactatggaacttaaattccaggattcgtaggttatgacgttatgttgcattccttttttttaatttaatcgaactgaacttatgataacagataaggctgtaaaatggttatacgcgctgctgcctgctggtgttcaaacgggtggtgtccaacctccgccgccatcagatcaacccgctcccttttaacttttaaaaaaaaaaaaaaaagggcggccgc

SEQ ID NO: 258390 - DNA, 397 bp, Zea mays
cgtccggcgagcacagctgccgcagcgggccagctcacctgagaagacagtacgcacacgccgcatcgtctgcatctccggtggccatccatcctcctcccttctctcgtcgttccctccactcctaggcggaagcggccggcgcagagtggagatcgacccggactttgaaattgcctcttccttttgatgggtaccatgaagaggttggtttcgaccgccctcgccgcgagagggctcctgagatctcacggactgccgaccacaacttctgttatgtaccaaccagcattccagcaatttatgaactattcatcaccacatggtggtgatcccaatgcaaacacgaactcaactacaacacgaatagctgctgatcctgatacacatcaagatt

SEQ ID NO: 258391 - DNA, 753 bp, Zea mays
gtcgacccacgcgtccgcccacgcgtccgatcgaggagcgctgggaggacctcgtcggcgagatgcccgtcaagatatgctacccggccatcgaggggcacgagtggcagatagtcacgggctgcgaccccaagaacacaagcatggagctaccacaacgggggatcttggccagtgctgctgtggctgctcaccgcggcatgcatcaagaccgggaggctgaagatcgctcggcgcgcgatcgacctagccgaggcgaggctcgcgagggacggctggccagagtactacgacggcaagctgggtcgctacatcggcaagcaggcgaggaagctccagacgtggtccatcgcggggtacctagtggccaagatgatggtggaggatccgtcccacctcggcatgatctccctggaggaggagaagccgaccaagccggtgctcaggaggtcggcctcttggacagggtaaggtagtggcggccacaaagacggcagcaggacccgagttctggttctttgagctaacatctcgaatttctctgcaacttcttgctttacggctggggaagtaggcgtgtccaatgttttggtgggtcttccatgtatgaatctttatacgtcccgtcggtgaaataaggaacaacgaaaagatttttcgtgttatttccagggcaaaaaaaaaaaaaaaaaaaaaaaaaaaaaaaaaaaaaaaaaaaaaaaaaaaaaaaaaaaaaaaaaaaagggcggccgc

SEQ ID NO: 258392 - DNA, 1223 bp, Zea mays
cacaaacctcaccccacctatattatcccgtgccccttgtctttcttcctccacaagcagcaactaccaatctagaagcccccctctccctctctctctctctcttcgccgtccgaagctccgcaccccaatctaatcgacacctcaccgagatgggccgcaagttcttcgtcggtggcaactggaaatgcaatggaaccacagatcaggtcgagaagattgtcaaaaccctgaatgaaggacaggttcccccttcagatgttgtggaggtcgttgtcagccctccttatgtcttccttcctgtggtcaagagccagctgcgccaagagttccatgttgctgctcagaactgctgggtgaagaagggaggtgctttcactggtgaagtcagtgctgagatgctcgtcaaccttggtgttccctgggtcattcttggacactctgaaaggagagctctgctgggagaatcaaatgaatttgttggagacaaggttgcgtatgccctgtctcagggactaaaggtcattgcatgtgttggtgagacccttgagcagagggaggctgggtctaccatggatgttgttgctgcacaaacaaaagcaattgctgagaagatcaaggactggagcaacgtagttgttgcctatgaaccagtttgggctattggaactggtaaagttgccaccccagctcaggctcaggaagtgcacgcctccctgagggattggctaaagaccaatgccagccctgaggttgctgaatctactaggatcatctacggaggctctgtaactgctgcgaactgcaaagagctggcagcacagcctgatgtcgatggtttccttgtgggcggtgcttctttgaagcccgagttcatcgacatcatcaacgccgccgccgtgtgaagtccgctgaagatgttccaacccttcaccctgttgcggtgatgtgctgaagacagatcagactatttttttgtttaaccgtgcagtgctatgtaagctactaactttgcgctggtgcggatgctgatttccctccccctagctttttgtgaggctactctacagcttgattcagcttgctaataatgtttgcctctggacatagcgatagtggtgtttgtgtagccttttaaaaaaaaaaaaaaaaaaaaaaaaaaaaaaaaaaaaaaaaaaaaaaaaaaaaaaaaaaaaaaaaaaaaaaaaaaaaagggcggccgc

SEQ ID NO: 258393 - DNA, 1343 bp, Zea mays
cccacgcgtccgcccacgcgtccgttctcttccttcctcttcctctgcaagaagccaaatacaatttagaagcgcccctcctcctctcccccatccgtacccaatctaatcgacacccggccgagatgggccgcaagttcttcgttggtggcaactggaaatgcaatggaaccgcagatcaggttgagaagattgtcaaaaccctgaatgaaggaaatgttccctcttcagatgttgttgaggtcgttgtcagtcctccttatgtgttcctcccggtggtcaagagccagctgcgccaagagttccaagttgctgctcagaactgctgggtgaagaagggaggtgcattcactggtgaaattagtgctgaaatgctcgtcaaccttggcgttccctgggtcattcttggacactctgaaaggagagctctgctgggagaatcaaatgagtttgttggagacaaggttgcttttgctctgtctcagggactaaaggtcattgcatgtgttggtgagacacttgagcagagggaggctgggtctaccatggaggttgttgctgcacaaacaaaagcaattgctgagaagatcaaggactggagcaacgtagttgttgcctatgaaccagtttgggctattggaactggtaaagttgccaccccagctcaggctcaggaagtgcacgcctccctgagggattggctaaagaccaatgccagccctgaggttgctgaatctactaggatcatctacggaggctctgtaactgctgcgaactgcaaagagctagcagcacagcctgatgtcgatggttttcttgtcggtggagcttctttgaagcctgagttcatcgacatcatcaacgcggccaccgtgaagtccgcttaagatgctacgctgaagacgaacatactttttttttgctcaactgtgctatgtaagctagtagcttttgcgcaggagcagagactgttttgcctgcccccaacttctagcttgagcttgctaataatgtttacctctggacgtatcaataatggtgcttatgtatccccttttttttgtgccgaattacggtggatccgtcatctgaaccatgggtttggtgtatgtaattgcgtcacccgatgcctagggtgagactgaagtttttggacatttgggacaaggtagccttgtgccccacattggtcgaatgctgccaaaactgtaccggtcatctgtgctccgtacggattagcctgatctgcgaatgcaacttgtcagctaatcgttgcacggaggcagccagacaattattgtacgatcttcttcggccaggggattgaaatatctattttttac

SEQ ID NO: 258394 - DNA, 1502 bp, Zea mays
ctttagaaggcagacgatggtggcttggggctgaagatccataccagtgcctggcagtatgcatgaatctcactggagctttaagaagctcgtctccagaaacagcaatctcacatattcctgtgcaaccaggatggctcttgtaatggtctgcaacactatgcggcacttggaaaggataagttgggagccattgctgttaacttagtcgctggagaaaagcctgcagatgtttacaccggaatagctagcagggtgatggaaattatgaggatggatgcacaaaaagatccttctgtagaacctgatgcagctcgtgctcgtctgatagttgaccaggtggacagaaaattggtgaagcaaactgtgatgacatctgtgtatggtgtcacatatattggagcacgtgaacaaataagaagaagactaaaggagaggggggtcattcctaatgactccgaactgtttggtgcatcatgctatgctgctaaggttactcttacagaattcggctcgaggtttcaagctgcccgtagtatcatgaactggcttggtgactgtgccaaggtaattgcttgtgaaaatgaaccagtgagatggacgactcctcttgggctcccagttgtacaaccatatcgcaaacttgggaggcatcttattaaaacgtcattgcaggttttgacccttcagcgggagacggataaggttatggtgaagcggcagaggacagctttccctccaaactttgtgcattctcttgatggttctcatatgatgatgactgctgttgcttgcaaaaggcaaggtctgaattttgcaggagttcatgattcatattggacccatgccagtgatgttgatacaatgaataaaatactccgggaaaagtttgtggaactctatgatacacctattctggaaaatctgttggagagctttgagaaatctttccctaaattaaaattcccaccgttgccggagaggggagacttcgatatgaaggaagtccttgagtctacgtattttttcaactagcacaatcaatgttaacagttgcattatacacgctgctgcccggacatatctgagttctgagtgtagatctaccaactcgaatgatgaaagctaggtcatacatgagcataacccgaagagtggctttgcagaagttatcagaagctaagttggtactctgagcattcacaaatgcatcggcatcatttatcgcgttgaagttggcaatgaggtttgctaaataaaagtgggaaccatatcaaagttaaacgagaatccctgtaaatgtaattatgtaattttttttttgtctttagtgtttttattttccttgatcttggtactgtcgagagaaattcggctgaccggtagtttgtcggctggtgctgactagagattatttcatactttgtagtttaacaatataatttagtaataaagtgatatactagtatttttctaaaaaaaaaaaaaaagggcggccgccg

SEQ ID NO: 258395 - DNA, 999 bp, Zea mays
  unsure (1)..(999): unsure at all n locations
taccgtttcggaattccgggttcatgttcaacaacaacaacaacaaccgcagcaccaccaccaacaacaacaacaacagcaccaacaacaacatcaatgtgaaggccaacaacaacatcaccaacaatcacaaggccatgtgcaacaacacgaacagagccatgagcaacaccaaggacagagccatgagcaacaacatcaacaacaattccagggtcatgacaagcagcaacaaccacaacagcctcagcaatatcagcagggccaggaaaaatcacaacagcaacaatgtcattgccaggagcagcaacagactacaaggtgcagctataactactatagcagtagctcaaatctaaaaaattgtcatgaattcctaaggcagcagtgcagccctttggtaatgccttttctccaatcacgtttgatacaaccaagtagctgccaggtattgcagcaacaatgttgtcatgatcttaggcagattgagccacaatacattcaccaagcaatctacaacatggttcaatccataatccaggaggagcaacaacaacaaccatgtgagttatgtggatctcaacaagctactcaaagtgcggtggcaatcttgacagcagcacaatacctaccatcaatgtgcggcttgtaccactcatactaccaaaataatccatgcagcagcaatgacattagtggtgtttgcaattgaagaattgtgtctacctagccgttatactcctataacggtgttaagcaataaagtaccatacattatgatgtttgtactatgatatttgaataagaatactaattgtaattataatgctactaaaaacttgaataacaaaaaaaaaaaaaaaaaaaaaaaaaaaaaaaaaaaaaagaaataaagggaaaaaaaaaaaaaaataaaaaaaaaaaaaaaaaaaaaaaaaaatgggtgttttttttaaaaaaatattttgnttatataaaaagtgtataaaaaaaattaat

SEQ ID NO: 258396 - DNA, 409 bp, Zea mays
acggaccgggaaggaatggccggaccgacccacgcgtacgcagaaacaaatctacaacatggttcaatccataatccaggaggagcaacaacggcaaccatgtgagttatgtggatctcaacaagctactcaaagtgcggtggcaatcttgacagcagcacaatacctaccatcaatgtgcggcttgtaccactcatactaccaaaataatccatgcagcagcaatgacattagtggtgtttgcaattgaagaattgtgtctacctagccgttatactcctataacggtgttaagcaataaagtaccatacattatgatgttaaaaaaagccatagacagaaaaatggctcaaagctaagcaagagatgtaccaatcaacattaaaagagactccgatacatgagtacc

SEQ ID NO: 258397 - DNA, 472 bp, Zea mays
tcaacaagctactcaaagtgcggtggcaatcttgagatccacataactcacatggttgctgttgttgctcctcctggattatggattgaaccatgttgtagattgcatggtgaatgtattgtggcttaatccataatccaggaggagctacaccaccaaccatgtgagtgatgtggatctcagcatgctactcatagtgcggtggcaatcttgacagcagcacaatacctaccatcaatgtgcggcttgtaccactcatactaccaaaataatccatgcgaccagcaatgacattagtggtgttagcaattgaagaattgtgtctacctagccgttatactcatataacggtgttaagcaataaagtaccatacattatgatgtttgtactaaaaaaaagtcaaacaaacaccattaaccaatcgatagcaaaacaatagctgacagaaaaaaacgacgacgacggacgtgc

SEQ ID NO: 258398 - DNA, 539 bp, Zea mays
gaattcggctcgagcatcgtcttcaacgacaactcatacagaagcagcagcagcaacatatgcagaagctactaccacaacgacttcaataccaagagcagctacatttacagcaacagatgacgcaacaaatacaacagcaacaacaatctctataccagcaacatcaacaaatgcagcatcaacagcaactgtggcaacaaatacaacaacagaagcatcagttgcaacacatggatccccaacaacaacagctgttgtctcagatggtgggtacagaattaggcagtgatgatgacacaagggaagattgggtcacaggggctgggccgcatgcctagggaatcagggagggttaatgagggcttacactcactcacttgagggttaagatgtttcctagtgtttgtcgttaaatcattaactgataacttcaaaaaaataaaccagtcatttgtatagttatacggatggggtaacagtttaaataacaccgttatgttatcgaatagctaaaaaaaaaaaaaaagggcggccgc

SEQ ID NO: 258399 - DNA, 977 bp, Zea mays
gaattcggctcgagagaccattagctttatctactccagagcgcagaagaacccgatcgacaccatgagggtgttgctcgttgccctcgctctcctggctctcgctgcgagcgccacctccacgcatacaagcggcggctgcggctgccagccaccgccgccggttcatctaccgccgccggtgcatctgccacctccggttcacctgccacctccggtgcatctcccaccgccggtccacctgccgccgccggtccacctgccaccgccggtccatgtgccgccgccggttcatctgccgccgccaccatgccactaccctactcaaccgccccggcctcagcctcatccccagccacacccatgcccgtgccaacagccgcatccaagcccgtgccagctgcagggaacctgcggcgttggcagcaccccgatcctgggccagtgcgtcgagttcctgaggcatcagtgcagcccgacggcgacgccctactgctcgcctcagtgccagtcgttgcggcagcagtgttgccagcagctcaggcaggtggagccgcagcaccggtaccaggcgatcttcggcttggtcctccagtccatcctgcagcagcagccgcaaagcggccaggtcgcggggctgttggcggcgcagatagcgcagcaactgacggcgatgtgcggcctgcagcagccgactccatgcccctacgctgctgccggcggtgtcccccactgaagaaactatgtgctgtagtatagccgctggctagctagctagttgagtcatttagcggcgatgattgagtaataatgtgtcacgcatcaccatgggtggcagtgtcagtgtgagcaatgacctgaatgaacaattgaaatgaaaagaaaaaagtattgttccaaaaaaaaaaaaaaaaaaaaaaaaaaaaaaaaaaaaaaaaagggcggccgccaataagggaccccgtcaccccgggaat

SEQ ID NO: 258400 - DNA, 1845 bp, Zea mays
  unsure (1)..(1845): unsure at all n locations
cggacgcgtgggctctataatgccgagaaggaagaactttgttttgtcggtaggctttttgtgaaggctctgggaaaaccgtctgaaatattgacaaaactgaatgaaatggctggattttctccaaatgaagaaattgagctatatgaggaaattaagtttgagccaaatgtgatgtgcgaacatattgacaagaaacttactttccgttctagtcagcttgaagatggagacatcatctgtttccaaaaggctcctgttccagatggtgatccacaagtgcgctatccagatgtcccttcattcttggagtatgttcacaataggcaggttgtgcactttcggtctctggacaaaccaaaggatgatgatttttctttggaattgtcaaagcttcatacttatgatgatgttgttgagagagttgcacatcaacttgggttggatgatccatcaaagatacggcttacgtctcacaattgttattctcagcaacctaaaccacagcctattagatataggggggtagcacatctactggatatgcttgtccattataatcagacttctgatatcttgtattatgaggttctggacattccactgccagatttgcagcgtttgaaaacgcttaaagttgcattccaccatgcaacaaaagatgaggtggttgttcatagcataagacttccaagaaacagcaccatcagtgatgtgatcactgatttgaaaaccaaggttgaactatcaaatcctgatactgagctccgcttgcttgaagtattttaccacaagatttataagatctttccacctcatgagaagatagagaacataaatgatcagtactggacattacgagctgaggagatcccagaggaagagaagaatcttggcccacatgatcgattgattcatgtttaccatttcatgaaagaccctaaccagaatcagcagattcagaatttcggagatccttttttgatggttattcgtgaagttgagactgctgcagaggtactggagcgcatccaaagaaaacttagagttccggatgatgagttctccaagtggaagcttgcattcatatccatgaaccggccagagtacctccaggacactgacgttgtatcagcacgttttcagcggagagatgtatatggtgcttgggaacaataccttggcttggagcacaccgatacaacatcgaaacggtcttacacatccaatcagaatcggcacacctatgagaagcccgtaaaaatttataattgagaaaccttcatcaaagttcaatccattgacagaggcctcgacaacagcatgcccaaggtgatacgacgcttcaaacagaaaaattggtatagtatttgcctgtgctgaggcctgcaagcccaccaatgctgcttccaaccttcattgttccaagcaaccaagcatgtgtttggtttttcttcgtcgtgtcgagtatgacggcccctgacagggtaggtgtttgcttagtttgtagagcaaagctagcacataagaaaaaatattttggtaggggtggggggcatgtatacaggattgtagccgatactgattgctgaatttgcacctcttgtagctgtgggaacaatggcagagattgtataatgggtttggtataattctccgtgctgttgagaaacgtacgaggataacccggtcggatagtagagttttgagttccagcctctatgctgtttgttgcaacttgacatccgtatgaagatagtacctgttgccatcttgtaaagaaacatcagccctctaaaatcatgcaacctcaatactgagaccccgtcaaaaaaaatntattta

SEQ ID NO: 258401 - DNA, 851 bp, Zea mays
ccgcccttttttttttttttttaatttggaacaatacttttttcttttcatttcaattgttcattcaggtcattgctcacactgacactgcctcccatggtgatgcgtgacacattattactcaatcatcgccgctaaatgactcaactagctagctagccaccgccgcgtctgcagcaccccgatcctgggccagtgcgtcaagtttctgaggcatcagtgcagcccgacggcgacgccctactgctcgcctcagtgccagtcgttgcggcagcagtgttgccagcagctcaggcaggtggagccgcagcaccggtaccaggcgatcttcggcttggtcctccagtccatcctgcagcagcagccgcaaagcggccaggtcgcggggctgttggcggcgcagatagcgcagcaactgacggcgatgtgcggcctgcagcagccgactccatgcccctacgctgctgccggcggtgtcccccactgaagaaactatgtgctgtagtatagccgctggctagctagctagttgagtcatttagcggcgatgattgagtaataatgtgtcacgcatcaccatgggtggcagtgtcagtgtgagcaatgacctgaatgaacaattgaaatgaaaagaaaaaagtattgttccaaaaaaaaaaaaaaaaaaaaaaaaaaaaaaaaaaaaaaaaaaaaaaaaaaaaaaaaaaaaaaaaaaaaaaaaaaaaagaagaccgggaaaaaaaaaaaaaaaaaaaaaaaaaaaaaaaaaaaaaaaaaaaaaaaaaaaaaaaaaaaaaaaaaataaaaaatataagaaaaaaaaaaaataaaaataaaataaaataaaattt

SEQ ID NO: 258402 - DNA, 671 bp, Zea mays
ggcaataccccactcaaccaccgcagctaagcccgtgccagcagttcggatcctgcggcgtcggcagcgtcggcagcccgttcctgggccagtgcgtcgagttcctgaggcaccagtgcagcccggcggcgacgccctacggctcgccacagtgccaggcgctgcagcagcagtgctgccaccagatcaggcaggtggagccgctgcaccggtaccaggcgacatacggtgtggtcctgcagtccttcctgcagcagcagccgcagggcgagctcgcggcgctgatggcggcccaggtagcgcagcagctgacggcgatgtgcggcctgcagctgcagcagccaggtccctgcccttgcaacgcagctgccggcggtgtctactactgaggaaactatgtactgtagtaataatgtaatggagccgctgactagctacctagctcgctagtttactcatttagcggcgatgagtaacgtagtgtcacccatcaccatgggtggcagtgtgagcaatgacctgaatgaaccattgaaatggaaaggaataatatataaggaaaaaagatgattggaaactgatataaaaaaaaaattatttttcattttttaaatttaatctattttattttagtctttaattattttctttatttttaattatattttatt

SEQ ID NO: 258403 - DNA, 1111 bp, Zea mays
  unsure (1)..(1111): unsure at all n locations
cgcatccaagcccgtgccagctgcagggaacctgcggcgttggcagcaccccgatcctgggccagtgcgtcgagtttctgaggcatcagcgcagcccgacggcgacgccctactgctcgcctcagtgccagtcgttgcggcagcagtgttgccagcagctcaggcaggtggagccgcagcaccggtaccaggcgatcttcggcttggtcctccagtccatcctgcagcagccgactccatgcccatacgctgctgccggcggtgtcccccactgaagaaactatgtgctgtagtatagccgctggctagctagctagctgagtcatttagcggcgatgattgagtaataatgtgtcacgcatcaccatgggtggcagtgtcagtgtgagcaatgacctgaatgaacaattgaaatgaaaagataaaaagtactacatcatgtatccataattatataattggttttaaccatatttattaggttggcctttactatagaacaataccttggcttggaacacaccgatacaacatcgaaaaggtcttacacagacaatcagaatcggcacacctatgagaagcccgtgaaaatttataattgagaaaacttaaagtttcaatcgattgacggaggcctcgacaacaatatgcccaagatgatgaggcttagaacagaaaaattggcagaggaatatagttgctgcctgtgctgaggcctatacaaagcccatgaatgccacgtcaaaccttcagtgttgttactgctgttgtctattggttcttctcgaggctttgcttccaagcaaccaagcatgtgtgttggttttttcatcgtgtctagtatgatggcccctgctaggatagtttgcttaatttgtagagcaaagcgagtacataaaaaaagatttttggtagggggcatgtatacaggattatagccgatactgattgctgccgcttgctgctgtgggaacaatggcagagattgtataatgggtttgttattggttcctaattttcgtgatgttgatcagtgtaaaaggagagccgcgtgcatagaacagttttaagttccaccctagcctgtttgttgcaaaaaaattatnaagaa

SEQ ID NO: 258404 - DNA, 562 bp, Zea mays
cggacgcgtgggtgccacctccggtgcatctcccaccgccggtccacctgccgccgccggtccacctgccaccgccggtccatgtgccgccgcagcaccggtaccaggcgatcttcggcttggtcctccagtccatcctgcagcagcagccgcaaagcggccaggtcgcggggctgttggcggcgcagatagcgcagcaactgacggcgatgtgcgggcctgcagcagccgacgccaggtccctgcccctacgctgctgccggcggcgtcccccactgaagaaactatgtgctgctagtaatagtatagccgctggctagctagctagttgagtcatttagcggcgatgattgagtaataatgtgtcacgcatcaccatgggtggcagggtcagcgtgagcaatgacctgtatgaacaattgggatgaacagaaataataaaccactatacataaagcatacctatggagcataaatagacacaaagcatcaaagacactacaactacaacaacaaggggcggccgatcctagggacccaatcttagctacccgtgcttgca

SEQ ID NO: 258405 - DNA, 446 bp, Zea mays
gcaactacgtttgctagagcaagtgggttggatgcaagcagctgctgttgcaagtaggcggcagggttcaccatggctaggtggctcagtgctggtaggaactgttgttgctgttgcgttgcgatggtttgtattgttagatgtgccaaggattgttgttgcaactgggcaattggttgttgtaagacgctcgccgcaatcgcttgttgtagcctataggcttgcacagctgggtgtccgaagcccactgaagaaactatgtgctgtagtatagccgctggctagctagctagttgagtcatttagcggcgatgattgagtaataatgtgtcacgcatcaccatgggtggcagtgtcagtgtgagcaatgacctgaatgaacaattgcaaatcaaaagaaaaaaagggcggccgctaaaaaaaaaaaagggcggcgctcgcgatct

SEQ ID NO: 258406 - DNA, 560 bp, Zea mays
caataaatcgagcagtagggtgtcgcggtcggtatgctctgatgccaggcgatttgcggcttggtcctccagtccatcctgcagcagcagccgcacagcggccaggtcgcggggctgttggcggcgcagatagcgcagcaactgacggcgatgtgcggcctgcagcagccgactccatgcccctacgctgctgccggcggcgtcccccactgaagagactatgtgctgctagtatagtatagccgctggctagctagctagttgagtcatttagcggcgatgattgagtaataatgtgtcacgcatcaccatgggtggcagtgtcagtgtgagcaatgacctgaatgaacaattgagatgaaatgaacaaaattaatgagaagctgtatcgacagcactgaactgaggctatacatggctgaacttggatgagacctcgcttgaaatgcgaaatgctccgaggtggatacatattaacatccacccataaataaggggcccctatcttgtgatcatgtgactacggatagaggcagtttacctgctgaacaatttttttt

SEQ ID NO: 258407 - DNA, 577 bp, Zea mays
  unsure (1)..(577): unsure at all n locations
cggacgcgtgggcggcgctgatggcggcccaggtagcgcagcagctgacggcgatgtgcggcctgcagctgcagcagccaggtccctgcccttgcaacgcagctgccggcggtgtctactactgaggaaactatgtactgtagtaataatgtaatggagccgctgactagctacctagctcgctagttcactcgtttagcggcgatgagtaacggagtgtcgcccatcaccatgggtggcagggtgagcaatgacctgaatgaaccattgaaatggaaaggaataatatatgggggaaaaagatgattggaaaaaaacaaagaaaaaataaaaaaaaaataaaaaaacaaaaaaataaaaaaaaaatacaaaaaaaaaaaaaaaaaaaaaaaaaaaaaaaaaaaaaaaaaaaataaaaaaaaaagggaaaaaaaaaaaaaaaaaaaaaaaaaaangggggggggcctttaaaaaaaaaaaattttttcttccgggtggggaaaaaaaaaaatttttttttgggggccaaaaaataaaattaatgggggggggtttaaaaacggggggggggggaaaa

SEQ ID NO: 258408 - DNA, 855 bp, Zea mays
ctcgctcactgactgactactgtaataccagagatcgaacaacttggtcctgcagctcaggaggagagttttgtgcatttgggggccgggggcaagagagagagagagagagccatggcggcggaccagcagccgcagctgcaggaggagatgaacgacgccggttcatctgccgccgccaccatgccactaccctactcaaccgccccggcctcagcctcatccccagccacacccatgcccgtgccaacagccgcatccaagcccgtgccagctgcagggaacctgcggcgttggcagcaccccgatcctgggccagtgcgtcgagtttctgaagcatcattgcagcccgacggcgacgccctactgctcgcctcattgccagtcgttgcggcagcagtgttgccagcagctcatgcaggtggagccgcagcaccggtaccaggggattttgggtttggtcctccggtccatcctgcagcagcagccgcaaaagggccaggtctcggggttgttgggggggcaaatagcccaccccctgccggcgatgtggggcctgcagcagccgactccatgcccctacgctgctgcggggggtgtccccccctgaagaaactatgtgttgtagtaaagccgctggctagctagctagttgggtcatttagcggcgatgattgggtaataatgtgtcccgcatccccatgggtggcagtgtcagtgtgagcaatgccctgaatgaccatttggatttggagggggcgccaaaccacaaaaaaaaacccaccaaaaaacccaaaaaaagggggaattaaaaaaaagaaaaaaaagaaaaaaaaaaaaaaaaaaaaagggcgg

SEQ ID NO: 258409 - DNA, 542 bp, Zea mays
  unsure (1)..(542): unsure at all n locations
tgtcacacctcatcgccctcgtaaattacatcgatgccaccctcatcgcagncgtcgccgacgccgccgggaatctggcggacgcagccgcaaagcgccaggtcgcggggctgttggcggcgcagatagcgcacaactgacggcgatgtgcggcctgcagcagccgactccatgcccctacgctgctgccggcggtgtcccccactgaagaaactatgttgctagtatagtatagccgctggctagctagctagttgagtcatttagcggcgatgattgagtaataatgtgtcacgcatcaccatgggtggcagtgtcagtgtgagcaatgacctgaaggaacaaagatataaaaaaaaaaaagggcggtcgctcgcgatctagaactagtccaacgccttcagcacctactgcgaggtcctcgagtccaagatcatcctcgatcggaagacgcagaggtcccgcggcttcggcttcgacaccttctacacggaggaggcgatgcggaacgccatcgacggcatgaacggcatggacctgga

SEQ ID NO: 258410 - DNA, 517 bp, Zea mays
tccatccggcaaaacaaactgcaaaagagccaggtcgcccccctgttgtgggacaaaatacctcagcaactaacggcaatgtgcggcctgcagcagccgactccatgcccgtacggtgctgccggggtgttcccccactgaagaaactatgtgctgtagtatagccactggcgagctagcttagttgagtcatttagcggcgatgattcagtaataatgtgtcacgcatccccctgggtggcagtgtcagtgtgaccaatgacctgaatgaacaattgaaatgaaaagaaaaaagtattgttccaaatttttaaaaaaaaaaaaaaaaaaagggcggccgataaaaaaataaaataaataataaaaaaaaaaataaaaaaaaaaaaaaaaaaaaaagggtaaaaaaataataaaaaataaaaaaaaaataaaaaaggggggccctttttaagggaccaaatttttctacccggtttttgcaagtaaaaattttttttttggggcccccaaaataaaa

SEQ ID NO: 258411 - DNA, 332 bp, Zea mays
gcagcagccgcaaagcgggcaggtcgcggggctgatggcggcgcatatagcgcaccaactgacggggatgtgcggcctgcagcagccgactccatgcccatacgctgctgccggcggtgttccccactgaagaaactatgtgctgtagtatagccgctggctagctagctagttgagccatctagcggcgatgatcgagtaataatgcgtcacgcatcaccatgggtggcacatgtcagtgtgagcaatgacctgaatgaacaattgaaatgaaatgaaaccaaagtactccatctgttcaattgaactctgctgcttatttacagcagcta

SEQ ID NO: 258412 - DNA, 492 bp, Zea mays
gcggcagcaatgttgccagcagttcaggcatgttgagccccagcaccggtaccaggcgatcttgggcttgttcctccagtccatcctgcagcagctgccgcaaagcggacaggtatcggtgaatgacacggcatgtatagcgcactatctgacggcgatttgcattattaactaatttcttatatgaccctacgctgttgccagcggataataataaatgaaaaaactatgtgcatgtcattatacccgctggctagctcgctagttgagtcatctaccggcgatgattgagtgacaatgtgtcacgcatcaccatgggcggcagtgtcagtgtgagcaatgacctgaatgaacaattgaactgaaaagaaaaaagtattgttccataagatagaagataatccccctttcaacaagattgcgtcataaataaaaaggcctataacgaacttgattttcaaaaaatgtggaagtcttgtatgaaaaataaga

SEQ ID NO: 258413 - DNA, 603 bp, Zea mays
cgccaacagccccgcgacctggccgctttgcggctgttgctgcaggatggactggaggaccaacccgaagatcgcctggtaccggtgctgcggctccccctgcctgagctgctggcaacactgctgccgcaacgactggcactgaggcgaccagtagggggtccccgtcggggtgcaatgatgcctcagaaactcgacgccctggcccaggatcggggtgctgtagtatagccgctggctagctagctagttgagtcatttagcggcgatgattgagtaataatgtgtcacgcatcaccatgggtggcagtgtcagtgtgagcaatgacctgaatgaacaattgaaatgaaaagaaaaaagtattgttcccaaaaaaaaaaaaaaaaaaaaaaaaaggggaaccgctcgcaaaaaaaaaaaaaaaaaaaaaaaaaggaaaaaattaaaaaaaaaaaaaaaaaaaaaaaaaaaaaaaaaaaaaaaaaaaaaaaaaatttaaaaaaaaataaaaaaaataaaaaaaaaaaataaaaaaaaataaaaaaaaaaaaaaaaaataaaaaaaaaaaaaaggggggcccctttaaaggaaccaattttaa

SEQ ID NO: 258414 - DNA, 484 bp, Zea mays
gccacccatggcgatgtgcggcctgcagcagccgactccatgcccctacgctgctgccggcggtgtccccgactgaagaaactatgtgctgtagtatagccgctggctagctagctagttgagtcatttagcggcgatgattgagtaataatgtgtcacgcatcaccatgggtggcagtgtcagtgtgagcaatgacctgaatgaacaatactaaaaaaagtactccatctgttcatttcaattgttcattcaggtcattgctcacactgacactgccacccatggtgatgcgtgacacattattactcaatcatcaccatgggtggcagtgtcagtgtgagcaatgacctgaatgaacaattgaaatgaaaagaaaaaaagtactccatctgttccaaattagaattggttttaaccttttaataggtttatacaataagaactagaaagacgtcgttgatccgttccacataccgtcgttct

SEQ ID NO: 258415 - DNA, 523 bp, Zea mays
cgcacgcgtccggaaatggaaaggaataatatataaggaaaaaagatgattggaaagtatgtactgtagtaataatgtaatggagccgctggctagctacctagctcgctagtttactcatttagcggcgatgagtaacgtagtgtcacccatcaccatgggtggcagtgtgagcaatgacctgaatgaaccattgaaatggaaaggaataatatataaggaaaaaagatgattggaaactgataaaattaataatttaaattataataaataaataaaaaaaaaaaaaaaaaaaaaaaaaaaaaaaaaaaaaaattaaaaaaaaaaaaaaaaacggggggccgttttaggggaccaaagtttacttccgcgggattgcaacgtaatagtttttttttggggcccccaaatttaaattaatgggccgggttttaaaaacgtcggaattggaaaaacctggggttacccaaattaaatggcttggaagaaaatccccttttgccaagttggctaataaccaaaa

SEQ ID NO: 258416 - DNA, 449 bp, Zea mays
cgtaggggcatggagtcggctgctgcaggccgcacatcgccgtcagttgctgcgctgctgccggcggtgtcccccactgaagaaactatgtgctgtagtatagccgctggctagctagctagttgagtcatttagcggcgatgattgagtaataatgtgtcacgcatcaccatgggtggcagtgtcagtgtgagcaatgacctgaatgaacaattgaaatgaaaagaaagaaataaaaaaaaaaaaaaaaaaaaaaaaaagaaaaagaaaaaaataaaaaaaaaataaaaaaaaagaactaaaaataaaaaagaaagagtgaaaagagcaagaaaaagaaagatagtaagctaataatgaaaaaataaaaaagggggggggccctttttaaggagccaatttttatttcgcgggtttggagaaaaataactttttttttggggcccaaa

SEQ ID NO: 258417 - DNA, 342 bp, Zea mays
gtcagtgtgagcaatgacactgccacccatggtgatgcgtgactcattaggtctcacgcatcaccatgggtggcagtgtcagtgtgagcaatgacctgaatgaacaattgaaatgaaaagaaaaaagtattgttccaaattaaaaaaaaaaaaaaaaaaaaaaaaaaaaaaaaaaaaaaaaaaaaaaaaaaaaaaaaaaaaaaaaaaaaaaaaaaaaaaaaaaaaaaaaaaaaaaaagaaaaaaaaaaaaaaaaaaaaaaaaaaaaaaaaaaaaattgggggggcctttttagggtaccaattttatcttcgggggtttttaacctttttattttttttttg

SEQ ID NO: 258418 - DNA, 335 bp, Zea mays
cgattattactcaatcatcgccgctaatatgactcaactagctagctagccggcggcgatactacagcacatagcttcttcagtgggggacaccgccagctagctagctagttgagtcatttaacggggatgattgagtaataatgtgtcacgcatcaccatgggtggcagtgtcagtgtgagcaatgacctgaatgaacaattgaaatgaaaagaaaaaagtattgttccaaaaaaaataacaacacctaaaaaataactcataaattccaaaatactattctaataatataaaacaccatttagtgacaaaaagcaaaatcatttttattttt

SEQ ID NO: 258419 - DNA, 1297 bp, Zea mays
gtcgacccacgcgtccgcattccctcactcccttccttctttcctcctcttctactcacttttcccactccaagcccagcccatggagattgacctggatggggcaggccacctggctctcacctctaggtccccatactcctatgatctgagtcagagccatgtcttctccctggaatgagttgaggccactgtgttccttccgcttggagctattttccaggcttctgctgggggcctgggacaactgctcccacctcctgacacccttctcccactctcctaggcattctggacctctgggttgggatcaggggtaggaatggaaaggatggagcatcaacagcagggtgggcttgtggggcctgggaggggcaatcctcaaatgcggggtgggggcagcacaggagggcggcctccttctgagctcctgtcccctgctacacctattatcccagctgctagattcagggaaagtgggacagcttgtaggggaggggctcctttccataaatccttgatgattgacaacacccatttttccttttgccgaccccaagagttttgggagttgtagttaatcatcaagagaatttggggcttccaagttgttcgggccaaggacctgagacctgaagggttgactttacccatttgggtgggagtgttgagcatctgtccccctttagatctctgaagccacaaataggatgcttgggaagactcctagctgtcctttttcctctccacacagtgctcaaggccagcttatagtcatatatatcacccagacataaaggaaaagacacattttttaggaaatgtttttaataaaagaaaattacaaaaaaaaattttaaagacccctaaccctttgtgtgctctccattctgctccttccccatcgttgcccccatttctgaggtgcactgggaggctccccttctatttggggcttgatgactttctttttgtagctggggctttgatgttccttccagtgtcatttctcatccacataccctgacctggccccctcagtgttgtcaccagatctgatttgtaacccactgagaggacagagagaaataagtgccctctcccaccctcttcctactggtctctctatgcctctctacagtctcgtctcttttaccctggcccctctcccttgggctctgatgaaaaattgctgactgtagctttggaagtttagctctgagaaccgtagatgatttcagttctaggaaaataaaacccgttgattactaaaaaaaaaaaaaaaaagggcggccgc

SEQ ID NO: 258420 - DNA, 1313 bp, Zea mays
gtcgacccacgcgtccggggaactgagaagtgtatatggggcccaagctactggtgccagaacacagagacagcagcccagtgcaatgctgtcgagcattgcaaacgccatgtgtggaactaggaggaggaatattccatcttggcagaaaccacagcattggtttttttctacttgtgtgtctgggggaatgaacgcacagatctgtttgactttgttataaaaatagggctcccccacctcccccatttctgtgtcctttattgtagcattgctgtctgcaagggagcccctagcccctggcagacatagctgcttcagtgccccttttctctctgctagatggatgttgatgcactggaggtcttttagcctgcccttgcatggcgcctgctggaggaggagagagctctgctggcatgagccacagtttcttgactggaggccatcaaccctcttggttgaggccttgttctgagccctgacatgtgcttgggcactggtgggcctgggcttctgaggtggcctcctgccctgatcagggaccctccccgctttcctgggcctctcagttgaacaaagcagcaaaacaaaggcagttttatatgaaagattagaagcctggaataatcaggctttttaaatgatgtaattcccactgtaatagcatagggattttggaagcagctgctggtggcttgggacatcagtggggccaagggttctctgtccctggttcaactgtgatttggctttcccgtgtctttcctggtgatgccttgtttggggttctgtgggtttgggtgggaagagggccatctgcctgaatgtaacctgctagctctccgaaggccctgcgggcctggcttgtgtgagcgtgtggacagtggtggccgcgctgtgcctgctcgtgttgcctacatgtccctggctgttgaggcgctgcttcagcctgcacccctcccttgtctcatagatgctccttttgaccttttcaaataaatatggatggcgagctcctaggcctctggcttcctggtagagggcggcatgccgaagggtctgctgggtgtggattggatgctggggtgtgggggttggaagctgtctgtggcccacttgggcacccacgcttctgtccacttctggttgccaggagacagcaagcaaagccagcaggacatgaagttgctattaaatggacttcgtgatttttgttttgcactaaagtttctgtgatttaacaataaaattctgttagccagaaaaaaaaaaaaaaaaaaaaaaaaaaaaaaaaaaaaaagggcggccgc

SEQ ID NO: 258421 - DNA, 1533 bp, Zea mays
ctgccggttccgttttgcccgggcgaattcggctcgagaagaagcaaagcaagtgtctgctcactcagtcctgcgcaagagctcgctctcggagaaaaaaacgcgggaggcgataatggagggaggtgccggtgcgagcgagaaagggaaggtgctggtcacgggggcgtcgggcttcgtcggctcctggctcgtcatgaagctcctccaggccggctacaccgtccgggcgaccgtgcgcgatcccgcgaacgttgggaagacgaagccattgatggaccttcccggagcaacggagcgcctgtccatatggaaagccgacctggcggaggaaggcagcttccacgacgccatcaggggctgcaccggcgtcttccacgtcgccacgcccatggacttcctgtccaaagaccctgagaatgaggtaatcaagccgacggtggaagggatgataagcatcatgcgggcatgcaaggaggccggcaccgtgcggcgcatcgtcttcacttcctccgccgggacggtcaacctggaggagcggcagaggcccgtctacgacgaggaaagctggaccgacgtcgacttctgccgtcgcgtcaagatgaccggatggatgtacttcgtgtctaaaaccctggcggagaaggcggccctggcgtacgcggcggagcacggcctggacctggtcaccatcatcccgacgctcgtggtcggcccgttcatcagcgcgtccatgccgcccagcctcatcaccgcgctggcgctcatcacggggaacgcgccccactactcgatcctcaagcaggtgcagctcatccacctcgacgacctctgcgacgccgagatcttcctcttcgagaacccggccgcggccgggcgctacgtctgctcctcgcacgacgtcaccatccacggcctcgccgccatgctcagggataggtaccccgagtacgacgtcccgcagaggttccccgggatccaggacgacctccagccggtgcgcttctcgtccaagaagctccaggacctcgggttcaccttcaggtacaagacgctggaggacatgttcgacgccgccatccggacttgccaggagaagggcctcatccccctcgccactgccgccggaggggacggctttgcctcggtgcgcgcacccggcgagacggaggcgacgattggcgcttaagcaacaatcacccggctctccccgtcgatgatgctatcagctatctatctcttcgagctccgctgccaatacggaacttacttccatgttcaacgaattgttttatcccctggattacgtattgtttttatgttttatacccaaacaacgaatgtttctcagtattttactacagctagcccctatagtagagattctattatatgaataagctatctgtagaggctctggtgcaatatatatttcgagttatttggattaataaaaaaaaaaaaaaaaaaaaaaaaaaaaaaaaaaaaaaaaaaaaaaaaaaaaaaaaaaaaaaaaaaaaaaaaagcggccgc

SEQ ID NO: 258422 - DNA, 582 bp, Zea mays
tcgtctcacgcgtccgcccacgcgtccgcccacgcgtcctgtttagcaagtgtctgctcactcagtcctgcgcaagagctcgctctcggagaaaaaaacgcgggaggcgataatggagggaggtgccggtgcgagcgagaaagggaaggtgctggtcacgggggcgtcgggcttcgtcggctcctggctcgtcatgaagctcctccaggccggctacaccgtccgggcgaccgtgcgcgatcccgcgaacgttgggaagacgaagccattgatggaccttcccggagcaacggagcgcctgtccatatggaaagccgacctggcggaggaaggcagcttccacgacgccatcaggggctgcaccggcgtcttccacgtcgccacgcccatggacttcctgtccaaagaccctgaggtagatcagtctctagctctggctgcacaattaattagtctctcgatctctacgtcttcactgcacatgcactgcacacatatactacatacgtatggtttccattgcagaatgaggtaatcaagccgacggtggagggatgataagcatcatgcgggcatgcaagg

SEQ ID NO: 258423 - DNA, 1161 bp, Zea mays
cccacgcgtccgcccacgcgtccgagcaaagcaagtgtctgctcactcagtcctgcgcaagagctcgctctcggagaaaaaaacgcgggaggcgtcttccacgtcgccacgcccatggacttcctgtccaaagaccctgagaatgaggtaatcaagccgacggtggaagggatgataagcatcatgcgggcatgcaaggaggccggcaccgtgcggcgcatcgtcttcacttcctccgccgggacggtcaacctggaggagcggcagaggcccgtctacgacgaggaaagctggaccgacgtcgacttctgccgtcgcgtcaagatgaccggatggatgtacttcgtgtctaaaacctcggcggagaaggcggccctggcgtacgcggcggagcacggcctggacctggtcaccatcatcccgacgctcgtggtcggcccgttcatcagcgcgtccatgccgcccagcctcattaccgcgctggcgctcatcacggggaacgcgccccactactcgatcctcaagcaggtgcagctcattcacctgggcggcctctgtttcgcctagatctttctcttcgagaacccggccgtggtcggtcgctacgtttgttccttgcacgacgtttttattcacggtccttccgctatgcgtattggttgtttccccggggtacgattttttgattggtttcccatttaaatctattgttttttatacgaaccatttttttttatttgcatttttttcttttaataatctacttttatttttttaacctttttttcacttttggttcttctctttttttttttctttctgcgttaattatttattaattttattacccaatttttatattttggttttgttttacgtacttttgctattttccattagtatatgttttatttatatctttttcctttattaaatattttcttggtgtttttatagtttcaattatttttttatattttatccttgttggtttcatcttatttctttaactctatgacttatttaatttctcttttattttaatcttttttttatttattctactattcaatcaaatttattttattttttttttttcatcttttttcttttatttatttattttatctccatcttttttttttatttctcattttgttt

SEQ ID NO: 258424 - DNA, 581 bp, Zea mays
ggttccccgggatccaggacgacctccagccggtgcgcttctcgtccaagaagctccaggacctcgggttcaccttcaggtacaagacgctggaggacatgttcgacgccgccatccggacttgccaggagaagggcctcatccccctcgccactgccgccggaggggacggctttgcctcggtgcgcgcacccggcgagacggaggcgacgattggcgcttaggcaacgatcccccggctctccccgtcgatatgatgcaatcagctatctatctcttgtttgccaaaaaaaataagggaggtcttggcatactcgatctagagcgctttgcaagagcgttaaggcttagatgactatggctacgatggacgaatagagacaaagcatggactgggttgcaattaccttgtgataaagcagatgtcgatctatttaatgcatctacgattgtaacaattggtgatggctgatttctggagatcaaactggattcagggtcaggccccaaagaacattgtgccgcccttattcatggaagcaaagaggcaaaatatctcagtgtgccaagcccttcccacc

SEQ ID NO: 258425 - DNA, 414 bp, Zea mays
cactgccgccggaggggacggctttgcctcggtgcgcgcccccggcgagacggaggcgacgattggcgcttaagcaacaatcacccggctctccccgtcgatgatgctatcagctatctatctcttcgagctccgctgccaatacggaacttacttccatgttcaacgaattgttttatcccctggattacgtattgtttttatgttttatacccaaacaccgaatgtttctcagtattttactacagctagcccctatagtagagattctattatatgaataagctatctgtagaggctctggtgcaatatatatttcgagttatttggattgctagcataattcaatttttaacgactatgattattattcacttaaaaaaaacaaaaaaaaaaaaaaaagggcggccaaac

SEQ ID NO: 258426 - DNA, 1011 bp, Zea mays
gaattcggctcgagtgatcagtgaaattctttgacatctagccgagaatttttgtttggttatcgataattcactctcattcatgtgagatattgtgctctgcttatttattgatagctgacactggtcacccaggagcacgagattagcgcgttgatgtacttagtactgtgaaatcaaactggaggaggctgcaattctgcattacacctacaaaaaattctcaaacctaacctcaagaagggatagatgtggctgcaaaccaactaaagaagatgtgaagcaatgttttatcttggaatttgaccgtttggtaccgggaacatgttgcatggaccgatagagacaccaacttgaaacttttaaggaaggatgtattaacacatatatatgtgcccatggcattcatcggtggcctcaaggaatccgacgtctatcaatgcaataacatcagcgaaagcacaataaaaaacaaagtcatcaaacatgggtctcggaaacaaggaccacatccggctaaactgaactgctggtcagtccaaattggaaggcggtcacgggaaggtgcaggtaagcgtcagaaagatcctagaaatggttgatgcctaggaaggagcagcgatgccgccaatgtcgcccccaggttttcttgagctggctgaaagcaccactgccttttcatgacattatgtgaggcattgtttgagtattgactgaggttggtttaaccatgcgtgatacatgcagccttgagcatacagataatataggcttgtttgttcttcctgtggttgtttatgatgtatccagtgagtcactcaacaactttggcgaaagcccagatgttttcttgcaatttttgaaaaatattccgcgcccaaaaaaaaaaaaaaaaaaaaaaaaaaaaaaaaaaaaaaaaaaaaaaaaaaaaaaaaaaaaaaaaaaaaaaaaaaaaaaaaaaaaaaaaaagggcggccgcaaaaaaaaaaaaaaaaaaaaaagggcggccgc

SEQ ID NO: 258427 - DNA, 1686 bp, Zea mays
ttgaaatttatcatgggctccaggaaggcaactaacaattctttggatcaggagcaagctacaaagcctgccaatggcgccccagcaactccagaagcaaatggtaaagctcctgccccagattccagtccaaatgctgcagtttaccgtcagaacaaggtcaacacagagaccaaaagttctagccctgtggaacaagccactgcatcaaaaatggataaggacagattaacacagaaggaaggacctggaattgctagttcttccccaggttctgtcaagagaaaaacaactattcttggtcaaaagaataaaagattacggatggataatgaggaatcaatggagttgaagataacatgggaggaagctcaagaattgcttcgccctcctcctaaggccccatccattgttattgttgatggccatgagtttgaggaatatgaggagccaccggtacttggaaggaagacttattttgtagcagataaatcaggttcgaaccatcaatgggcccaatgtgaagattgttccaaatggaggaaacttccaatagatgctctgttgccctccaaatggacctgctctgacaacaaatgggatccagagaggtgttcttgcgaatctgcacaggaaataagtatagaggagcttgcagaattcattcctataaaacctggaaaaaagcccagattgaagatagaattcggctcgaggctatcgatgcttcagatgggctggacacgcttgcaaaccttgcgattcttggtgaaggtgaagctctcccttcacagccaacaacaaaacatccccgccatcgtccgggctgctcatgcatcgtctgcatccaaccaccaagcgggaagggtccaaagcacaagcaaacttgcacctgtaacgtttgtatgacggttcgccgccgtttcaggacactcatgcttcgacgcgagaagaaggcgacaaaggatctgtctcgcaagaaagagacgggccaatccagtgagaaggccacacaacaagctgtgtccggacctccaggagccaatgccactgcaaccagatctgcccagaaagcagatggaaacaccgatggacctgaagacatggccgtcgatcacaaggtgacaacatcctctcccgtcaagaaccatattgacctgaacatccaacctgaacgggacgatgagcagtcaccgaaatctggtgcggctggtttgttgagccgagacaatgcaacttagagagtggatagcgtggattgattgatcataccataccaatgagtggacatagataaccgatcgaacatatccttccgaatgtctatacccttgtttttttttttagatagatgtggcgtgaggcgtggggccttgtagtgtagctgttaccttcccataccatagagccggtttccttttaccctgagactccagtggtaatgttatcgtgtataccatagggcaggacacccgtaggtgttgcgtggggacttgcataaccatgtatattgcaagaccagctcgtttcggctgaatgtgaaccgtaagttgctactgtacccctgcacatatttcccccgagttggcaggaattgttacattacattcgtaggatgaatgagctttgtcttaaaaaaaaaaaaaaaaaaaaaaaaaaaaaaaaaaaaaaaaaaagggcggccgc

SEQ ID NO: 258428 - DNA, 503 bp, Zea mays
gacggttcgccgccgttttaggacactcatcgttcgacgcgaaaagaaggtgacaagagattcctctcgcaagaaagagacgggccaatccagtgagaaggtcacacaacaagccgtgtccggtccgccaggagccaatggcagtgcaaccagcttccccccagaaagcagatggaaatgctgatgcgcccgaagacatggccgtcgatcacaaggtgacatcctctcccgtcaagaaccacattgacctgaacattcaacctgaacgggacgacgagcagtcaccaaaatctggtgcggctggtttgttgagccgagaccatccaacttagacattgtttggttatttatatcccatataaattggatagaattgtaaaacattacgaaagattttgatttatttggaatttaaaccccctcaattccccccaatccgcatggattacaagcaaaacgaacaagcagcccttagagagtggatcgcgtggattgcttgttcc

SEQ ID NO: 258429 - DNA, 536 bp, Zea mays
gaattcggctcgagatggaaagctgaggataaagtttcggtggagggatagactttggattggggaccctgctgatattgttcttgatgatgtccacttattgacggaggcttctaatggctttgctttttgttcataggcttgtggtattcttttgataccatatctgatatattgcacccatccattttgcagcatttcaaatttagcaaaatcttaacctgcagtggacttgcaagttgcacataactatcatcgcatcggcatgctggcagggtgtatttcttgttgataaccggggaatgagaagacagcgatagtgaaatactcctagagctggtaaccaccacctagtttttttcttctttggtctacatgtataattatgccgcctgacacctttttgggtttcagtgtatcatatataccagtgtacaggttcggacctgaacattaatttaattgatagtggtcttgtatgtttaaaaaaaaaaaaaaaaaaaaaaaaaaaaaaaaaaagaaaaaaaaaaaaaaga

SEQ ID NO: 258430 - DNA, 626 bp, Zea mays
cagaacttcactgatgaaataaacatgatgttgcactgggtaggcatgtccttcttcggctcgctcgactaccaacgcggtgcttaccacgtgagtcgtgcaagagatatacaacagcaaatcttcagctggctgagttgacgtggctcgccgtggcggtttcagcactggtggtgtcgtcaagaattttttcagtgcatctagggcttcctgtgcttctgaagtccactgaaacttatccaccttcttgagtagcttataaaatggtaagcctttttctcccagcctggatatgaatctgctcagggctgccatgcatccggtaagtctctgaactttcttttgtgatcgtggtggcgatggcggtcgtgttgtgttcttggtctagtgttgtctgtgttgtctttatcggtgctgttttctgtggtggttgtgctgcatcgttctagtttctagttcatgtgctgtaatatctcgctgctgtaatcaatggaatggcctcgtttccaggctcaagataaaaaaaaaaaaaaaaaaaaaaaaaaaaaaaaaaaaaaaaaaaaaaaaaaaaaaaaaaaaaaaaaaaaaaaaaaaaaaaaaaaaaaaaaaaaaaaaagggcggccgc

SEQ ID NO: 258431 - DNA, 672 bp, Zea mays
gactagttctagatcgcacaaatcctcttcctcgagttctcctcaaccaaattcaaagtcacagcggcgaaactctcggcgatgtctggccgcggcaagggcgggaagggtctgggcaagggcggcgccaagcgccaccgcaaggtgctgcgtgacaacatccagggcatcaccaagccggcgatccgcaggttggcgaggaggggcggcgtcaagcgcatctccgggctcatctacgaggagacccgcggcgtgctcaagatcttcctcgagaacgtcatccgcgacgccgtcacctacaccgagcacgcccgccgcaagactgtgaccgccatggacgttgtctacgctctcaagcgccagggccgcaccctctacggtttcggcggttaggtcgcccctctcccggtggcgaattacgtggtggcggtggcggtcgtgttgtgttcttggtctagttagtctgtgttgtctttatcggtgctgttttctgtggtggttgtactgcatcgttctagtttctagtccatgtgctgtaatatctcgctgctgtaatcaatggaatgtcctcgtttcaagcctcatgacatatcgctcttttgtaaacctgcaagaattccgtgcactacgcatctgtttcgttgtgcaagagctcagatctgcttttgagcc

SEQ ID NO: 258432 - DNA, 443 bp, Zea mays
taccggtccggaattgccgggtcgacgcacgcgtccgcccacgcgttcggcggcaaggctctgggcaacggcggcgccaagcgccaccggggggcggggcgtgacaacatggaggggcatcaccaagccggcgatccgcacgttggcgaggaggggccgcgtcaagcgcatctccgggctcatctacgaggagacccgcggcgtgctcaagatcttcctcgagaacgtcatccgcgacgccgtcacctacaccgagcacgcccgccgcaagactgtgaccgccatggacgttgtctacgctctcaagcgccagggccgcaccctctacggtttcggcggttaggtcgcccctctcccggtggcgaattacgtggtgccggtggcggtcgtgttgtgttcctggtctagttagtctgtgttgcctttatcggggctgttttctg

SEQ ID NO: 258433 - DNA, 536 bp, Zea mays
cctcgagttcttctcaaccaaattcaaagtcacagcggcgaaactctcggcgatgtctggccgcggcaagggcgggaagggtctggtcaagcgcatctccgggctcatctacgaggagacccgcggcgtgctcaagatcttcctcgagaacgtcatccgcgacgccgtcacctacaccgagcacgcccgccgcaagactgtcaccgccatggacgttgtctacgcgctcaagcgccagggccgcaccctctacggtttcggcggctaggtcgccctctctcccggtggcgaattacgtggtggcgaagggcggcggggtggggtcttgggctaagggtggccggggtggctttattcgcgccggtttctggggtgggtgggctggaatcgtctatagttctatagtaaggcgcgtgaatatctcgttggtgaaaacaatggaatggcctcgtttccaggctcaagatatatcgcgcttttgtatactgcggagaaatgtgcaaaaaaaaaaaaactcccgtgaaaaggggctcccc

SEQ ID NO: 258434 - DNA, 740 bp, Zea mays
gaattcggctcgagagtttctgcagcagaacaaattttcagtgctggtggaaagaggttaagaccagcattagtttttctggtatcgagagcaactgctgaattagctgctttgccggagctaactacagaacatcggcgcttggctgagatcatagagatgattcatactgcaagtctaatacatgatgatgtcatagacgatagcgggatgcgaagagggaaagaaacaatccaccagctgtacggcacacgggtggctgtgctcgctggcgattttatgttcgcgcagtcttcttggttcctagcaaacctagaaaacattgaagtcatcaagctcatcagccaggtaattaaggatttcgcgagcggcgagataaagcaagcgtcgacgcttttcgactgcgacgtgaccctggacgactatctgctgaagagctactacaagacggcctccctgatcgcggcgagcacgaggtccgccgccatcttcagcggcgtgggcagcggcgtgtgcgagcagatgtacgagtacgggcggaacctgggtctggcattccaggtggtggacgacatcctggacctgacgcagtcggcggagcagctcgggaagccggcggcggggagcgaccttgccaagggcaacctgacggcgcccgtgatcctggcgctgcgggaggagccccggctgcggggcatcatcgagtccgagttctgcgagcccgggtccctggcggccgc

SEQ ID NO: 258435 - DNA, 1045 bp, Zea mays
aaaaggatggcgagaataaaaacagaattcccgggtcgacccacgcgtccgacgacatctgcttgagaaggcaatggccgatgccacagtacaggtgtataaacgagggtggccctgcccatgccaaaagatttgtttatgcggtaagggtaaatacatctgacagtggatggactgacgagtgcattggagagccaatgccgagtgtgaaaaaggccaaggactctgcagctgttcttctgctcgagctgctgaatcgaaattaccgtggcaagcctgatggaaaataatctttggtgatgttctgtggtggtaggtagacgtggaagcatccatcattctgattatacccccatgcagtgcttttcagcaaagcaaattaatggcctttgttgatgttcttggtggcggtattggtgatatggaggcattcaatgcaagcataagcagagctatggggagtgggattagaggattattattagttttgtctgaggtgactactaggtattttactggcgaggtactgaggtcacaactcacaaatagcagttgcaaattgcaatagaggaaatgatgataggttgatataggatattggaggcctcttattcatcgattgtataagatgtttacagaacagtgcattgatccattaaatttatattgattgatatttttatagtggatgcgcctgcagctgggaactcggggttctctatcttggcctcgccgaccaaatatcacgtacgtcgacgtccgcgaacagtatatatatggtaggcttggcgggcgtgatccccttgcgcatggtacagagcaagacgctgagctggatattctgataatcccgtatactccaacagaaactacagaatggaatcaagttgtacctgcgtttctgctgctcaaaaattgcgagatggaccatggacgtgtgttgtttggcaacaacgacgcaaccagcacggacaagaaggggggacatgcagtctctcgaaacctgtcctatacaattagaaaaaaaaaaaaaaagggcggccgc

SEQ ID NO: 258436 - DNA, 974 bp, Zea mays
cacagttcccatataggcagccatcggctacacagaattcccgggtcgacccacgcgtccgcggacgcgtgggagttgcggaggcaggaagagagacgacggcggccatggcgacctccttccaggggacgaccaccaagtgcaccgcctgcgacaagacggtgtaccttgtggacaagctcaccgccgacaaccgcatctaccacaaggcctgcttccgctgccaccactgcaagggcaccctcaagctcgccaactacaactccttcgagggagtgctctactgcaggcctcacttcgaccagctgttcaagaggacagggagcttggacaagagcttcgaaggaactcccaaggttgtcaagccagaaagaaacgttgggaatgagaatgctactaaagtctcaagcgcctttgctggcaccagagagaaatgtgttggatgcagcaagacagtctatccaactgagagggtcactgttaataacactatgtaccacaagagctgcttcaagtgctgccatggagggtgcaccatcagcccttctaactacattgcgcacgaggggaagctgtactgcaagcaccaccacatccagctgatcaaggagaaggggaacttcagccagcttgagaatgaccacgagaagacatcacaggctgggtcactggaggaggatgaacaagagtattgatcactgagcacaaccacagatgaataatgaatcctcttgcatttgcctagagcactatgtatttctgtggcgtggttcgatttcagttttaccaatggaggtcatgtgtgttcagagaacaatgatattgttgtcttgtatctgcatgtaaacgttgttatctttgagtcagatactctacctggtttaaagggcggccgcggtcagaagatgcctctgcacctacaagacagaactgtaagctcttggtccatcttttgtccaaaatgatgtttggct

SEQ ID NO: 258437 - DNA, 667 bp, Zea mays
ccgacccccacctccacctcgtatgctctctctctccttcccatggctgatggctgatgcctgacacggtgacacccccaacattctccctcactggctagctgtgtcctgcctacctagcggtatcaatacccggctgcagctcaccaccaccaccaaccaaccaacccacagttcccatataggcagccatcggctacacagcctcgcctccgtaagcagagtgtgtcgttgcggaggcaggaagagagacgacggcggccatggcgacctccttccaggggacgaccaccaagtgcaccgcctgcgacaagacggtgtaccttgtggacaagctcaccgccgacaaccgcatctaccacaaggcctgcttccgctgccaccactgcaagggcaccctcaagctcgccaactacaactccttcgagggagtgctctactgcaggcctcacttcgaccagctgttcaagaggacagggagcttggacaagagcttcgaaggtatcaatcgttttccccccttccctttgcagtacgaaatagatccagtggtgttcttgcgtgtctcctcacctacaaatggcttcaggaactccgaaggttgtcaagccagaaagaaacgttgggaatgaggtatatgcaacgccttaatattcatgtgtttatg

SEQ ID NO: 258438 - DNA, 439 bp, Zea mays
ttggatgcagcaagacagtctatccaactgagagggtaagattctgtgttcaaccatctcaatcattcttccggtagtttgagccttcttcacttgacaaccggttaagcatccaggtcactgttaacaacactatgtaccacaagagctgcttacaagtgctgccatggagggtgcaccatcagcccttctaactacattgcgcacgaggggaagctgtactgcaagcaccaccacatccagctgatcaaggagaaggggaacttcagccagcttgagaatgaccacgagaagacatcacaggctgggtcacaatggaggtcatgtgtgttcagagaacaatgatattgttgtcttgtatctgcatgtaaacgttgttatctttgagtcagatactctacctggtttcaccattttcattggtcagaagatgcctctg

SEQ ID NO: 258439 - DNA, 586 bp, Zea mays
  unsure (1)..(586): unsure at all n locations
tctcagttggatagactgtcttgcgtgagagggtcactgttaataacactatgtgccagaagagctgtttgaagtgctgccatggagggtgcaccatcagcccttctaactacagcttcccctcgtgcgcaatgtagttagaagggctggtggtgcaagcaccaccacatccagctgatcaaggagaaggggaacttcagccagcttgagaatgaccacgagaagacatcacaggctgggtcactggaggacgatgaacaagagtattgatcactgagcacaaccacagatgtataatgaatcctcttgcatttgcctagagcactatgtatttctgcggcgtggttcgatttcagttttaccaatggaggtcatgtgtgttcagagaacaatgatattgttgtcttgtatctgcatgtaaacgttgttatctttgagtcagatactctacctggtttcaccaannnaaaaaaaaaaaaaaactaaaaaaaaaaaaaaaaaacaaaaaaaaaaaaaaaaaaaacaccaaaaaaaaaaacaaaaaaaaaaaaaaaaaaaaaaaaggggcggccgttttaaaggatcc

SEQ ID NO: 258440 - DNA, 2119 bp, Zea mays
gtcgacccacgcgtccgcttttggtttgactcggtcatgcccggaagtctcggtgtcgagtccatgttccagctcgtcgaggccatcgccgcccacgaggatctcgctggcaagcacggcattgccaaccccacctttgtgcacgccccgggcaagatcagctggaagtaccgcggccagctcacgcccaagagcaagaagatggactcggaggtccacatcgtgtccgtggacgcccacgacggcgttgtcgacctcgtcgccgacggcttcctctgggccgacagcctccgcgtctactcggtgagcaacattcgcgtgcgcatcgcctccggtgaggcccctgccgccgcctcctccgccgcctctgtgggctcctcggcttcgtccgtcgagcgcacgcgctcgagccccgctgtcgcctccggcccggcccagaccatcgacctcaagcagctcaagaccgagctcctcgagctcgatgccccgctctacctctcgcaggacccgaccagcggccagctcaagaagcacaccgacgtggcctccggccaggccaccatcgtgcagccctgcacgctcggcgacctcggtgaccgctccttcatggagacccgccccgcccgccccccgctgtacacgggcgccatggccaagggcattgcctcggcggacctcgtcatcgccgccggcaagcgcaagatcctcggctcctttggcgccggcggcctccccatgcaccacgtgcgcgccgccctcgagaagatccaggccgccctgcctcagggcccctacgccgtcaacctcatccactcgccttttgacagcaacctcgagaagggcaacgtcgatctcttcctcgagaagggcgtcactgtggtggaggcctcggcattcatgaccctcaccccgcaggtcgtgcgctaccgcgccgccggcctctcgcgcaacgccgacggttcggtcaacatccgcaaccgcatcatcggcaaggtctcgcgcaccgagctcgccgagatgttcatccgcccggccccggagcacctcctcgagaagctcatcgcctcgggcgagatcacccaggagcaggccgagctcgcgcgccgcgttcccgtcgccgacgatatcgctgtcgaggctgactcgggcggccacaccgacaaccgccccatccacgtcatcctcccgctcatcatcaacctccgcaaccgcctgcaccgcgagtgcggctaccccgcgcacctccgcgtccgcgttggcgccggcggtggcgtcggctgcccgcaggccgccgccgccgcgctcaccatgggcgccgccttcatcgtcaccggcactgtcaaccaggtcgccaagcagtccggcacctgcgacaacgtgcgcaagcagctctcgcaggccacctactcggatatctgcatggccccggccgccgacatgttcgaggagggcgtcaagctccaggtcctcaagaagggaaccatgttcccctcgcgcgccaacaagctctacgagctcttttgcaagtacgactccttcgactccatgcctcctgccgagctcgagcgcatcgagaagcgtatcttcaagcgcgcactccaggaggtctgggaggagaccaaggacttttacattaacggtctcaagaacccggagaagatccagcgcgccgagcacgaccccaagctcaagatgtcgctctgcttccgctggtaccttggtcttgccagccgctgggccaacatgggcgccccggaccgcgtcatggactaccaggtctggtgtggcccggccattggcgccttcaacgacttcatcaagggcacctacctcgaccccgctgtctccaacgagtacccctgtgtcgtccagatcaacctgcaaatcctccgtggtgcctgctacctgcgccgtctcaacgccctgcgcaacgacccgcgcattgacctcgagaccgaggatgctgcctttgtctacgagcccaccaacgcgctctaagaaagtgaaccttgtcctaacccgacagcgaatggcgggagggggcgggctaaaagatcgtattacatagtatttttcccctactctttgtgaaaaaaaaaaaaaaaagggcggccgccgc

SEQ ID NO: 258441 - DNA, 1246 bp, Zea mays
gaattcggctcgagaatattttgagcattcaaaaacacacaaagggaagtgcactagcaacttcctaacaacaatggctaccaagatattagccctccttgcgctcctttccctttcagtgagcgcaacaactgcattcattattccacaatgctcacttgctcctaatgccattattccacagttcctcccatcagttacatcaatgggcatcgaacaccctattgtgcaagcctataggctacaacaagcgcttgcggcgagcgtcttacaacaaccgtttgcccaattacaacaacaatccttggcacatctaaccatacaaaccatcgcaacgcaacagaacaacagtttctaccagcactgagccacctagccgtggtgaaccctgtcgcctacttgcaacagcagctgcttgcatccaacccacttgctctggcaaacgtagttgcaaaccagcaacaacaacagctgcaacagtttctgccagcgctcagtcaactagccatggtgaaccctgccgcctacctacaacagcaacaactgctttcatctagcccgctcgctgtgggcaatgcacctacatacctgcaacaacaattgctgcaacagattgtaccagctctgactcagctagctgtggcaaaccctgctgcctacttgcaacagctgcttccattcaaccaactgactgtgtcgaactctgctgcgtacctacaacagcgacaacagttacttaatccactagcagtggctaacccattggtcgctgccttcctacagcagcaacaattgctgccatacaaccagttctctttgatgaaccctgtcttgtcgaggcagcaacccatcgttggaggtgccatcttttagattacatatgagatgtactcgataatggtgccctcataccggcatgtgtttcctagaaataatcaatatattgattgagatttatctcgataaaaaaaaaaaaaaaaaaaaaaaaataaaaaaaaaaaaaaaaaaaaaaaaaaaaaaaaaaacaaaaaaacaaaaaaaaaaaaaaaaaaagggcggccgcaaaaaaaaaaaaggggcggccgtttaaggggtcccaagttaacttacccttccttccaagttattaccttttaaatggggtcacctaattcaaattcagggcccgatgtttaacaacttcgtacctggaaaacccctggcgttcccaaatttaatccctttgaatcacatccccttttcgcca

SEQ ID NO: 258442 - DNA, 1522 bp, Zea mays
tagcgtgtccgcccttttttttttttttttttttttaacaccgcagaaatgttgagtctttattattaggtatagatataagattctattcattgcaaataattacaatttcaccgcacacttggcggtacttgacagataaggaaacacaaatggcaatatagtgttacggaacagcatgggaattcataaacagttcagcacaagcacacaaggcatgagtcaggggggcacacatcttcaaccatagtagattacagtaagtatgtgattacgtttcatccacagtgataaaatcacggctgcgaacaagattcaaagggacagctacgccggccatgtgggttgttgacccagcgatgcgcaagctggaagttgccacaacagcaaagactcatggaatgaactgaatctagacaagatgagggccaataaacggctgggagtcttcaagtttggcaagcacgcacgccccgaaacaatgtttcctcctccggttcttcaatcatattggctctgtcaatggtttcttctctatatgttgttgtcggatgagtctgttgaaggtgagctgcttcccgataaatctgcagggcgcgatgtcgttcgggtgttgtacgatctgcagtggctgcacttgtggccaatcacgtgaaagttcacctctgagaccttgttgcaatcgttgcaaagcacccaaatcttgtagcgatacacaagaggcatgatcgtggcttcgatctcttgatccaacatttcccaatgatgtgtcaaatcaagagctgttttagagcatattggacaagtgtatttgttatgcgccaccatttcttcaaaacatgtcaagtgcattgtgtgtccacagttcagaactcttgttccttgtaatgagtcaaatagatactcataacagattgggcaattctgcctcattgagttctccacacactgatggttatcacggagtataacagaatagcaggacccacacttcacacagtggaagaagttttccttgccaccaaccctgcatatgccacaatcgatgcaatggtactgccctttgtctgtatcatcatcataaaatttgcatatatcacaaaagtactctcccatattgactccacagcttatgcacacttgtgacaccggctgttttgtttcacagagtaggcaaactactttttcaacatcctgacgacatattgtatgccgatctccggaagccgtagcctcgttgtggcagtggcggcaggggaacacctggttgcagcacggtgccacgatcttgcacctccgccggtaatgctcgcacccgtgcttcatcttgcccacgtcacggcggtccacctctccgtcgcgggccgcgtctacttccgcgacgtcgttgtcgccggggaattgcgctccccccatccccggcggcggcggcgacggcggagaggagggtggcagcgatgtaaataacgagggcgataaggggcgtcctgacacaaaatgtcattggtccatcccggaagag

SEQ ID NO: 258443 - DNA, 952 bp, Zea mays
ggaagcggacgcctgcaggaccggccggaacgcccgattgataccaactagcaacatacatagtgaagtacactagcaacatcttagcaccaatgggagccaagatttttgccctccttgccctccttgctctttcagcaagcgctgctacctcgacttttattccacaatgctcacaacaatacctctctccggcgacagccgtgggatttcaatacccaactatacaatcctacatggtacaagaggccatccaagcaagcatcttacggtcattagcattaaccctccaacaaccatatgctctattgcaacagccatccttagtgcatctgtatctccaaagaatcgcggcacaacaactacaacaacagttgctaccaacaatcaatcaagtagttgcagcgaaccttgctgcttacctccagcaacaacagtttcttccattcaatcaactagatggggtgaaccctgctatctacttgcaggcacaacagctactaccatttaaccaacttgtcgggagcccttatgccttcttactgcaacaacagcttctaccattccatctgcaagctgtggcaaacattgctgctttcttgagacaacaacatttgttgccattttacccacaggttgtgggaaacattaatgccttcttgcaacagcaacaattgctaccattctacccacagaatgtggcaaacattgttgccttcttacaacaacaacaattgttgccatttagccaacatgctttgacgaatcctaccaccttattgcaaccgcccaccattggtggtgccatcttctagattttttatgatttatactgtaataataaagttctcatgctgatatgtgcgacctctcagtaataaagtattagagatctatattttaaaaaaaaaaattaagaaagcttatacgctacaacaagcaatatggtcgg

SEQ ID NO: 258444 - DNA, 1087 bp, Zea mays
ccggtccgattgcggagcgtccgccaccgtcgccaccgtcgccaccgtattgataccaactagcaacatacatagtgaagtacactagcaacatcttagcaccaatggcagccaagatttttgccatccttgccctccttgctctttcagcaagcgttgctaccgcgactattattccacaatgctcacaacaatacctctctccggtgacagccgcgagatttgaatacccaactatacaatcctacaggctacaagaggccatcgcagcaagcatcttacggtcgttagcattgaccgtccaacaaccatatgccctattgcaacaaccatccttagtgaatctatatctccaaagaatcgcagcacaacaactacaacaacagttgcttccaacaatcaatcaagtagttgcagcgaaccttgctgcttacctccagcaacaacaatttcttccattcaatcaactagctggggtgaaccctgctgcttacttgcaggcacaacagctactaccattcaaccaacttgtcaggagccctgctgccttcttactgcagcaacagttgctgccattccatctacaagttgtggcaaacattgctgctttcttgcaacaacaacaattgctgccattttacccacaggttgtgggaaacattaacgccttcttgcaacagcaacagttgctaccattctacccacaggatgtggcaaacaatgtcgccttcttacaacaacaacaattgctgccatttaaccaacttgctttgacgaatcctaccaccttattgcagcagcccaccattggtggtgccatcttctagatttttttatgctttatactgtaataataaagttctcatactgatatgtgcaacttctcagtaataaaagattagagatctatattttaagttcaaaaaaaaaaaaaaaaataaaaaaaaatcaaagtaaaaaaaaaaaacaataaaaaaaataacaaaaaaaaactaaaaaaaataaaaaaaaattactttaggaaaaaaaaaaaaggggtgcccttttaagaggaccaagttttataacccgggctttgcaacgtaaa

SEQ ID NO: 258445 - DNA, 948 bp, Zea mays
tgttagatgtgccttgttttgttgttgcttttggtcttttgttttttttttttaatttaaaatatagatctctaatcttttattactgagaagttgcacatatcagtatgagaaatttattattacagtataaagcataaaaaatctagaagatggtaccaccaatggtgggctgatgcaataaggtggtaggattcgtcaaagcgagttggctaaatggcagcaattgctgttgttgtaagaaggcgacaatgtttgccacatcctgtgggtagaatggcagcaattgttgttgttgcaagaaggcgttaatgtttcccacaacctgtgggtaaaatggcagcaattgttgttgttgcaagaaagcagcaatgtttgcaacaacttgtagacggaatggcagcaactgttgctgcaataagatggcagcagggctcccgacaagttggttgaatggtagtagctgttgtgcctgcaagtaagcagcagggttcaccccagctagttgattgaatggaagaaattgttgttgctgaaggtaagcagcaaggttcgctgcaactacttgattaattgttggaagcaaccgttgttgtagttgttgtgctgtgattctttggagatacagattcactaaggatggttgttgcaatagggcatatggttgttggacggtcaatgctaacgaccgtaagatgcttgctgtgatggcctcttgtagcctgtaggattgtatagatgggtattcaaatctcgcggctatcactggagagaggtattgttgtgagcattgtggaataatagtcgcggtagcaacacttgctgaaagagcaaggagggcaaggagcgcaaaaatcttggctgccattggtgctaagatgttgctagtgtacttcactatgtatgttggtagttggtataaataatacgcgtgagcgctcgcgtccg

SEQ ID NO: 258446 - DNA, 1307 bp, Zea mays
  unsure (1)..(1307): unsure at all n locations
cgtctcnngcgaagcgcacctangtcaacgactcttaaccaacctaatggctnnntccaagacnnattatcccgtcgcttggcgcgttnncttgcccnntttttgtnngagtgcannnacaaatgcngnnttcattannttccacaatnngctcacttnngctccganngtgccattattnnncacagttcctccctttccagttacccttcaatggnngcttcgaaccacccnnagctgtgcaagcctatannggctacaacaagcgcttgcggcgagccgtcttagaacaaccaattgcccaattacaacaacaatccttggcacatctaaccatacaaaccatcgcaacgcagcagcaacaagcactgagccacctagccgtggtgaaccctatcgcctacttgcaacaacagctgcttgcatccaacccacttgctttggcaaacgtagctgcataccagcaacaacaacaacaacaacaacaacaacaacagctacaacagtttctgccaacgctcagtcaactagccatggtgaaccctgccgcctacgtacaacaacaacaactgctttcatctagcccgctcgctgtggccaatgcaccttcatacctgcaacaacaattgttgcaacagactgtaccagctctgactcagctagttgtggcaaaccctgctgcctacttgcaacagctgcttccattcaaccaactgactatgtcgaactctgctgcgtacctacaacagcgacaacagttacttaatccactagcagtggctaacccattggtcgctgccttcctacagcagcaacaattgctgccatacaaccagttctctttgataaaccctgtcttgtcgaggcagcaacccatcggtggaggtgccatcttttagattacatatgagatgtactcgataatggtgccctcattccggcgtgtgttgcctagaaataatcaatatattgattgagatttatctcgataaaaaaaaaaaaaaaaaaaaaaaaataaaaaaaaaaaaaaaaaaaaaaacaaaaaaaaaaccaaaaaaaaatcagaaaaaaccgaaaaaaaaaaaacaaaataaaaagggggcccttttaaaagaaccaaacttacctgccgcgtccttccaagccaaaacctttcttatggtggaacctaaatacaatcaatggccggcggttaaaaaagctgggagtgggaaaaccccgcccttccccaaaataaacggctttgaaaaaaacccccttttcccaacatgtgtaaaaccaaaaaggcccccacccaacccccttcc

SEQ ID NO: 258447 - DNA, 605 bp, Zea mays
tcgcccacgcgtcctgtactcaatgtcaccatcaacatcaccacccatttttctcctagtgtgaaatctgctaccaccatacaggttttgggagaaatgggtggtgatgttgatggtgccattgcttccgtgacacctattcctcctatacatccaactgtctatgatgaatcctgtcttgtcgtggcagctacccatcgttggaggtgccatcttttagatgacatatgagatgcactcgataatggtgccctcataccggcatgtgtttcctagaaataatcaatatattgattgagatttatctcgatatacaaaaaaaaaaaaaaaaaaaaaaaaaaaaaaaaaatttaaaaaaaggaaaaaaaaaaaaaaaaaaaaaaaaaaaaaaaaaaaaaaaaaaaaaaaaaaaaaaaaaaaaaaaaaaagaaaaaaaacggggcggccgttttaaagaaccaaagtttacgtccccgggcttgcaaaggtaataagtttttttatagggccacctaaattaaattaattggccgcggttttaaaacgtggtaactggaaaaacccggggtttaccaaattaattggcctggaaaaaaaaccccctt

SEQ ID NO: 258448 - DNA, 983 bp, Zea mays
aataggaatttttttttctgtttaatttttgactatttttttttaatcgagataaatctcaatcaatatattgattatttttaggaaacacatgccgctatgagggcaccattatcgagtacatctcatatgtaatctaaaagatggcaccaccaacgatgggttgctgccacgacaaggcagggttcatcaaagagaactggttgtatggcagcaattgttgctgctgtaggaaggcagcgaccaatgggttagccaccgctagtggattaagtaactgttgtcgctgttgtaggtacgcagcagagttcgacacagtcagttggttgaatggaagtagttgttgcaagtaggcagcagggtttgccacagctagctgagtaagagctggtacaatttgttgcagcaactgttgttgcaacaactgttgttgcaggtatgtaggtgcattgcccatagcgagcgggctagatgaaagaagttgttgctgttgtaggtaggcgatagggttcaccatggctagttgactgagcgctggcagaaactgttgcagctgttgttgtggccaatgcacctacatacctgcaacaacaattgttgcaacagattgtaccagctctgactcagctagttgtggcaaaccctgctgcctacttgcaacagctgcttccattcaaccaactgactatgtcgaactctgctgcgtacctacaacagcgacaacagttacttaatccactagcagtggctaacccattggtcgctgccttcctacagcagcaacaattgctgccatacaaccagttctctttgataaaccctgtcttgtcgaggcagcaacccatcgttggaggtgccatcttttagattacatatgagatgtactcgataatggtgccctcattccggcatgtgtttcctaaaaaaaatcatatattggatggaaattatttcaatatatttttgggcaaaaaaaaaggaaa

SEQ ID NO: 258449 - DNA, 551 bp, Zea mays
ggcgaacgtagctgcataccagcaacaacaacagctgcaacagtttatgccagtgctcagtcaacgagccatggtgaaccctgccgtctacctacaactactttcatctagcccgctcgcggtgggcaatgcacctacgtacctacaacaacagttgctgcaacaaattgtaccagctctgactcagctagctgtggcaaaccctgctgcctacttacaacagttgcttccattcaaccaactggctgtgtcaaactctgctgcgtacctacaacagcgacaacagttacttaatccattggcagtggctaacccattggtcgctaccttcctgcagcagcaacaacaattgctgccatacaaccagttctctttgatgaaccctgccttgcagcaacccatcgttggaggtgccatcttttagattacatatgagatgtactcgacaatggtgccctcataccgacatgtgtttcctagaaataatcaatatattgattgagatttatctcgatatatttctgaactatgttcatcatataaataattga

SEQ ID NO: 258450 - DNA, 770 bp, Zea mays
tctagatcgcgagcggccgcccgcgatctataacagcctactctcagcaacaacaattcgtgaccagcactgagccacctagccatggtgaaccctgccgcctacttgcaacagcagttgcttgcatcaaacccacttgctctggcaaacgtagttgcaaaccagccacaacgacagctgcaacagtttctgccagcgctcagtcaactagccatggtgaaccctgccgcctacctacaacagcaacaactgctttcatctagcccgctcgctgtggccaatgcacctacatacctgcatcaacaattgttgccacagattgcaccagctctgactcacctagttgtggcaaaccctgctgcctacttgcaacagctgcttccattcaaccaactgactatgtcgaactctgctgcgtacctacaacagcgaccacagttacttaatccactagcagtgcctaacccattggtcactgccttcctacagcagcaacaattgctaccatacagccagttctctttgatgaaccctgccttgtcgtggcaacaacccatcgttggaggtgccatcttttagattacatatgagatgtaatcgataatggtgccctcataccggcatgtgtttcctagaaataatcaatatattgattgacatttatctcgatatatttttgaactatgttcatcatataaataattgaaaacatcaaatcgtaattataaactcatgctgggtcaatacatagacaatacaatattacttct

SEQ ID NO: 258451 - DNA, 687 bp, Zea mays
acgcggccgccgacgcgtccgggcacatctaaccatacaaaccatcgcaacacaacagcgagaacggttcctaccagcactgagccaactagatgtggtgaaccctgtcgcctacttgcaacagcaggtgcttgcatccaacccacttgctctggcaaacgtagctgcataccaacaacaacaacaattgcaacagtttctgccagcgctcagtcaactagccatggtgaaccctgctgcctacttgcaacagctgcttacattcaaccaactgactgtgtcgaactctgctgcgtacctacaacagcgacaacagttacttaatccactagcagtgcctaacccattggtcactgccttactacagcagcaacaattgctgccatacaaccggttctctttgatgaatcctgtcttgtcgaggcagcaacccatcgttggaggtgccatcttttagattacatatgagatgtactcgataatggtgccctcataccggcatgtgtttcctagaaataatcaatatattggttgagatttatctcgaaaacaaaacaaaaaaaagaaaagaaaaaaaaaacaacaaaaaaataacaaaaatgagccacctaaacaaaaaaaaaattttgacgactttttataaaaagaaaatgcatacaataaaacccattattttttgccaaaatt

SEQ ID NO: 258452 - DNA, 517 bp, Zea mays
gggttaggcattggtagtggattaagtagctgttgtcgctgttgtaggtacgcagcagagttcgacacagtcagttggttgaatggaagcagctgttgcaagtaggcagcagggtttgccacagctagctgagtcagagctggtacaatctgttgcagcaattgttgttgcaggtatgtaggtgcattacccattggtcactgccttcctacagcagcaacaattgctaccatacagccagttctctttgatgaaccctgccttgtcgtggcagcaacccatcgttggaggtgccatcttttagattacatatgagatgtaatcgataagatggtgcgccctcacaccggcatgtgtttcgctagaaataatcaatatattgattgagatttatcttgataaaaaaaaaaaaaaaaaaaaaaaaacaaaaaagggcggccaatataaaagaaccaaagctaacaaacaaatgcatgcaacgtcataactaatatataagaggcgcctaaattcaatt

SEQ ID NO: 258453 - DNA, 442 bp, Zea mays
aagtcaagcacaagcaacacaaggcataagtcagggggcacacatcttcagccatagtagattacagtaagtatgtgattacgtttcacccacagtgataaaaatcacggctgcgaacaagattcaaagggctacgccggccatgtgggttgttgacccagcgatgcgcaagctggaagttgccacaacaatccttggcacatctaacaatacaaaccatcgcaacgcaacagcaacaacaattcctaccagcactgagccacctagccatggtgaaccctgccgcctacttgcaacagcagttgcttgcatcaaacccacttgctctggcaaacgtagttgcaaaccagccacaacaacagctgcaacagtttctgccagcgctcagtcaactagccatggtgaaccctgccgcccacctacaacagcgagcgggctacga

SEQ ID NO: 258454 - DNA, 589 bp, Zea mays
  unsure (1)..(589): unsure at all n locations
accggnactgaatgcccggaccgacgcacgcgtacctagcaacatacatagtgaagtacactagcaacatcttagcaccaatgggagccaagatttttgccctccttgccctccttgctctttcagcaagcgctgctacctcgacttttattccacaatgctcacaacaatacctctctccggcgacagccgtgggatttcaatacccaactatacaatcctacatggtacaagaggccatccaagcaagcatcttacggtcattagcattaaccctccaacaaccatatgctctattgcaacagccatccttagtgcatctgtatctccaaagatccctgccgcctacgtacaacaacaacaactgctttcatctagcccgctcgctgtgggcaatgcacctacatacctgcaacaacaattgttgcaacagattgtaccagctctgactcaactagctgtggcaaaccctgttgcctacttgcaacagctgcttccattcaaccaactgactctgtcgaactctgctgcgtacctacaacagcgacaacagtttaggccaacgctcagtcaactagccatggtgaac

SEQ ID NO: 258455 - DNA, 430 bp, Zea mays
ggaagaaccggggcgacccacgccgtccgcaacatacccagtccgaagtccactagcatcatctttagcaccgatgggagccaagattgtttgccctccttgccctccttgctctttcagcaagcgctgctacctcgacttttattccacaatgctcacaacaatacctctctccggcgacagccgcgggatttcaacacccaactatacaatcctacatgctacatgaggccatcctagcaagcatcttacggtcattagcattaaccctccaacagccatatgccctattgcaacagccatccttagtgcatctgtatctccaaagaatcgcggcacaacaactacaacaacagttgctaccaacaatcaatcaagcagttgcagcgaaccttgctgccatttaaccaacttgtcgggagccctgatg

SEQ ID NO: 258456 - DNA, 715 bp, Zea mays
tgttatgcgccaccatttcttcaaaacatgtcaagtgcattgtgtgtccacagttcagaactcttgttccttgtaatgagtcaaatagatactcataacagattgggcaattctgcctcattgagttctccacacactgatggttatcacggagtataacagaatagcaggacccacacttcacacagtggaagaagttttccttgccaccaaccctgcatatgccacaatcgatgcaatggtactgccctttgtctgtatcatcatcataaaatttgcatatatcacaaaagtactctcccatattgactccacagcttatgcacacctgtgaaacaaaacagccggtgtcacaagtgtgcataagctgtggagtcaatatggtactgccctttgtctgtatcatcatcatagaatttgcatatatcacagaagtactctcccatattgactccacagcttatgcacacttgtgacaccggctgttatgtttcacagagtaggcaaactactttttcaacatcctgacgacatattgtatgccgatctccggaagccgtagcctcgttgtggcagtggcggcaggtgaacacctggttgcagggcggtgccacgatcttgcacccgtgcttcatcttgcccacgtcacggcggtccacctctccgtcgcgagccgcgtctacttccgcgacgacgttgtcgccgggaattgcgc

SEQ ID NO: 258457 - DNA, 620 bp, Zea mays
gttcaatgcagctaccattcagccagctatctgctgcctacccccagcaatttcttccattcaaccaactgacagcggtgaaccctgctatctacttgcaggcacaacagctactaccatttaaccaacttgtcgggagcccttatgccttcttactgcaacaacagcttctaccattccatctgcaagctgtggcaaacattgctgctttcttgagacaacaacatttgttgccattttacccacaggttgtgggaaacattaatgccttcttgcaacagcaacaattgctaccattctacccacagaatgtggcaaacattgttgccttcttacaacaacaacaattgttgccatttagccaacatgctttgacgaatcctaccaccttattgcaaccgcccaccattggtggggccatcttctagattctttattattacagtttaaatcataaagttctcatgctgatatgtgcgacctctcagtaataaagttttagagatctatattttaaaaaaaaaaagataaagaaagccaaaaccaaaatataaaacaatataaaaaaaaaggaagaaaggggaacaagcaacattaccttaataaccatagattaaacg

SEQ ID NO: 258458 - DNA, 531 bp, Zea mays
aactagcaacatacatagtgaagacactattttttcttatcaccaatgggagccaagatgttggccctccttgccctccttgctctatcatcaagcgctgctacctcgacttttattccacaatgctcacaacaatacctctctccggcgacagccgtgggatttcaattcccaactatacaatcctacatggtacaagaggccatccaagcaagcatcttacggcctttagcattaaccctccaacaaccatatgctctattgcaacagccatccttagtgcatctgtatctccaaagaatcgcggcacatcattctacaacaacttgtgctagcaaaccttgctgcctactctcagcaacagcagtttcttccattcaaccaactagctgcattgaactctgcttcttatttgcaacaacaacaactaccattcagccagctacctgctgcctacccccagcaatttctttcattcaaccaactggcagcattgaactctcctgcttatttacagcagcaacaactact

SEQ ID NO: 258459 - DNA, 418 bp, Zea mays
cctacaaaagcgacaacagttacttaatccattggcagtggctaacccattggtcgctaccttcctgcagcagcaacaacaattgctgccatacaaccagttctctttgatgaaccctgccttgcagcaacccatcgttggaggtgccatcttttagattacatatgagatgtactcgacaatggggccctcataccgacatgtgtttcctagaaataatcaatatattgattgagatttatctcgatataaaaaaaaaaaaaaaaaaaaaaaaaaaaaaaaaaaaacaaccaaaaaaaaaaacaaaaagaagaaaaaaaaaagggcggccgctcgacaaaaaaaaaaatacacaacaaaaagaacaaactaaaactaactaaaaaaaaaacaaaaaacgggggccctctttaaaggg

SEQ ID NO: 258460 - DNA, 201 bp, Zea mays
ccgcccccccccccgttcgcccgggagcagcaacccatcgttggaggtgccatcgtgtagattacatatgagatgtactcgacaatggtgccctcataccgacatgtgtttcctagaaataatcaatatattgattgagatttatctcgatatatttctgaactatgttcatcatataaataattgaaaacatcaaatcaa

SEQ ID NO: 258461 - DNA, 162 bp, Zea mays
ctgagaagttgcacatatcagtatgagagaatttttacgctgtatactgtaataataaatgtctcatactgatatgtgcgactcctcggtcatgaaagattagagatctatatgctattactgagaagttgcacatatcagtatgagaaatttaggattaca

SEQ ID NO: 258462 - DNA, 787 bp, Zea mays
acgcgtacgcccttattttaatagggtatgtgagcgctcttgctctatcgaaaattgactcttttttaacggtaacggaccaacggcagtatacgtcatgcaccatcctctcttctggagccctgaattgcgcctttcgtttctaagggataccagtgacagaattgagaaaaccagtgaaacggacctcataaacgcactggaaagcataggaccagtggcgtttggtgggaaatggggagagaaactggatgctgctttagttacagacatgggtcgttatagaaaatataactttgagtctactcgtgatcttctgaggtatatcagaaataaatcgggtcattacagagaactttcagatgatctcaagggcatacttgggtcactaccagaggggtttgatcgctattttgctagccgatttccaaagttgctaattgaggtgtacaaggtcttgtgggtgcactgcaaggacgaggaagctttcagtaaatatttcaaaggaagttagttatagctggagaggattgccctttcctactgtacatactaaccctgatgtagaacaagtacatgtgtaccatatgactcgtattataggataaaaaagagctcaatctgtacattatgcaccggtatggtaggaccgtgtcatttgcacagcctaatgctctgatggcttggacattgtgcatcgtggaatcttcgtaatcgttgtgtgtttgatcaagtaaaaaaaaaaaaaaaaaaaaaaaaaaaaaaaagggcggccgctctagaggat

SEQ ID NO: 258463 - DNA, 914 bp, Zea mays
cggacgcgtgggcggacgcgtgggttttagtttgggctgccttattttctattgtatcactaaaggcaagcatccgtttggtgagtactatgaaagggatgtgaacattgcaaacaatcgctttgatctcttgatggtggactacataccagaagcagtccatcttatatctcatttgttacaaccaaacccagaggcaagaccgacagcagtatatgtcatgcaccatccactcttttggagccctgaattgcgtctttcgtttctaagggataccagtgacagaattgagaaaaccggtgaaactgacctcataaacacactggaaagcataggatctgtggcgtttggtgggaaatggggagagaaactggatgctgctttagttacagacatgggtcgttatagaaaatataactttgagtctactcgtgatcttctgaggtatatcagaaataaatcgggtcattacagagaactttcaaatgatctcaagggcatacttgggtcattgccagagggatttgatcactattttgctagccgatttccaaagttgctaattgaggtgtacaaggtcttgtgggtgcactgcaaggacgaagaagctttcagtaaacatttcaatggaagctccttatagctggagaggattgccttttcctactgtaaatactaaccctgatgtagaagttgtatgtacatttgatatgtataccatattacccgttttatagaataaagagagctcagtctgtacattatgtagcgtattactgtgttgcctataaatccaagctttactgttgaatggtgaacaatggtaacacaatcttgctggatggaaaccagtggtatgtataatacccactttgtaagaaaagtctaaaaagaaaaattatattactttgtag

SEQ ID NO: 258464 - DNA, 1211 bp, Zea mays
gaattcggctcgagcaaaagagtactctctccctcctaccacacacagcctccggactgctccggacgcgcgcctcagatctactccaacacctccgcagcggcggcgcccgcgggtggaggagcaggagcaggagcggcggcgccatggtcgggaccgggaagagggagcggatagcgatacggaggatcgacaacctggcggccaggcaggtgaccttctccaagaggcggcggggcctgttcaagaaggccgaggagctctccatcctctgcgacgccgaggtcggccttgtcgtcttctccgccaccggcaaactcttccacttcgccagctccagcatgaagcaggtaatcgatcggtacgactctcattccaagactctccagaagtccgaaccgcagtcgtctcaactgcagtcacatatggatgacggcacttgtgcaaggctaaaggaggaacttgctgaaacaagccttaagctcaggcagatgagaggagaggagctccagaggctgagcgtcgaacagctgcaggagctcgagaagaccctcgaatccggcctcggctctgtactcaaaaccaagagccaaaaaatccttgacgagatcagcggtctggaaagaaagagaacgcagctgatcgaggagaactcaaggctgaaggagcaagtgacacggatgtcgaggatggagacgcagcttggcgccgacccagagttcgtgtacgaggaagggcagtcgtctgaatccgtgacgaacacgtcctatccgcgcccgtccaccgacaccgacgactgctccgacacatcgctcaggctcggctccaagtgacggagatttggcatgtccggtagcggagcggtgccgatcgcttgcccttctccactctagataggtctggattgggggagagcagcagtgctggatcgggaagacccaagtgaccaacgcgtcgcatcagaataaggcattttgagtgctgtatgatgtgtgtattctggctctgaaagtgagacctgcttttgttataatacatacatacaggcagcatggcaatacgtgacggggtacccgctgcctgcagtccgtgacctgtctgcgtctctgtttctagtactcgctataatcaccctgcaattacctggctgcatttagagaaatccagtccatgcaaatgaactcccaaaaaaaaaaaaaaaaggcggccgc

SEQ ID NO: 258465 - DNA, 1175 bp, Zea mays
gaattcggctcgagcacgacttcctcccgccgccggttggcttcgctgctcgtccacctccgcccggcccgtgggacgagtggggactggagagggtcgcctctgggcttcgcctctcggcggccgagtgtctgcgtcgtccacggagctgagagcctgagactgagactgagagcgaccggcggcggggatggcgagggagaggcgggagataaagaggatagagagcgcggcagcgaggcaggtcacgttctccaagcgccgccgcggcctcttcaagaaggcccaggagctctccgtgctgtgcgatgccgacgtcgcgctcatagtcttctcctccacggggaagctctcccagttcgccagctccagtatgaatgagataattgacaagtacaacacgcattctaaaaacctggggaaaacagaacagccttcgctggacttgaacttagagcatagcaaatatgcaaatttgaatgagcaacttgcggaagcaagccttcgactcaggcagatgagaggtgaagaacttgagggattgaatgttgaagaactccagcaattggagaagaacctggaatctggtctgcatagggtgcttcaaacaaaggatcaacaattcttggaacagatcaatgacctcgaacgtaagagtacgcagctggcagaggagaacatgcaactgaggaatcaagtatcccagatacccccagctggcaagcaagcagttgctgatactgaaaatgttattgctgaagaagggcaatcctctgaatcagtgatgactgcgttgcactctgggagttcacaggataatgatgatggttcggatgtatctctaaagttagggctgccttgcgttgcatggaagtaaacaggaaatgaggctccttgtcgattctgggtgtggatgtgggtggagctgcggcctcagcggataggcacttgtgtatggttttatggacgaccggcccccgactacgtactgcaataatcttgcattggaagcgagatcggttaacctgatttgtcatcccttgtggcttcatgatgcgatgttccgcttgtaccgtttgctagcatgttaactgaatttttagaatcgcatatacttttgttcctatatatcactgtcgtactgctcgtaaaaaaaaaaaaaaaaaggcggccgc

SEQ ID NO: 258466 - DNA, 1054 bp, Zea mays
acgagctcttccacacccgccctctctcttgtgggtcggcggccgagtgtctgcgtcgtccacggagatcagggatcggcggcggggtatggcgagggagcgtcgggagataaagaggatagagagcgcggcggcgcggcaggtcacgttctccaagcgccgccgcggcctcttcaagaaggctgaggagctctccgtgctgtgcgatgccgacgtcgcgctcatcgtcttctcctccacgggaaagctctcccagttcgccagctccagtatgaacgcgtgcgttgacaagtacagcacacattctaaaaacctggggaaagcagaacagccttcacttgacttgaacttagaacatagcaaatatgcaaatttgaatgagcaacttgtggaagcaagccttcgactcaggcagatgagaggtgaagaacttgagggattgagtgttgaagaactccagcaattggggaagaatctggaatctggtctgcatagggtgcttcaaacaaaggatcaacaattcttggaacagatcagcgacctcgaacaaaagagtacacaactggcagaggagaacaggcaactgaggaatcaagtatcccacatacccccagttggcaagcaatcagttgctgatactgaaaatgttatcgctgaagatgggcaatcctctgaatcagtcatgactgcgttgcattctgggagttcacaggataatgatgatggttcggatgtctctctaaaattagggctgccttgtgttgcatggaagtgaaaaaacaagatggtctgtgttgatctgggtggagctgcggcttcagcagataggcacttgtgttattgtcttatggacgacccccgactactgcaataatcttgcatcggaagcgagatcagttaacctgatttgtcatccttgtggcttcatgatgcgatgttgcgcttgtaccgtttgctaggatgttaactggactagaatcgtgtctacttttgtactgctcgtgaatcctatctactttgtgctatccaaaaaaaaaaaaaaaagggcggccgc

SEQ ID NO: 258467 - DNA, 894 bp, Zea mays
cgtcctcctccggtcacgcacgcagctagcttacccgccccgccactataaaaatccacctccaccccaccgcgcgtctacagttccacacacgcgtgcacgggcgggcaagcaccagaaaggataggcggaggccgcgcggcgggcgccagctgcagccaagagcccactagtagtagtagtagctagttcaccaccgcctgcttgcctcctttactttgccatatttgctagcgtttcctggattggggacgcttccgtttcgggaagccgtgaagggatcggccacgacgatggtgcgggggaagacggagctgaagcggatagagaacgcgacgagccggcaggtgaccttctcgaagcgccgcaacgggctgctcaagaaggccttcgagctctccgtgctctgcgatgctgaggtcgggctcgtcgtcttctccccgcgcggcaagctctacgagttcgccagcgccgccaggaccaaaagcctgaagaaaccgatgacagcatcgtacatgggggcaacgcggaggtcctgaattaatgcgcggccaatcggaggaagagtgagtggaaagaggcaggcgtgcccagtaactgtgggtggaaggattgctgctcatgggccatggctacaaacggagaagcgtcgtcatgtgacttctggtcgcttggcttgttcctccggcctgccaaagccacttttttcttggtttgtatttcggaaacaatcctttcttgtagtggtggtgccgattgacttttcttgcttgcgttatccaatcacatcatcagttccgggcgaaaaaaaaaaaaaaaaaaaaaaaaaaaaaaaaaaaaaaaaaaaaaaaaaaaaaaaaaaaaaaaaaaaaaaaaaaaaaaaagggcggccgc

SEQ ID NO: 258468 - DNA, 1005 bp, Zea mays
tttgcaagacgcagatgaagcggatagagaggccgaccagccgccagaattcccgggtcgacccacgcgtccgcggacgcgtgggggcgttcgagctctccgtcctctgcgacgccgaggtcgccctcgtcgtcttctccccgcgcggcaagctctacgaattcgccagcggaagtgcgcagaaaacgattgaacgttatagaacatacacaaaggataatgtcagcaacaagacagtgcagcaggatattgagcgagtaaaagctgatgcggatggcctgtcaaagagactcgaagcacttgaagcttacaaaaggaaacttttgggtgagaggttggaagactgctccattgaagagctgcacagtttggaagtcaagcttgagaagagcctgcattgcatcaggggaagaaagactgagctgctggaggagcaagtccgtaagctgaagcagaaggagatgagtctgcgcaagagcaacgaagatttgcgtgaaaagtgcaagaagcagccgcctgtgccgatggcttcggcgccgcctcgtgcgccggcagtcgacaacgtggaggacggtcaccgggagccgaaggacgacgggatggacgtggagacggagctgtacataggattgcccggcagagactaccgctcaagcaaagacaaggctgcagtggcggtcaggtcaggctagcagctacctcagccacgcacaggcccaatcaacgcaagctagctagctgagaataatcttttagatctctggtagtgtggagatcgagatgcaagccaagcaatgtgatatcgcgttgtgtgttaccaacctgtcagtctgtgtatcatcccgtcccgtccgtcagagtctcagagaacgaacacttcttctccctgtagctagctgctcctgcttgtgtcctaaaaaaaaaaaaaaaaaaaaaaaaaaaaaaaaaaaaaaaaaaaaaaaaaaaaaaaaaaaaaaaaaaaaaaaaaaaaaaaagggcggccgc

SEQ ID NO: 258469 - DNA, 388 bp, Zea mays
ccgctcgagccgtccccgttttccacttttgcctccgccccaattcggataacaaacccctccgcctcgtcgcgtctcctcccagccgagccgatccggtagagagagggagagggagggactgagggaggaggagctgggttccggtcccggccgcccggccggctgcgcgattcgattgcagctctcgtccccgggcggcgtccaggatggtgcggggcaagacgcagatgaagcggatagagaacccgaccagccgccaggtcaccttctccaagcgccgcaacggcctgctcaagaaggcgttcgagctctccgtcctctgcgacgccgaggtcgccctcgtcgtcttctccccgcgcggcaagctctacgaattcgccagcgg

SEQ ID NO: 258470 - DNA, 1170 bp, Zea mays
gaagtcggcgcctcccgccctcgcccgattcggcctgagagcatctccgctccggctgcgctctgccttgctttcctgctacctgctctagcgcgagcgagagaggtacggcggccgatctggcggcgcaggcggagggctcggccggggccggcaagtcggcgccgaacatggggaggggccgggtcgagctcaagcggatcgagaacaagatcaaccgccaggtcaccttcgccaagcgccgcaacggcctgctcaagaaggcgtacgagctctcggtgctctgcgacgccgaggtcgcgctcatcatcttctccaaccgcggcaagctctacgagttctccagcacgcagagcatgccaaaaacacttgaaaagtaccaaaaatgcagttttgcagggcctgaaacagcactccagaatagagagaatgagcaactgaaaagtagccgcaatgagtacctcaaactgaaggcacgtgttgataatttacagcggactcaaaggaacttgcttggtgaagatcttgagtcattaggcataaaagagctggagcacctggagaagcagctcgattcgtccttgaagcacataagatctacaaggacacaacacatggttgatcaactgacagaacttcagaaaaaagaacaaatgttttgtgaagcaaataagtgtcttcgaagaagactggaggagagcaaccaggttatatggcagcatgcgtgggagcaaagcgagcggcattctgaagtgcagccgcagcagctcaatggcaataacttcttccatcccctcgatggtgctggtgaacccacccttcagatagggtatccttcagaggcactgactagctcatgcatgaccaccttcctgcccccgtggttgccatgagatcgaactactgcgcaattccgaattaataagcatggccgcatgcagctgcctgtgctatacgttgtgcttggagtgtactttaaggttcttgcatggcaagtatgtgtgtaacatttgtgatgaacatggaaactatccacttaattctcgaataatcaatgaactgggtaagattgtaacataaaaaaaaaaaaaaaaaaccggcagctaggctgcgtgtgaatgatggaggttgtgttccgcgtgttcaaaaaaaaaaaaaaaaggcggccgc

SEQ ID NO: 258471 - DNA, 1179 bp, Zea mays
cggtcgcgtgggctccaccacccaactgaattcggctcgagtctcctcctttttctccactccgcttttgcttggttccatcgggccggagaggaggagctagctagctagcagcagctctgttggtgtgtgtgtgtgtgtggagggtagctgcagctggggctagctggaaaggtcgggagccatggggaggggccgggtggagctgaagcggatcgagaacaagatcaaccgccaggtcaccttcgccaagcgccgcaacggcctgctcaagaaggcgtacgagctctccgtgctctgcgacgccgaagtcgcgctcatcgtcttctccaaccgcggcaagctatacgagttctgtagcggaccgagcatcacgagaacacttgagaggtacgaaaaaaacagttatgcaggcccagatactgctgtacagaacaaagagaacgagttagtccagaacagccgcaatgagtaccttaaactgaaagcaaaggtggataatttacagaggactcagaggaatttgcttggtgaagatctgggttcacttggtgtcaaagagcttgatcagcttgagaagcaaattgattcatccttaagtcacataagatccacaaggacacagcatatgcttgatcagctcactgatcttcagaggagggagcaaatgatgtgtgaagcaaataagtgccttagaagaaagctggaggagaccagcaaccaggtgcatggccaagtgtgggagcacggtgccaacttattactcggctacgagcggcactcctcgccacagcaagccccatcacatgttggcaatggattattctttcatcccctggaagctgcagcagagccaaccctgcagatcgggttcgctcccgagcatatgaataacttcatgccggcatggctaccctgaagatggatctttgaggcaaagggaataaataaagatgcgatggcagaatcatattgtactgcaagagtgacaattgtgtgttccactcacatatatgacctagttttgtgtgtctatatgtcgaaacccatatgtctgtgattttattatatgttatgtaagcacaaatgaaacatgccggactagttgcttttgcttgtctatgtatctgtatctggctgtgcgccaaaaaaaaaaaaaaaaaaagggcggccgcccgc

SEQ ID NO: 258472 - DNA, 1306 bp, Zea mays
gaattcggctagtgctcgagtcgagactcgagaggcacctgatctttccttcccgtcttcctcccacacgtccccatcaccattgctgcgacgagagtgagcgggagagggtaggtggcgaggcggcggagatggggcgggggccggtgcagctgcgccggatcgagaacaagatcaaccgccaggtgaccttctccaagcgccggaacgggctgctgaagaaggcccacgagatctccgtgctctgcgacgcagaggtcgcgctcatcgtcttctccactaaggggaagctctacgagtactctagccattccagcatggaaggcattcttgagcgttaccagcgttactcatttgaagaaagggcagtacttaacccaagtattgaagaccaggcaaattggggagatgaatatgtccggttaaaatccaaacttgatgcacttcagaagagtcaaaggcagctgttaggagaacaattgagttcactgaccataaaagaactccagcaactggagcaacaactggacagttctttgaagcatattaggtcaagaaagaatcagctcatgttcgattcaatttccgcgcttcagaaaaaggagaaagcacttacagatcaaaacggtgtcctgcaaaagttcatggaggcagagaaggagaaaaacaaggctttgatgaacgcgcagctccgggagcagcaaaatggagcatcaacaagctccccatcactttcaccaccaatagttccagattccatgccaactctaaatatagggccatgtcaacatagaggggcagcagaatctgagtctgaaccgtctcctgctcctgcacaagcaaacaggggcaacctgccaccatggatgctccgcactgtcaagtaacaggtgaggtcttcccagtgtagttttgcagctgatctcgacagcaacacacctgtcaccgaaatgcttcggtgaccctagatatcaaccgatgcacgatccatctcgatcctgtgatcgaataccggcgtaggtactaccaataaagtcaggccccgtcaaatgctttacatggtgattgaagtctggagcttctcagcaccaccatatattgtgttcagttcctgtgtttattgccatagctaccctttttttctctgatctacgagctagacgtagctttgtgcttggagattccactactatgtttcctctgtcctgtgtatgctttaacggagatgcacgttgtacccgtggtaatatatataaatttgcgttgtaaaaaaaaaaaaaaagggcggccgccgcggccgcaaaaa

SEQ ID NO: 258473 - DNA, 1481 bp, Zea mays
gaattcggctcgagaagcaatcacgagacgggaggggttggcctttcgcctctagggttccgggtcgcccaccaccttaccggaaatggcaattgcgggacgcgcccccaatcactcaccacccctttcgtctcgccctttttaacccaatcccctctccacgattccacacccatctcctgagtcctgctgcctgcgctcgcctcagctcctttcttccccgccccttggcttttgcttggttgcatcgggccggtcgagccggagaggaaaagctagctagcagctaccagctctcggccggcggtggtagtctgcctgcagctggggttagctgcaagggttgggagcagccatggggaggggtcgggtggagctcaagcggatcgagaacaagatcaaccgccaggtcaccttcgccaagcgccgcaacggcctgctcaagaaggcgtacgagctctccgtgctctgcgacgccgaagtcgcgctcatcatcttctccaaccgcggcaagctctacgagttctgcagcggacagagcattaccaaaacacttgagaggtatgaaaaaaacagttatggaggaccagatactgctgtacagaacaaggagaacgagttagtccagagcagtcgtaatgagtacctcaagctgaaagcgagggtggataatttacagaggactcagaggaatttgcttggtgaagatctggggtcacttggtgtcaaagagcttgagcagcttgagaagcaacttgattcatccttaaggcacataagatccacaaggacacaacatatgcttgatcagctcactgatcttcagaggagggagcaaatgctgtgtgaagcaaataagtgccttagaagaaagctggaggagaccagcaaccaggtgcatggccaagtgtgggagcacggtgccaacttactcggctacgagaggcactctcctcaacagcaggccccatcacatgttggcaatggtttgttctttcatcccctggaagctgcagcagagccaaccctgcagatcgggttcgctcctgagcatatgaataacttcatgccaacatggctaccctgaagatggatcttgaggcaaaggaaataaataaagatgcggtggcagcatcatactctatgcaagctaagagtgacagctgtgtttcagtcacatatatgatctagtctgtgtgtcaatgtgtcgaaaaacatgtctgtgattttgttatatgaatgtaacgcgcaatgaaacatacaggactagctgcttgcttgacgatgcgtttgcgtgtatccgtataaattaaaggctataagccacatcgtatatgcgtactgcacatgcgtgcattatctaaaaaaaaaaaaaaaagggcggccgcgattctaggttaggttccacgggtgcaggtagcgtaatgtttggatgcctgtattggtctttggaccaagctggattcatggaactagaaaaa

SEQ ID NO: 258474 - DNA, 1380 bp, Zea mays
gtcacgcgtcccctccttagaggcctctctctccgccgtcgcagctagctgtgacgttatgctctcgccggcgccatagcgccagcgcctaccgtctacaactatccagccttaggcttacctatcccgtcaatcaagcctctcgtaaggaacacggatggtggctagctagttctatagctgctgtcgtcgtcgtcatcggcggcggcggcgcctgttcttagaggataaggttgtcctagcggagagggagctagccaggatttcggttgagatcaagagggggagcaggcggcggcggcggcgatggggcgcgggaaggtgcagctgaagcggatcgagaacaagatcaaccgccaggtgaccttctccaagcgccgctcggggctgctcaagaaggcgcacgagatctccgtgctctgcgacgccgaggtcgcgctcatcatcttctccaccaaagggaagctctacgagtattccaccgattcatgtatggacaaaattcttgaccggtacgagcgctactcctatgcagaaaaggttcttatttcagcagaatctgaaactcagggcaattggtgccacgagtatagaaaactaaaggcgaaggtcgagacaatacaaaaatgtcaaaagcacctcatgggagaggatcttgaaacgttgaatctcaaagagcttcagcaactagagcagcagctggagagttcactgaaacatatcagaaccaggaagaaccaacttatgctcgagtcaatttcggagctccaacagaaggagaagtcgctgcaggaggagaacaaggttctgcagaaggagctcgcggagaagcagaaagcccagcggaagcaagtgcaatggggccaaacccaacagcagaccagttcgtcttcctcgtgcttcgtgataagggaagctgccccaacaacaaatatcagcatttttcctgtggcagcaggcgggaggttggtggaaggtgcagcagcgcagccacaggctcgcgttggactaccaccatggatgcttagccacctgagcagctgaaggtttcagcaactcttcccgtttatccgcctggtgcagtatagtatcatcgtgatcgcgagagcagcagcagtgggtttgccgtatctttttttaccaatgtatgtctatatatgtaagtatcaaatctgcaatgtgttaatcaccatttccgctggggcggccgcacgagtatcaaatctgcaatgtgcagcatcaaatattccattttcatgagcataagacgttcttgatgccttcatgcattgtggaggcggtctgtttgcatactcatttacttcaaaccctagtgttgtgtaccccctctgttctttttaatttatcgcgttttatttc

SEQ ID NO: 258475 - DNA, 1176 bp, Zea mays
cggggtcgaccacgcgtccgcccacgcgtccgcccacgcgtccggcctgcgctcgcctcagctcctttcttccccgccccttggcttttgcttggttgcatcgggccggtcgagccggagaggaaaagctagctagcagctaccagctctcggccggcggtggtagtctgcctgcagctggggttagctgcaagggttgggagctagccatggggaggggtcgggtggagctgaagcggatcgagaacaagatcaaccgccaggtcaccttcgccaagcgccgcaacggcctgctcaagaaggcgtacgagctctccgtgctctgcgacgccgaagtcgcgctcatcatcttctccaaccgcggcaagctctacgagttctgcagcggacagagcattaccaaaacacttgagaggtatgaaaaaaacagttatggaggaccagatactgctgtacagaacaaggagaacgagttagtccagagcagtcgtaatgagtacctcaagctgaaagcgagggtggataatttacagaggactcagaggaatttgcttggtgaagatctggggtcacttggtgtcaaagagcttgagcagcttgagaagcaacttgattcatccttaaggcacataagatccacaaggacacaacatatgcttgatcagctcactgatcttcagaggagggagcaaatgctgtgtgaagcaaataagtgccttagaagaaagctggaggagaccagcaaccaggtgcatggccaagtgtgggagcacggtgccaacttactcggctacgagaggcactctcctcaacagcaggccccatcacatgttggcaatggtttgttctttcatcccctggaagctgcagcagagccaaccctgcagatcgggttcgctcctgagcatatgaataacttcatgccaacatggctaccctgaagatggatcttgaggcaaaggaaataaataaagatgcggtggcagcatcatactctatgcaagctaagagtgacagctgtgtttcagtcacatatatgatctagtctgtgtgtcaatgtgtcgaaaaacatgtctgtgattttgttatatgaatgtaacgcgcaatgaaacatacaggactagctgcttgcttgccaagggcggccgcaaaaaaaaaaaaaaaaaaaagggcggc

SEQ ID NO: 258476 - DNA, 1319 bp, Zea mays
gttcggacgcgtgggcggacgcgtgggcggacgccaccttcctccccctatctctccaccgtcgcagctagctgcgacgtcatgcactcgccggcgccaccgccaccgcatactatctacaattagccagccgtaggcttacctatcctgtgtcaagcaagcctctcgcaagcaacaaggaaggaagctagctagttttatagctgctgtcggcggcggcggctgaagcgacgtgcctgagctaggatttaggttgagatcaggagagggagaaggcggcggcgatggggcgcgggaaggtgcagctgaagcggatcgagaacaagatcaaccgccaggtgacattctccaagcgccgctcggggctactcaagaaggcgcacgagatctccgtgctctgcgacgccgaggtcgcgctcatcatcttctccaccaagggcaagctctacgagtactctaccgattcatgtatggacaaaattcttgaacggtatgagcgctactcctatgcagaaaaggttctcatttccgcagaatatgaaactcagggcaattggtgccatgaatatagaaaactaaaggcgagggtcgagacaatacagaaatggcagaagcacctcatgggggaggatcttgaaactttgaatctcaaagagcttcagcaactagagcagcagctggagagttcactgaaacatatcagaacaaggaagagccagcttatggtcgagtcaatttcagcgctccaacggaaggagaagtcactgcaggaggagaacaaggttctgcagaaggagctcgcggagaagcagaaagaccagcggcagcaagtgcaacgggaccaaactcaacagcagaccagttcgtcttccacgtccttcatgttaagggaagctgccccaacaacaaatgtcagcatcttccctgtggcagcaggcgggagggtggtggaaggggcagcagcgcagccgcaggctcgcgttggactgccaccatggatgcttagccatctgagctgctgaaggtttgccctcaccgtcgcgatgtgatagcccaaaatccagcaagtcttccccggaccccggactgtccccgcttctccgcctggtgcagtatcgtcgtgatcgcgagaagcagcagcagcggtttgccgtattttttaccactgtgtataagtagcatatctgcaatgtgtatattttgttcaccgttcctgctggggcggccgcacggtactttacgcatgtaatatatgtgcttcatcaaatcactttcactaccatagcatgtgccggtttgtggtagtttcatgtctcaca

SEQ ID NO: 258477 - DNA, 602 bp, Zea mays
ttctgcggacgcgtgggcggacgcgtgggctccactcaggcaactgtacttattcaatttgcaggaacaaatggtttgtgacgcaaataagtgtcttcgtagaagactggaggagagcaaccaggttatatggcagcatgcgtgggagcaaagcgagcggcattctgaagtgcagccgcagcagctcaatggcaataacttcttccatcccctcgatggtgctggtgaacccacccttcagatagggtatccttcagaggcactgactagctcatgcatgaccaccttcctgcccccgtggttgccatgagatcgaactactgcgcaattccgaattaataagcatggccgcatgcagctgcctgtgctatacgttgtgcttggagtgtactttaaggttcttgcatggcaagtatgtgtgtaacatttgtgatgaacatggaaactatccacttaattctcgaataatcaatgaactgggtaagattgtaacatagtgctttatgcctgaaacattaatttaggctgcgtgtgaatgaatggaggtgttttcccgggttcagttaaccagaacagccgtttagggtggggagggaagtgat

SEQ ID NO: 258478 - DNA, 1170 bp, Zea mays
gaattcggctcgagctcgagccgaattcggctcgagcaccacaccgcaccggcaccaccaccaaccgagcggctccaggctcctgctcaggaaggggagaagaggcgagccttccttgggaagtcgcaggaggagagaaggggaacaaagatggggcgcggcaagatcgagatcaagcggatcgagaactccaccaaccgccaggtgaccttctccaagcgccgcaacgggatcctcaagaaggcgcgggagatcagcgtgctctgcgacgccgaggtcggcgtcgtcgtcttctccagcgccggcaagctttacgactactgctccccgaagacatcgctatcaaaaatcctggagaagtaccagaccaactctggaaagatactgtggggtgagaagcacaagagccttagtgcagagattgaccgtataaagaaagagaacgacaccatgcagatcgagctcaggcacctgaaaggtgaagatctaaactcgctgcaacccaaagacctgatcatgatcgaggaggcacttgataatggactgacgaacctgaatgagaaactgatggagcactgggaaaggcgtgtgacaaacactaagatgatggaagacgagaacaaattgctggccttcaaactccaccagcaagatatcgcgctgagcggcagcatgagagagcttgagctgggttaccatcctgaccgggacctggcggcccagatgccaatcaccttccgcgtgcagcccagccatcccaacttgcaggagaacaattagactgctggatgccctcgttccactcgccgaggatttcacccagccaccaccgctggcttgtatgccctcgtgcgctggcaactgtatctttatctttccggtatgtttggatgaacgtataatgtgtgtcagtgtcggtcgcatgacgtgccgatgtcgtgcatctctctctctctctgccagagcagcggaactctgcaccgtgagtaacttaattggtaccgtatgatctgccggacagtgaatagtttatgtgagtgggtcaaaccataatgtgtagtatttgtgtcgaactgtcaatggcacgtatttggattttcactacaaaaaaaaaaaaaaaaaaaaaaaaaaaaaaaaaaaaaaaaaaaaaaaaaaaaaaaggccggccgc

SEQ ID NO: 258479 - DNA, 924 bp, Zea mays
agcgaattcggctcgaggatctggagtctttgaatccaaaagagctccaacaactagagcagcagctggagagctcactgaagcacatcagatcaagaaagagccaccttatggccgagtcaatttctgagcttcagaagaaggagaggtcactgcaggaggagaacaaggctctacagaaggaactttcagagaggcagaaggcggtcgctagccggcagcagcagcagcagcaggtgcagtgggaccagcagacacaggtccaggtccagacaagctcatcgtcttcttccttcatgatgaggcaggatcaacagggactgccacctccacaaaacatctgcttcccgccgttgagcatcggagagagaggcgaagaggtggctgcggcggcgcagcagcagctgctcctcctccggggcaggcgcaaccacagctccgcatcgcaggtctgccgccatggatgctgagccacctcaacgcataaggagggcgagcaaatggcgtgcgaagtgattgattgctcaccgttgattgaacgatagcctaagttcatggcggcagcaaactaagctaaaactattgttatgtttgcaaggaagggtagggtaacccgctgtgtaatctttgtccagctagcatgtaccaactgagatgcatgcatgcttattattgtccaattacccgtgaatctagcggtgcttttggtgagaggccggccggtcgggtgcagtttacttcaaatatggtttgtgattttgtgtaaatagtattaactaggagtcctatggtaagtaaattaattaatgggaggatgcatgaataaaacctctcttgtgctgccaaaaaaaaaaaaaaaaaaaaaaaaaaaaaaaaaaaaaaaaaaaaaaaaaaaaaaaaaaaaaaaaaaaaaagggcggccgc

SEQ ID NO: 258480 - DNA, 1142 bp, Zea mays
ccgctccggaattcccgggtcgaccgacggaattcggctcgagatcaaatgctacttgatcagctctttgacctcaaaagcaaggaacaagaattgctggatctcaataaagacctaaggaagcagctgcaagaaacaaggccagagaacgcgctccgtgtctcctgggaggaaggtgggcacagtggcgcaagtgggaatgttcttgatccttatcaggggctccttcagcacctggacaacgatccttccctgcagttcgggtaccatcatcaagcctacatggatcagctgaacaacgaggacctggtggacccgaatgagcatggtcgatctggatggatatgaaatgctctgatgacccaaaataaagttgatgcacagcagggattcaccctgcaggacgcgagactatgtattgaagctaagacctcgtgtgtgttgtgttgtgtgcgaagcttggaactttataaatcgttgtcatgcccatggctttctatttctttctcggagctgcgcaaaaccgtctccatttctgggcttctcaggacagctggacgcgggaagccggaaccaaaaactctgttccgcactcatctcctctgctccaggcttcaacatccgcgcaggagcgaaaacgcgtcccaaatccttttttatttgccagaaatttctgagccctaacccgcgtgcgcgtggtgcctgggccgaattattaggagatccataggctgtctcactccctctggccagcagcctgactgtgaactccagactccgatcgtctggtcctctagctctcatgtcatggactcatggaggctactactcggcatgttcctggcccaggaaggagtgagcgagctcgccagcccaataccaaatgcgccggcctacaaatccaaaagccccaatttagcgctgagtcctccaggcttcgagtcatcgctgccacgtgtgtatccctacccatcgcacatgggtcacttgccacatgtttggttcagttttttctgattcttttaataagaatttggctgtaaaaagaatcttgctgtgtaaaaatccaaaagcctcaatttagcgctgagtccttcgggcttggcccttgcgtgaaaaaaaaaaaaaaaaagggcggccgc

SEQ ID NO: 258481 - DNA, 722 bp, Zea mays
cccacgcgtccggatttctaaagtaggtcagtggtactggattcttttttttaaaaaaaagtatatgctattttctattttctttagaactaggtttgtcggtttgtttggcaaacacgatctatgtactgacctgaactttgtgtattccctttttccaagcaggatctcacgttgacttactctgtttcgttgcgctctttcttttcaaaactagattaactaccaggattatctcaagttgaggacaaggggcgaattcctccaaactacacaaagaaatattcttggcgaggatctgggtccacttagcatgaaggagctcgagcagctggaggaccaaatagagatatctctgaagcatatcagctcaagaaagaatcaaatgctacttgatcagctctttgacctcaaaagcaaggaacaagaattgctggatctcaataaagacctaaggaagcagctgcaagagacaaggccagagaacgcgctccgtgtctcctgggaggaaggtgggcacagtggcgcaagtgggaatgttcttgatccttatcaggggctccttcagcacctggacaacgatccttccctgcaggtcgggtaccatcatcaagcctacatggatcagctgaacaacgaggacctggtggacccgaatgagcatggtcgatctggatggatatgaaatgctctgatgacccaaaataaagttgatgcacagc

SEQ ID NO: 258482 - DNA, 317 bp, Zea mays
cccacgcgtccgcgcagctccaactactcacttgaagttaaatctccactggacactggaagggactaccaggattatctcaagttgaggacaagggtcgaattcctccaaactacacaaagaaatattcttggcgaggatctgggtccgcttagcatgaaggagctagagcagctggaggaccatatagagatatctctgaagcatatcagctcaagaaagaatcaaatgctacttgaccagctatttgatctcaaaagcatggaacaagaattgctggatctcaataaagacctaaggaagcagctgcaagaaac

SEQ ID NO: 258483 - DNA, 1170 bp, Zea mays
ctgcaatcctgcaccggcgcgaaagccccctcacggcctcacctccactccggtgatggccgcatctcctttacttctcagtgctcacgccgtccacggcccactagttgcatcggctagctcccgcataaagatccacaccacttgagcagcagctagctcaagggaaggagaaggctggaagtggaaagaagtgggttcttgcttgagctgagctcttgctgcccttggatctgtttgggagtggagaacgcagtatggggcgcggcaagatcaagatcaagaggatcgagaactctaccaaccggcaggtgaccttctccaagcgccgggccggactggtcaagaaggcacgggagatcggcgtgctctgcgacgccgaggtcggcgtcgtcatcttctccagcggcggcaagctctacgactactgctcgcccaggacctcgctgtccaggatcttggagaagtaccagaccaactccgggaagattctgtggggtgagaagcacaagaacctgagtgcagagatcgacagagtcaagaaggagaacgacaacatgcagattcagctcaggcatctgaaaggcgaggacctgaactccctgcagcccagggagctgatcgctattgaagagggcctccagaatgggcagaccaacatgcgcgagaagcagatggactactggaggatgcacaagacgaatgggaagatgctggaggacgaacacaagatactgacttttaggatgcaccaacaggctgttgatctgagcggcggcatgagggagctggagaccggttaccatcaggtccagcacgacagggatttcatttcccagatgccgttcaccttccgggtgcagcccaaccaccccaacctgcaggaagacgagtagctacagcctgctggatagtgatctgcatgccgctctgaactgaagctcctcacctgcagcttctatctcgcgtttcatcattcagcgttagctgggtatctttcttttcatggcaccctggatgaagtctgtcagtacgatgtggtctttgtcttgtgcgtctcttttgactttgctgggctgatttccgtgcatgtagtgatgatgacagcgttaattaaaaaaaaaaaaaaaaaaaaaaaaaaaaaaaggggccgccgctcgcgatctagaa

SEQ ID NO: 258484 - DNA, 614 bp, Zea mays
gaattcggctcgaggcaagtcaaagcagatgccgtaagcttggcaagtagactcgaagccctagaaaagaccaaacgaatgtttctgggtgaaaatttagaagaatgctccattgaagaactgcataatctggaggttaaactggcgaagagccttcacgtcatcagagggaagaagacacaactgctggagcagcagatatccaagctgaaggagaaggagaggaccctgctccaagacaacaaagagttgcgggataagcagcgcaacctccagtctccaccggaggcgccaccggacctgaaccgctgtgtccctccttggccgcgtagcctgccggcaccgagcaatgacatggacgtggagacggagctgtacataggattacccggcagggagcgctcctccaaccgggactctgattgaaccacggattttcagctcgatcggctaaaaggaataagctccctgaaattaaagcatcgaagggcacacgtcaatggttttatttgcaacttttgtatgcaaacttgtacttgaaaagtaaaaaaaataaaaataaatctgtagtatgtggatgcaagaaaaaaaaaaaaaaaaaaaagggcggccgc

SEQ ID NO: 258485 - DNA, 1360 bp, Zea mays
accctcggttcgcctcaggcacgcgagcgagcatatagcagcccaccacccacaggccgcagggccctcacccgtcgagccaattgagtggcagccagaaaaacccacagcgcgagcagcgagcgagcgcgggctcctgtgtgcagcgtgtctgcgctagagggcgaagggcacggaccgccttcgtcaataattgcggtacgaacggggcaaatccgtcgtttaaagaggtcgctgatagcgcctgctggtggcgagagagagaaagcagcagaatcgctgagggatcgtcgatccggagaggcaaaaaagccgagagatcaggcagggcaccatggggcgcgggaaggtggtgctgcagcggatcgagaacaagatcagccggcaggtgaccttcgccaagcgccggaacggcctgctcaagaaggcgtacgagctctccgtcctctgcgacgccgaggtcgcgctcgtcctcttctcccacgccggccgcctctaccagttctcatcctcctccaatctgcttaagactctagagcggtaccagaggtacatctatgcttcagccgatgctgcagtgccatctagcgatcagatgcagaataactatcaagaatatgtgaagctgaaggcacgagttgaggttttacagcactcacaaaggaatcttcttggtgaagatctggctcctacttagcccaagtgaacttgaccagcttgagagtcaagtagacaagaccttgaagcaaataagatcaagaaagactcaggtgttacttgatgaactttgcgacttaaagagaaaggaacaaatgctgcaagacgctaacagggttctgaaaaggaagctgcacgagtttgaggcagaggctgcttctcccccacaattggcgtggcaaggcggaggcggcatgttgtcccatgaccctccacagccagaacacttcttcgtggctctggagagcaacgcgcctctgcaacctacataccatactatggacatgaaccagcagccagagccagcgccgggcggctgctaccctcctgcgtggatggcttagccagcgctttggttccattgccttgagaagtgccgtgtccttcagagatcgctacgagtgctgttgcctgcccactttgctgcctgccatgcttaccgaactgttcaaataagaaataaccacatggtcctatataggttgctgctgtctttatcttctgttgatcacgtgctgctcagatgctttaaacgctatgcaaaatggcttagcgatgcacgctggaatgggctgaactgcttgtgttttgggagtataaatcgctcgggcgcttggcaaaaaaaaaaaaaaagggcggccgc

SEQ ID NO: 258486 - DNA, 1942 bp, Zea mays
cagttgtgtcctgtgcaactgctttgatgcttgttcatatcatccccgacttattgagcgtgaaaactagagagttgttcctgaagaataaagctgaagagcttgacagagagatgggactgataaggacgcaggaggagaccggtagacatgttgaattcggctcgagtgaaatcagaagtactcttgacaggcatatgattttgaagactactcttgttgagctaggaaggaccttgggtctggaggaatgtgcattgtggatgccatctcgaagtggttcaagccttcagctttctcatactttgcaccaccagattactgttggatcatcggtgccaattaatcttcctgtcatcaatcaagtgttcagtagcaaccgggcaattataataccccacacatctcctttggcgcggattcgacctcttacagggcgatatgttccaccagaagtggctgcagtccgtgtacctcttctccacctttcaaacttccaaataaatgattggcctgagctttcggcaaaaagctttgcaatcatggttttgatgcttccatctgatagtgcaagaaaatggcatgtacatgaattggagctggttgaggttgttgctgatcaggtagcagttgcactatctcatgcggctattcttgaagagtccatgcgagcacgtgatttactaatggagcagaatgttgccctggatttagctcgaagagaggctgagatggctatccgtgctcgcaatgattttctagctgttatgaatcacgaaatgagaacacccatgaatgcaataatagccctttcctccttgcttttggaaactgagcttactcctgagcagcgtctaatggtggaaacagtactgaaaagcagcaatctgttagcaacactcatcaatgatgtgctagatctttccaaactcgaggatggaagccttgaactggagattaaagcattcaatcttcatgctgttttcaaagaagtgatgggtttcattaaaccaattgcatctatcaagaggctatctgtatcggttatgttggcaccagatttgccgttatgtgccattggtgatgaaaagagactcatgcaaactattctgaacatctctggcaacgctgtaaagtttaccaaggagggacacatcacacttgtagcttccattgtgaaggctgactctttgagagagttcagaaccccagaatttcatccaactgcaagtgatgaccatttctatttgaaagttcaggtaaaagatacaggctgtggaattggtccacaggatctacctcatgtatttacaaagtttgctcatcctcaaagcggaggaaaccgagggtttaatggtagtggtcttggccttgccatatgcaagaggtttgttagtctcatgggagggcacatctggattgacagcgaaggaaccggaagaggttgcaccgcaacattcgtcgtcaagctcggcgtgtgtgacaacacaaacacctaccagcagcagctgatccctctagtatggccaagcagcgcagactccgatttgcgtgctccgaaacctcttccggacgggagaggatctactcccttgaaatctcggtaccaaaggagcgtatgagcctagtgtaaatgattgacggcatagtgccaagtaggggaccgattagtgccaccgtctaattttgtttgtaaccctgtcatagcaggcatatgatgtacaaatactgtaaagcaaatggagactgcggccgtgtatctgggtggcaacgctgacttgctgcattgagtggtatatacatatgctaccagcggattgaattgcttattctggggtgtgccgagcgcgcccgtgtgcgaccaccgtaaaaacttgtaatcccatattaatcgtgtaatatgaaattcaatgcaaaaaaaaaaaaaaaaaagggcggccgc

SEQ ID NO: 258487 - DNA, 412 bp, Zea mays
gtgcagactccgatttgcgtgctccgaaagcgcttccggacgggagaggatctacacccttgaaatcccggtaccaaaggagcgtatgagcctagtgtaaatgattgacggcatagtgccaagtaggggaccgattagtgccaccgtctaattttgtttgttaccctgtcatagcaggcatatgatggacagggactgttaagcaaatggagactgcggccgtgtatctgggtggcaacgctgacttgctgcattgagtggtatatacatatgctaccagcggatttgaattgcttattctggggtgtgccgagcgcgctcgtgtgcgaccaccgtagcgcgttgctttgtttattcttcctggaatatgaaatccagtgcaaatacacggtaacaagctgttttcggtgct

SEQ ID NO: 258488 - DNA, 1742 bp, Zea mays
gtgctgtctggatgcctgatgagaccaggagcacgatgatcttaacacatcagctgagggaaagggatataatggacccacagaaacactcgattcctattgatgatccggatgttcaagaaataaaggcaaccaaggatgcaaaagttcttggcccagattcggcgctaggggtttctagccgaagcaagcatgaagcagggcctgtggctgcaataaggatgccgatgttaagggtgtcaaatttcaaaggagggactccggaagtgatgcagacgagctatgctatcttggttctggttttgcctaatgatggttcattaggggtcgacccacgcgtccgggagattgttgaggtagttgctgaccaagttgcagtcgctctgtcacatgctgcactcctagaggagtctcagctgatgcgagagaagcttgccgagcagcatagggacttgctgcaggcaaaggatgaagccatgagggcaggggacgctaggaattccttccagactgcaatgtacgatggaatgcgaaggccaatgcactcaatccttggtctcgtctcaatgatgcaacaggagagcatgaatccagagcaaaggcttgtgatggatgccattgccaagacaagcagtgttgcatccacactgatgaacgatgtgatgcaaacatcgacaatgaactgtgagcacttgtctttggtcaggaggccgttcaaccttcattccttcattaaagaagttgttggagtggtcagatgtctaactggttgcaagggtgtggagtttgagtttcaagtggagaattctttgccagaaaggatcattggtgatgagaagagagtcttccatattgtcctgcacatggtaggcactctaacagaccgatgtaatgctggctgtatctcattatatgtaaatgtccataatgaggttgaagataggcataatcatgactggatgctgcgaagagcaaacttctctgggggctatgtatgtgtgaaatttgagattaggattagaaaatcaaagggctatctgttgagttcatcaagcagtcagataagtcagggatccaaacccaacaattctgagatggggcttagcttcaatatgtgcaagaagattgtgcagatgatgaatggcaatatttggtcagtatcagattctaaaagcatcggagaaactatcatgctagtcctccagttccagttggaacctgtgactccggtctctggagcgtcctcagatttgtacagatcatccgcaattcccaactttaatgggctcagagtcctccttgcggacagcgactgcaccaaccgagctgtaactcacaggctcctagagaagcttggttgccgagtcctttcggtcgcttctggcgtccaatgcatcagctccttcgctgcggagtcgtccttccagctggtggttcttgatcttgacatgcagacgatggatggattcgaagtagcccgcgcgatcaggaagttcagtagcaatagttggctgccgttgattattgccctagcagcaagaatcgacgacaacatccgggatcgttgccagaggtcaggagtaaatggcctgatccagaaaccggtcacattagccgcgctgggagatgaactgtatagagtccttcagaacaattaaaagagcctgacggttctcatttctttcaatctcaatagattgctatagcttgatcggtaaaaaaaaaaaaaaaagggcggccgc

SEQ ID NO: 258489 - DNA, 294 bp, Zea mays
tgtgcaagaagattgtgcagatgatgaacggcaacatttggtcagtatcagattctaaaagcgttggagaaaccatcatgctggtcctccagttccagctgcagcctctgactgcggtctcctccgcggcgtcttcagacttgagccgatcgtccgcaatccccaacttcaacgggctcagagtcctcctggcggacagcgacgactacaacagagcagtaacacacaggctcctggagaagctcggctgccgggtcctttcggtcgcatccggtgtccaatgcacgagctcct

SEQ ID NO: 258490 - DNA, 2167 bp, Zea mays
attcccgggtcgacccacgcgtgcgcggacgcgtgcggcttcttgttgccaaagaattccctcccctagccgccgccgccgccgctcgtctccctgagaggtgccgggaccgaggaactggccgagttctaggtagagaatcggtttttcttgtctcagcccggggtctgctgcgtctggtggtggtgaaggggagaaattcgtgagatctgttccggatcaggcgtgcgagctcgggaatcaggggtttcacacatagcttcgtcgatttgaatttgatgtactaatggagtctaagggtggcaaaaagtctagcagtagtcgttctatgatgtatgaagctccccttggctacagcattgaggacgttcgacctgccggaggcgtgaagaagttccagtctgctgcttactccaactgcgcgaagaagccatcctgatatcccttttggcttcctcattctagtagtttaggatttcttttctgacactttgattctgaccaatctctctggcctgctgcttcctgataatcgaccagttccccagtcttgctccttgcactcctccctccatctccagcattgtgttctgattcacctgctccaatggctgttctttctgctgctgatgcttccccggtctcagctatcgggtttgagggctatgagaagcgccttgagatcacattctctgaggcacctgtctttgtggaccctcatgggcgtggtttgcgtgccctctccagggcccagattgactctgttctggatcttgcacggtgcacaattgtgtccgagctctccaacaaggatttcgactcatatgtcctctctgagtcaagcttgtttatctatcctctgaagattgtcatcaagacctgtggcactaccaagctcctgctcaccattccaagaatccttgagcttgctgaagagctgtctatgccacttgctgctgtgaagtactcccgtgggacgttcatctttcctggcgcacagccagccccccacaggagcttctctgaggaagttgctgcacttaaccgctactttggcggcctgaaatctggtggtaatgcttatgtgattggagatccagcaagacctggacagaagtggcacgtcttctacgccactgagtacccagagcaaccaatggttaaccttgagatgtgcatgactggtctggacaagaagaaagcttctgtctttttcaagactaatgctgatgggaacacaacatgtgccaaggaaatgacaaagctctctggcatctctgaaatcatccccgagatggagatctgcgattttgactttgaaccctgtggctactccatgaatgcgatccatggctctgcattctccacaatccatgtgacgcccgaggacggtttcagctatgccagttacgaggttatgggcttggatgccactgctctgtcttatggtgaccttgtcaagagggtcctccggtgctttggcccctcggagttttccgttgccgtgaccatcttcggcgggcgtggccatgccgggacatggggaaaggcacttggtgcagaggtctatgactgcaacaacatggtggagcaggagctgcctggaggcgggctcctcgtgtaccagagcttctgtgctgctgaagacgctgttgctacctcgcccaaatctgttttccactgctttgacggcgagaacgtggagagtgctcctcctcctatgaagaaggactacaaactggctaatcttctctgctgggaggaggaagcggatgccatggaggagaaggcgggagtgcttgatgagtaagacgggcttctggggtcgatttgcttctgagttgtttattttatatcgtcgcaatttcgtggttgtcgtttggttattctgtgaagcagccaagccaggctattgttatgaaaatttgtcgtctgtaagcatgtgaacttccgatgttgccacatgctggatcagtctgaataagtaagtatgcagctctaggtggtcagctgcgtctaccacaatgagcatgtacgtatggagaaatatctgtgaacccattttgtttatgaataagatttgttttttttcgatttaaaaaaaaaaaaaaaaaaaaggaaacaaaaaaaaaaaaaaaaaaaaaaagggcggccgccccggtcattc

SEQ ID NO: 258491 - DNA, 1171 bp, Zea mays
gggtccacgcacgcgtccgcacacgagtccgcccacgcgtccgcccacggtctggtggcaatgcttatgtgattggagatgcagcaagaccaggacagaagtggcacatctactacgccactgagtacccagagcaaccaatggtcaaccttgagatgtgcatgactggtctggacacgaagaaagcttcagtcttcttcaagactaatgctgatggcaacacaacatgtgccaaggaaatgacgaagctctctggtatctctgaaattatccctgagatggagatctgtgattttgacttcgaaccctgcggctactccatgaatgcaatccatggctctgcgttctccacgatccatgtgacgcctgaggatgggttcagctacgccagttatgaggttatgggcttggatgccactgccctgtcttacggtgaccttgtcaagagggtccttgggtgcttcggcccctcggaattttctgtcgccgtgaccatcttcggcgggcggggccaagctgggacatggggaaaggaacttggtgcggaggcttatgactgcaacaacatggtcgagcaggagctgcctggaggtgggatcctcatctaccagagcttctgtgctgctgaagacgccgttgctagctcgcccaaatccgttcttcgctgctttgatggcgagaatgcagcaccttttgcgaaggactgcaagctggctaatcttgtctgcttggaggaagttggatgctatcgaggagaaggatggagtgcttgatgagtaagacgggtttctggtgtcgatttgcttctgagtttttttctttttatatcgttgcgatctcgtggttgtcgtttggttagcagccaagccaggctattagtacgaagaatgtcgtctataaacatgtgttcctacgttgccacatgctgagtcaatctgtatacagctagctctaggtggtcagctgcgtctaccacaatgagcatacatgtatggataaatcttctgtgaaagcattcgatgaataagggttgttttcgtgaataaatataaataagtgctattctctctaaaataatctattcttaccttactcttttctttcttatttttaatctctttattatttttatttttattttatattattttttccttttttttacaatttt

SEQ ID NO: 258492 - DNA, 872 bp, Zea mays
acgcgtccgcgctttgttaacaaagaattccctcatagccgccgccgccgccgccgccgccgctcatctcgccgagaggtgacgggaccgaggaactcgccgagttctaagatagagaatcgcttttcacagcctggggtctgctgcgtagggtggtgttgaaggggagaagtttaagatctgttccacagatcacgcgtgcgcgctcgcgaatcgggggttccacacatagcttcgtcgttttgaatttgatgtactaatggagtctaagggtggcaagaagtctagcagtagtcgttccatgatgtatgaagctccccttggctacagcattgaggacgttcgacctgccggaggcgcgaagaagttccagtctgctgcttactccaactgcgcaaagaagccatcctgatatcccttttggcttcctcgttctagtagtttaggatttcttttctgacacttcgattcttaccaatccccctggcctgctgctttcctgacaatcgaccagttccccagtcttgctccctgcagtcctccctcctccatctccagcgttgtgttctgactcacctgcaccaatggctgttctttctgctgctggtgctcccccggcctcagctatcgggtttgagggctatgagaagcgccttgagatcacattctctgaggcacctgtctttgtggacccccatgggcagcggtttgcgtgccctctccagggcccagattgacttctgttctggatcttgcacgtttcacatttgtgtctgagtctttttaacattgatttcttctcatatgttctttttttatttttgctatttttatttattcttttttatttgtcttttttatcctttttttta

SEQ ID NO: 258493 - DNA, 500 bp, Zea mays
tgatttgttgatttgactatggaacataagggcggagatgaaggttgtggtcaggacagttatttcactcaccaaggaggaagcggatgccatggaggagaaggcgggagtgcttgatgagtaagacgggctgctgagggtcgatttgcttctgagttgtttattttatatcgtcgcaatttcgtggttgtcgtttggttattctgtgaagcagccaagccaggctattgttatgaaaatttgtcgtctgtaagcatgtgaacttccgatgttgccacatgctggatcagtctgaataagtaagtatgcagctctaggtggtcagctgcgtctaccacaatgagcatgaacgtatggagaaatatctgtgaacccattatggctatgaattacattttgccttttcgaaataagaatactggcggcgtctgttcaagatatggtttgagcctgtgctttctatttttctgaagaccggtctacttgacgctaaattcgca

SEQ ID NO: 258494 - DNA, 500 bp, Zea mays
  unsure (1)..(500): unsure at all n locations
gaccggtttctgaatttcccgtttcgacttgcgcacgcgtgggcggtcgcctcccctagccgccgccgccgcgctcgtctccctgagaggtgccgggaccgaggaactggccgagttctaggtagagaatcggtttttcttgtctcagcacggggtctgctgcgtctggtggtggtgaaggggagaaattcgcgagatctgctccggatcaggcgtgccagctcgggaatcaggggtttcacacatagcttcctcgatctgaatctgatgtactaatggagtctaagggtggcaaaaagtctagcggtacatcgttccatgatgtatgaagctccccttggctacagcattgaggacgttcgacctgccggaggcgtgaagaagtttcattctgttgcttactccaactgcgcgaagaagccatnctgatatcccttttgggcttctcatttctagaggttaggatttcttttctgacactttgatttgaccaatctctc

SEQ ID NO: 258495 - DNA, 907 bp, Zea mays
tttgttgtggcagcgccaccaccagctccacccgatgctcgtactcaagaaatgatcaatgaaaagcttaagaaagctgaagagcttggggaacaaggcatggtccatgccgcccggaaggctttggaagaggcagaagctctgataaagctggcgcgacgtccggagccacctgcagacccttctaaatatactgccgctgatgtttggattaccgatcaaaagttgcgcctctgtgatatatgtggagcatttctgagtgtatatgacaatgatcgacgtcttgctgaccattttggagggaaactgcatctaggctacatgctgattcgtgacaaacagaaagaacttcaggagcagagaaacaaaaggaggacaggcaaaactgaagatgataggcgatctagagagcagagcaaggatcgaaacggcccgccgtccagggatagagattcagaaaggagagacagggttgagtctcgagatggaagaagagattatgatagggaacgcgataggcgtcacgatagggaccgtcgccatgaccgcgaccgggatagggattatgaccgctcccgcggatatgactcaaggagaagagagcgttcacgctccagggagcgcagcaggcgccatgagagatactaaatgttactccatggctgacagattttggattgctggcgtctgttctggtttgtgttgtgctttgtgtcttatcttccgaagtttcctgttcctgctcgagaaatccgaaagccaatctgcgttctgcatcatgtcatgtcctagtgtcgtactgtttagttatatgccgagaacatctctttcatcaaatgaatatttggaaacaccaacgcacttgacgctaaatgggaatgaagtgtggagtatttaaacgcctctg

SEQ ID NO: 258496 - DNA, 1644 bp, Zea mays
gccgtgtctggctaacaagagcgcctaattccgcacctcttgtgaaaactccacttcactcaaaacatctagcactaatgtgaaggccgattttttgagcctgctgggactggaccccgttgtgttcttccgatgatcaatcagtcaatcacagattcaaaccatacaaatcaacagctcaatatccagcgtgcttttggaagtctgttcaaggggtggagtgaggagaagatatattttgctcccacatacaagtactcttgcaattcagattcttatgctggagagactgccacatcaaagaaaaagaggagaaccccagcctggtgtgaaagaatactatggcatggagatggtattgcacagttgtcctacttccgggggggatctcaattctctgaccatcgtcgtgtttgtcggacatttactgttgaggttaaaaggctagatggccgatcaatgcggcgcccatcaaacaccaacattagaatcgatgctgaagagttgttaccgacaagagacaagcataactaaggtgatctagatggatgaaattgtcgacaaggccattagcatcatgcaggttacctcaaagcatctcatgtatatccgcaaggagaagctgcacccagggaaggcattgagtgcaatagaggtgaaggaactgcgcgaagcccttgaagcgattgctgaaggtttggaccaagattcactcttgtgccagagtttggcgtagtactcgattacaaactgtgtactatgttaatgtaatgacatagtttgtatgatacagatcgtagtgatgttgtttgaagctgtttgtatgaactgtttcctactatcttgtatgaattatgatgtctgatgtagtttgtatgaactatgtcatattatgttgaatgaagctattgcatgcccttaaaatgtaacacccgacgtctagttgaatctctccagttacgaggttatgggcttggatgccactggtctgtcttatggtgaccttgtcaagagggtccttcggtgctttggcccctcggagttttccgttgccgtgaccatctttggcgggcgtggccatgccgggacatggggaaaggcacttggtgcagaggtctatgactgcaacaacatggtggagcaggagctgcctggaggcgggctcctcgtgtaccagagcttctgtgctgctgaagacgctgttgctacctcgcccaaatctgttttccactgctttgacggcgagaacgtggagagtgctcctcctcctatgaaggactacaaactggctaatcttctatgctgggaggaggaagcggatgccatggaggagaaggcgggagtgcttgatgagtaagacgggcttctggtgtcgatttgcttctgagttgtttattttatatcgtcgcaatttcgtggttgtcgtttggttattctgtgaagcagccaagccaggctattgttatgaaaatttgtcgtctgtaagcatgtgaacttccgacgttgccacatgctggatcagtctgaataagtaagtatgcagctctaggtggtcagctgcgtctaccacaatgagcatgtacgtatggagaaatatctgtgaacccattttgtttatgaataagaattttgttttttcgaagt

SEQ ID NO: 258497 - DNA, 573 bp, Zea mays
  unsure (1)..(573): unsure at all n locations
gtctgctccacctcaagtggcagcagttccaccaccagctccacctgatgctcgtactcaagaaattatcaacgaaaagcttaagaaagctgaagagcttggtgaacaaggcatggttgatgaagctcaaaaagctttggaagaggcagaagctctgaaaaagctggcgccacgttcagagccaccttcagacccttcgaaatatactgctgctgatgttcgaattactgatcaaaaattacgcctctgtgacatatgtggagcatttctgagtgtatatgataatgatcgacgtcttgctgaccattttggtgggaaattacacctaggctacatgctgattcgtgagaaacagaaagaacttcaggtgctgaatgtaatgtaccattttctgctttaaagagttactctgttttggcccttttggcatatgaattagtccatgttgcgtgattggaatctcatgcgatcatcttcatacccatggatacaacagtcactgtctgttggcaaatgtaagcataggagggtgcagaccatggtatgaanaaaaacatgtttacttaattgtgg

SEQ ID NO: 258498 - DNA, 1825 bp, Zea mays
ctccgaacctagccaaccagccccagcgcccaacgcacgaactgtaagactccctagcggagcaactgacacactcgcctacatcctcggccgccagctcgccaccatcgcctcccggtcggccgcgccacctcccggaagattggataacaatatcatgccattaggtggataacatttgacgtgctcctggtttgttcatttccgggcatcatcaaaatgtcaggaccgctgaattcaaacattagtggggccccctcgaaccttagagattccacaggaaggccatttacatcatcgttttctggtcaatctggatcacttccaggttttcatcactcaggttcacacaacattcatggaaatcttaatcttgcgcgtggctctggatcattagcaccacgaaataattcaatggcaggcattccgtctgcaggggttcaacaacccagtggtggcatttccagtggccgtttccctccaaataatcttcaagcttccttgtctcagattcctcatgggcattctgggattagcaacagaggaggtatgaatgttgggggaaatcctggatttggtagtagcatgaatgctattggtggttcaatacaaggtttatcctcaaacttggctaatgtgggtaaccgcaattctgctcctgggttggcagcttcgccggtcttaggaaatttaggcccaacaatagcaagttctgggaatattttgggtgggagcaatattgggagaagtataagctctggaggactgtctatgcctggtattgcatctcgcatgaatttaagtggcaactctggtagtggggctatcaacattcaaagatccaaccgtattggtatgcttcaacaagcatccccacaatttatgaacttgcttggaagttcttacccaacacctggagggtcactatctcagaatcaagtacagtcaggaagtggttctttgggatcttctggaatgctatatgaaggaagctcgggtgacaatgctccatttgatattaatgactttcctcagttaactggacgacctaattctgctggaggtggtcaaggacaatatggatcattgagaaagcatggagtaagcgtcaatgccattgtacaacaaaaccaggaattcagcattcagaatgaagattttccagctttaccaggaaataaagggagttcctcagattatcctatggatattcatcacaaggaccaccttcatgagaatataaatattatgcaagcacaacattatcctatggctagaccatctggctttagcttgggaagcagttatccaccccgtcaacatcagcagagtgctaattcagttcaaaatgctgggctggaaactattggactaagaccggcaaattctccaagtctgtcaactaattcaggggtttatgagcaattcatgcagaagtaccatcaaccacagactcaaaattcacttaggttgcaggcagcttcaggtcctcaacagtacaaggatcagagccaaaaatccgttcagggaacacaggctgtgccggatccatatagcttacttggactgttgagtttaataagaatgaaagagcctggaccaacaactcttgctttagggattgatttgacctcgttggggttgaatttgaactcccaagataatctttacaagacatttggctctccgtggtcaagcgagccagctgtaggagaacctgattatcagatcccagcttgtttctctgcagagccaccacctgcactgcaaaagtttcaccctttgacactattgtacatctttcacagcatgcctaaagatgcca

SEQ ID NO: 258499 - DNA, 439 bp, Zea mays
cccacgcgtccgcccacgcgtccgcccacgcgtccgcccacgcgtccgcccacgcgtccgagcctctgaagattgtcatcaagacctgtggcactaccaagctcctgctcaccattccaagaatccttgagcttgctgaagagctgtctatgccacttgctgctgtgaagtactcccgtgggacgttcatctttcctggtgcacagccagccccccacaggagcttctctgaggaagttgctgcacttaaccgctactttggcggcctgaaatctggtggtaatgcttatgtgattggagatccagcatgacctgtacagaagtggcacgtcttctacgccactgagtacccagagcaaccaatggttaaccttgagatgtgcatgactggtctggacaagaagaaagcttctgtctttttcaagacttatgctgatgg

SEQ ID NO: 258500 - DNA, 749 bp, Zea mays
ccgcctgccggggcccggaacggactgtggccggctccgcgcgacgcgttcttccattcgtccgacatgaatgaccatccgctagccgccgtcttggctaggctgcatgagaggtgccggacccaatgcactcagccagttataggtagagaatcagggacgcttgtctcagaacggggtctgctgcacttggtggtggtgaaggggagaaattagtgagatctgttccggatcaggcgtgcgagctcgggaatcaggggtttcacacatagcttcgtcgatttgaatttgatgtactaatggagtctaagggtggcaaaaagtctagcagtagtcgttccatgatgtatgaagctccccttggctacagcattgaggacgttcgacctgccggaggcgtgaagaagttccagtctgctgcttactccaactgcgcgaagcaagccatcacaatggtgctctttattctacctcttgtgttttattagatatgttgatagtaacatctattttttcttgttgcagtgcgcgaagaagccatcctgatatcccttttggcttcctcattctagtagtttaggatttcttttctgacactttgattctgaccaatctctctggcctgctgcttcctgataatcgaccagttccccagtcttgctccttgcactcctccctcctccatctccagcattgtgttctgattcacctgctccaatggctgttctttctgctgctgatgcttcccc

SEQ ID NO: 258501 - DNA, 1283 bp, Zea mays
  unsure (1)..(1283): unsure at all n locations
actgaaagaacttcaggtgctgagtgtaatgtaccgttttctgctttaaagagttactctgttttgggccttttggcatctgtgagttttcttatctcaagagcctcaaggaattagtccatgtcgcgtgattggaatctcatgcgatgatcttcatacctatggctacaacagtcactgtctgttgacaaatgtaagcataggagcgtgcggaccatggtatgaaaaaaatcatgtttacttaattgtgacaaactgctcatgtgtctgcttagtatcgattgttgggcagaagctggaggttgcctttttactgcctgagccatattatgtagaccaggtgacaaataatactggttaagttatcctgaaagcacacttcttttgccaaaagaagtgtgctgtaagtgacaacttgttctgttttctatctgctacctcctccataagtttgcaagttacattttgctgaagcaaccttgcctgtaaagtatcgcccgccctatcttttggaacgttgtctctgattttaaatatgccataatatcattatctgtactgtcaataaacaaaatacactgtggcatcttgcaggagcagagaaacataaggaggccgggcaaagctgaagatgatagacgatcaagagagcacagcaaggatcgcaacggccggtcgtccagggatagagaaccagaaaggagagacagggttgagtctcgagatggtagaagagattatgaaagggatcgtgatagacgtcatgatagggacaggcgccatgaccgtgatcgggatagggattatgaccgctcccgtggacatgattcaaggaggagagagcgttcacgctccagggagcgcagcaggcgccacgagagatactaaatgttacaccatgcctgacagatttaggagtactggcggcgtctgttcaagatatggtttgagcttgtgcttcgtatcttctgaagaccggtctacttgacgctaaattcgcatggagtgttaagcatttattaaacgcatctggaatcaaatgaagttgtacttgcgaacggcttcacttaaaattcgcgccatttctaatattgtaataagctgtgcttgaaccttagctgtctctgtgtactcgacgtaccactcgctcccacaaatagcttcgaacatcctgtacctgaaacatgacgctgtttggtggaggtggagctgtaagtgttcttttgcacaattcattataaaaatcccaaatctgagtcctaggaaaaaaaaaaaaaaanaaa

SEQ ID NO: 258502 - DNA, 516 bp, Zea mays
tccctcgcgtccgcccacgcgtccgagacaagccaaacgagggcatccctcccgcccccgcacgcgtcgggttgccaaagaattccctcccctagccgccgccgccgccgctcgtctccctgagaggtgccgggaccgaggaactggccgagtactaggtagagaatcggtttttcttgtctcagcccggggtctgctgcgtctggcggcggcgaaggggagaaattcgtgagatctgttccggatcaggcgtgcgagctcgggaatcaggggtttcacacatagcttcgtcgatttgaatttgatgtactaatggagtctaagggtggcaaaaagtctagcagtagtcgttctatgatgtatgaagctcccctcggctacagcattgaggacgttcgacctgccggaggcgtgaagaagttccagtctgctgcttactccaactgcgcgaagaagccatcctgatatcccctttggcttcctcattctagtagtttaggatttcttttctgacac

SEQ ID NO: 258503 - DNA, 479 bp, Zea mays
cccacgcgtccggactagttctagatcgctagccgcacgcttcttgttgccaaagaattccctcccctagccgccgccgccgctcgtctccctgagaggtgccgggaccgaggatttggccgagttctaggtagagaatcggttttacttgtctcagcccggggtctgctgcgtctggtggtggtgaaggggagaaattcgtgagatctgttccgcagatcacgcgtgcgcgctcgcgaatcgggggttccacacatagcttcgtcgctttgaatttgatgtactaatggagtctaagggtggcaagaagtctagcagtagtcgttccatgatgtatgaagctccccttggctacagcattgaggtcgttcgacctgccggagggcgaagaagttccagtctgctgcttactccaactgcgcaaagaagccatcctgatatgccttttggcttcctcgttctagtagtttaggatttct

SEQ ID NO: 258504 - DNA, 720 bp, Zea mays
acctcgcttcttgttgccaaagaattccctcccctagccgtcgccgccgctcgtctcagctatcgggtttgagggctatgagaagcgccttgagatcacattctctgaggcacctgtctttgtggaccctcatgggcgtggtttgcgtgccctctccagggcccagattgactctgttctggatcttgcacggtgcacaattgtgtccgagctctccaacaaggatttcgactcatatgtcctctctgagtcaagcttgtttatctatcctctgaagattgtcatcaagacctgtggcactaccaagctcctgctcaccattccaagaatccttgagcttgctgaagagctgtctatgccacttgctgctgtgaagtactccccggggacgttcatctttcctggcgcacagccagccccccacaggagcttctctgaggaagtttgctgcacttaaccgctactttggcggcctgaaaatctggtggtaatgcttatgtgattggagatccagcatgacctgtacagaagtggtacgttttttacgcctcttagcacccagagcactcaatgttaaccttgagatttgcttgacttgttttgaccagaagtaagcttgtgttttttcaagactatagctattggacatcactagtgccaggttatgtcaatctttttgttttttttaatcaatcctgtatgggatttcttttttacttt

SEQ ID NO: 258505 - DNA, 354 bp, Zea mays
gtaccgcgctttgtcaacaaagaattccctcatagccgccgccgccgccgccgccgccgctcatctcgccgagaggtgacgggaccgaggaactcgccgagttctaagatagagaatcgcttttcacagcctggggtctgctgcgtagggtggtgttgaaggggagaagtttaagatctgttccacagatcacgcgtgcgcgctcgcgaatcgggggttccacacatagcttcgtcgctttgaatttgatgtactaatggagtctaagggtggcaagaagtctagcagtagtcgttccatgatgtatgaagctccccttggctacagcattgaagacgttcgacctgtcggagg

SEQ ID NO: 258506 - DNA, 510 bp, Zea mays
tattttagttttggtggtctctgtttggtgtccctgactgacattagtgtttttgttgtaggtgatctagatggatgaaattgtcgacaaggccattagcatcatgcaggttacctcaaagcatctcatgtatatacgcaaggagaagctgcacccagggaaggcattgagtgcaatagaggtgaaggaactgcgcgaagcccttgaagcgattgctgaaggtttggaccaagattcactcttgtgccagagtttggcgtagtactcgattacaaactgtgtactatgttaatgtaatgacatagtttgtatgatacagatcgtagtgatgttgtttgaagctgtttgtatgaactgtttcctactatcttgtaggaattatgatgtctgacgtagtttgtatgaactatgtcttattatgttgaatgaagcttttgcatgcccttaaaaaaaaaaaaaaaaaaaaagtagtctaaaaaaaaaaaaaaaaaaaaaaaaaaaaaacaaaat

SEQ ID NO: 258507 - DNA, 536 bp, Zea mays
ccctttcgtccgacttatcctcaatctaaatctataaaggtgcaatttatcaggtgctgagtgtaatgtaccgttttctgctttaaagagttactctgttttgggccttttggcatctgtgagttttcttatctcaagagcctcaaggttctcaccttccctctatatattatttgattctcacattgccgggcactatggttattacgatagtcattacaggaattagtccatgtcgcgtgattggcatctcatgcgaccatcttcatacccatggctacagcagtcactgtctgttggcaaatgtaagcataggagcgtgcggaccatggtatgaaaaaaatcatgtttacttaattgtgacgaactgctcatgtgtctgcttagtactatgctgggcagaagccggaggtttcttttctactgcctgagccatatcatgtagaccaggcgataaatcatactggttaagatatcctgaaagctttgccaacatttgatgcaagtgacaacttgttctatttttctatatgcta

SEQ ID NO: 258508 - DNA, 886 bp, Zea mays
tcagaccacaatgctgaagatgaaggaggagtgcaagagcaagactggggaactggtcgattatcagaaagcagcaggccagagagattggtcagaatcaaagtgtcagaaaaaaaatcctaaactactagaatgaggaagccaaaagggatatcaggatggcttcttcgcgcagttggagtaagcagcagactggaacttcttcacgcctccggcaggtcgaacgtcctcaatgctgtagccaaggggagcttcatacatcatagaacgactactgctagactttttgccacccttagactccattagtacatcaaattcaaatcgacgaagctatgtgtgaaacccctgattcccgagctcgcacgcctgatccggaacagatctcacgaatttctccccttcaccaccaccagacgcagcagaccccgggctgagacaagaaaaaccgattctctacctagtactcggccagttcctcggtcccgcggacgcgtgggcggacgcgtgggcggacgcgtgggcggacgcgtgggatcgggtttgagggctatgagaagcgccttgagatcacattctctgaggcacctgtctttgtggaccctcatgggcgtggtttgcgtgccctctccagggcccagattgactctgttctggatcttgcacggtgcacaattgtgtccgagctcttcaacaaggatttcgactcatatgtcctttctgagtcaagcttgtttatctatcctctgaagattgtcatcaagacctgtggcactaccaagctcctgctcaccattccaagaatccttgagcttgctgaagagctgtctatgccacttgctgctgtgaagtactcccgtgggacgttcatctttccttgcgcaca

SEQ ID NO: 258509 - DNA, 314 bp, Zea mays
cccacgcgtccgcccacgcgtccggtttatatcatgtcaagattgaacacatcacctttggtaaaactacttgaattgttattttccttttccacaagaggtacatggcagattcctgttgagatttgatcttttggtgcctgttaagctttctgaatgtgaattactaaccatagtgaccttgtattaggttcaaaatgctgggctggaaactattggactaagaccggcaaattctccaagtctgtcaactaattcaggggtttatgagcaattcatgcagaagtaccattagccacagactcaaaattcac

SEQ ID NO: 258510 - DNA, 310 bp, Zea mays
aaaaccgtgcgatctcgtggttgtcgtttggtaaccagccaagccaggctattagtacgaagaatgtcgtctataaaacatgggttcctacgttgccacatgctgagtcaatctgtatacagctagctctaggtggtcagctgcgtctaccccaatgagcatacatgtatggataaatcttctgtgaaagcattcgatgaataagggttgttttcctgattcaaaaaaaaacaaaaaaaaaagaagaaataaaaaaaacaaggaaagaaaaaaaaaggaaagagaaaaaaagaacagatgaggacaagag

SEQ ID NO: 258511 - DNA, 380 bp, Zea mays
cgtctccctgagaggtggcgggaccgaggaacttgccgagtactaggtagagaaattcgtgagatctgttccggatcaggcgtgcgagctcgggaatcaggggtgtcacacatagcttcgtcgatgtgaatttgatgtactaatggagtctaagggtggcaacaagtctagcagtagtcgttctatgatgtatgaagctccccttggctacagcattgaggacgttcgacctgccggaggtgaagagttccatctgtgttatccactggcgagagccatctgtatccatggctctcatctagtagtaggattcttctgacactttgatctgacaatcccggctgtgttctgtatcgacattcccgcttgtcttgatctcc

SEQ ID NO: 258512 - DNA, 2230 bp, Zea mays
tcatcgcgtccgcggacgcgtggggaaccaacgaagctctggttgttggtaggtgcacgcaccccatccccccacccaatccctcgcggcgggcgggcgagagagcgagcggcgatggcggcactggaggcggtgagggcgtgggcggtctccgtcatcccgccggagctcgccgccgccgcggggggagacccgctcgccgcgctggcggccaccgccgcggccctcgtcgcggggctgcttatcctcgccgtctggttccgatccggaggcggggcgccgtccaagccggtcgccacgccggtacggccaccgccggtcaaggtggacgccgacgccgacgttgatgacggccggaagcgcgtcaccatcttcttcggcacacagaccggcaccgccgagggattcgccaagtcgatggcggacgaggcgagggtgcggtacgagaaggccgtgtttaaagtggtggatctggatgactatgctcaggaggacgaggaatacgaggagaagctgaagaaggaaactgtggtgctgttcttcctagcaacatatggggatggggagccaactgataatgcagcacgattctacaaatggtttactgagggaaaagagaaggaagtttggttgaaggatcttaaatatggtatttttggccttggaaacaggcaatacgaacattttaataaggttgcaaaggtggtagatgagctagtagaggagcagggtgggaaacgtcttgttcctgttggccttggagatgatgatcagtgcattgaggatgatttcactgcatggaaagaactagtgtggccagaattagatcaattgctccgcgacgaggatgacacaactggtgcatcgactccatatactgctgctattcctgaatacagagttgttttcattgacaaatctgacctgtcattccaagatagatcatggacactagccaacggtactggtgtgattgatattcaacacccttgcaggtctaatgttgctgttcggaaggagctgcacaaaccagcttcagatcgctcttgtatccatctcgagtttgacatttctggcactggtcttgtgtatgaaaccggagaccatgttggtgtatatgcagaaaattctgttcagactgtggaggaggttgaaaggctacttgacctttctccagacacattcttctccatccatgcagatgcagaagatggatctcctcgtaaaggaggaggttccttggccccacctttcccatctccatgtaccttgcggactgcgcttctacgatatgctgatctactcaatccaccgaagaaggctgctttgcttgctttagcttctcacgcatctgatccagctgaagctgagcgacttagattcttggcttctccttctggaaaggatgagtattctcaatggataactgctagtcagaggagccttcttgaagttatggccgcattcccttcagctaagccaccactgggagtgttttttgcagcaatagctcctcgtctgcaaccacgatactactcaatttcatcatctccaaagatggctccctccagaattcatgtaacatgtgcattagtttatgggccttcaccaacaggaaggatccaccaaggagtttgttcaacatggatgaagaatacaattcctctggaatatagcgaagaatgcagctgggctcccatctttgtgaggcagtcaaatttcaagttacctgctgacccatccactcctattatcatgattggtcctgggacagggctggctccttttagaggcttcttgcaggaaaggttagcattgaaacaatctggggcagaactgggcacttcaatccttttctttggatgcaggaaccgtaatatggactacatatatgaagatgagttgcaaactttccttgaggagggggcgctttctgagctaattgttgcattctctcgggaagggccaacgaaagaatatgtgcagcataagatggtggaaaaggccacagatattataaaattgtgtatccctaacaagtttgtagcaaagggggtacataattacagtttgagatgaggacatcatttatactgtttgagacgaggacattatgtatatacttggtacattagaaggccaccgaaaacaaattttgcatctggtttttgaaagcatgtaatccttccaaaaaaaaaaaaaaaaaaaaaaaaaaaaaaagggcggccgc

SEQ ID NO: 258513 - DNA, 509 bp, Zea mays
gctccattaaaaggtttgaggaaggtaattaatgggtgatctatctatggtcatcattttgtgttgaaaaaacagatgcaaattattatggcaacaatcatgttactattgttctacaagaggccaatttttttgtagaccgattggcttgctaagttttggtgctactatatctgtggtgatcttttaactggaggaacatatttaaaggcctcaacaaaggagaaccaggccaagctgtcggtcgtgcgttcacaaatatatttaaatcttccgccatgaaattatttaaatcttacagttcaggcaccagctaagcctaagatgctgagtttccatatgtgataatgttggactgtcttgttcatatcggtgtggcatatcattatgcttgaggtggtggtatgtaccttccattaggtaggcctcttgacaacttatgtctcagcaggatggctccctctagaattcatgtaacatgtgcattagtttatggggcttcaccaaca

SEQ ID NO: 258514 - DNA, 920 bp, Zea mays
cccacgcgtccgcccacgcgtccgctgatccgtccactcctattatcatgattggtcctgggacagggctggctccttttagaggcttcttgcaggaaaggttagcactgaaacaatctggggcagaactgggcacttcaatccttttctttggatgcaggaaccgtaatatggactacatatatgaagatgagctgcaaactttccttgaggagggggcgctttctgagctaattgttgcattctctcgggaagggccaacgaaagaatatgtgcagcataagatggtggagaaggccacagaaatttggaacatcatctcaaatggtggttacttatatgtttgcggtgatgccaagggaatggctagagatgtacacaaaatgcttcatacaatagtccaagagcagggatctttggataactccaaaaccgagagctatgtaaagagcctgcagatggaaggaaggtacctccgtgatgtatggtgacacatcacctcaaataagccatagctctagcgtgtggaagtaaagctggctttgcgtgtatgacatgtctaatgccaacccaatcgtcagctttggaatgaagcgtgccattgatgatatactgaaatgagttgatcagtgcaattctttgacatctaactatttattattatatgagatgggaggaactgatggagaataaatgctgctgtagatttgtagaagttcaaaaaaattgggtacccctgacaagtttgtagccaagggggtacatcatacagtttgagatgaggacactatgtatactgtttgagacgaggacattatgtatactactctagaaggctaccgaaaccaaattttgcatctgtttattaaaagcttgtacttctaaaaaaaaaaattagataaaaaaaggactggaatacc

SEQ ID NO: 258515 - DNA, 836 bp, Zea mays
cagtacggtcggaatccgggtcaccacggacgacaggtcgaaacggtccgcggacctgggctccttttagaggcttcttgcaggaaaggttagacttgaaacaatctggggcagaaatgggcacttcaatccttttctttggatgcaggaaccgtaatatggactacatatatgaagatgagttgcaaactttccttgaggagggggcgctttctgagctaattgttgcattctctcgggaagggccaacgaaagaatatgtgcagcataagatggtggaaaaggccacagatatttggaacatcatctcaaatggtggttacttatatgtatgcggtgatgccaagggaatggctagagacgtacacaggaggcttcatacagtagtccaagagcagggatctttggatagctccaaaaccgagagctacgtaaagagcctgcagatggaaggcaggtacctccgtgatgtatggtgacacatcacccccattcagccatagctctagcgtgtggaagtaaagctggctttgcgtgtacgacatgcctaatgccaaatgaagcgtgccattgtttagaaactgaaatgttcagtcgatcagtgtaattctttgacatctaactatttatcattatatggaatgggaggaactgttgtagatttgtagaactacaaaaaaactgtgtatccctaacaagtttgtagcaaagggggtacattattacagtttgagatgaggacatcatgtatactgtttgagacgaggacattatgtatatacttggtacattagaaggccaccgaaaacaaattttgcatctggtttttgaaagca

SEQ ID NO: 258516 - DNA, 614 bp, Zea mays
  unsure (1)..(614): unsure at all n locations
cccacgcgtccgcccacgcgtccgctgtgaactagaggcatcaagaggttgttttcatttgcttgtggttcatcgtacctnctgttttgtgcatgttgtaccacaggtatctagcaggtcacttaagaaggccattggattcaaaactcatgtacgctactgtgatgcattgatggtcctgaagtcatggataatgtcaaaggtaccctttagatcaagcattccttccaagttgtccaaatgttaggcatggaaggaacatggagataggaggtggcaatggtgaatggagtntattttgttcgtataatacttttcattcatggtctcatttacatttaataccctcctcaaaccctttgatttatctatgatctatctatggtcatcattttgtgttgaaaaaaacagatgcaaattattatggcaacgatcatgttactataataatttgcatctgttttttcaacacagatgcgaattattatagtaacatgattgttctacaagaggccaatttttttgtagaccgattggcttgctaagttttggtgctactatatctgtggtgatcttttaactggaggaacatatttaaaggcctcaacaaagga

SEQ ID NO: 258517 - DNA, 252 bp, Zea mays
ggactgtcttgttcatatcggtgtggcatatcattatgcttgaggtggtggtatgtaccttccattagtttatgggccttcaccaacaggaaggatccaccaaggagtttgttcaacatggatgaagaatacaattcttctggaatatagcgaagaatgcagttgggctcacatctttgtgaggcagtcaaatttcaagttacgtgctgatctgtccactccttttatcatgattggtcctgagacagggct

SEQ ID NO: 258518 - DNA, 270 bp, Zea mays
  unsure (1)..(270): unsure at all n locations
tgacatggcacaacaagaacttgaagaagtagacatgttgctgttgcctgcagggtgacgtctatggtggtgtgctgtgagcaacgcccacacaatgtgatcgggctgcacgccaatgttcaacatgtgccccaaccagaacatggctgaaggtgcttcgtataactaaatctaccatggctntctaggaaaagatggaatggaactcaatttttggtggcacacaagtgtggaaacttgaattcatatatacttacactcaacattagc

SEQ ID NO: 258519 - DNA, 345 bp, Zea mays
acgctccgccagccgctgccactcgccacgttccaccagccggcgccccttcttctcactccgctggcgccggcgccgcgttatccatggcgtcggagaagaagcaatccaacccgatgagggagatcaaggtgcagaagctggtgctcaacatctccgtcggagagagtggggatcgcctcacccgcgccgccaagctaggtacactgtccgttcctttggtatcaggcgtaatgagaagattgcctgctatgttactgtaaggggcgagaaggcaatgcagcttctggagagtggacttaaggtcaaggaatatgaactgctaaggaggaactttagtgacac

SEQ ID NO: 258520 - DNA, 311 bp, Zea mays
gaggtcttgcgggccgcctcccgtttctcgcgctccgctcacgatgcgtgcgtgcttttacctgctggtcttgctcttggtcttgcagcgaggtacacggtgcgctcgttcggcatccggcgtaacgagaagatcgcctgctacgtcacggtcaggggcgacaaggccatgcagctgcttgacagcggcctcaaggtcaaggagtacgagctgctcaggaggaacttcagcgacaccggctgcttcgggttcggcatccaagagcacatcgaccttggtatcaagtacggctccgtcttatatactttacg

SEQ ID NO: 258521 - DNA, 527 bp, Zea mays
aggacatgagttctagtatttatcagtccttaatgaaggcgttgaccatggagtatgtggaggacataacttgttatccggtttgtgcctctgcttctggtgctattgcagaactcatcgaggtaagattgagtcaatgcagtattttgcattgtagtctacttgcacctggaaatatgaactgatatattttgtctctgtttttttttcagaatagttatgttccacctgactggctcattcttctgcaagtggttctgaaaagaataagtactggagatgaaaatgagtctgctcttctgttcaagcttctgggcacaatagttgagggtggacaggaaaaagttgtctcatattcctgaaattgtatccaacattgcgagtactgtaatggagctcctgccccctgtcccagatccttggcctcaggttgttgaacagggtttcgcagccctcgtagcaatggtgcaagcttgggagagctctgcaccagatgaaaacaagacacctgaaaaggttctgcagtc

SEQ ID NO: 258522 - DNA, 194 bp, Zea mays
gattccgggtcgaccaacgcgtccggtgaacccaccaacctccgctgcattctgagttcccaaaagactagactgcttgggtagaaaattgttgtgagttgtgactctttgcttccgaagaacttctctatggtctctccgacgaacagttgcagttgcttgggtttggaccgactatttatcatgtgattgcg

SEQ ID NO: 258523 - DNA, 460 bp, Zea mays
gaccaacccttccggaaaaaccttattggtccagtttttccggttgatcttctttaaggttaaccttttaaccggagtatgtaaatattcctttgccaataaattacatgcttaaatcgtggctgctaggcgaatggtcctactttggtcatcaaatgcaggaattccactactatatgtgccacttgaagttgttatgttcaaataatatggtgaaaacgagcgtctattgggatctattttttatcttgcaaatgatcttcctgaaagaggtaatatattcttagatgaggtatatatcgtaatacttatagcataaacactcaagccactacaagtaagctcctgctctttgcttgtttccagattgatatgtcaagatacgcttgtttcatttgagctcactgttatctgaaaatatatagactgccttcgtccccttcatcactgctgatgaccc

SEQ ID NO: 258524 - DNA, 319 bp, Zea mays
cttactgatattgaagttctgggtgaaggggacactgcaaagcttgagattcagattaagttggacaaagagaagaaaatcctctccattcgggataggggtattggtatgaccaaggaagatcttattaagaaccttgggaacgattgctaaatctggcacttcaggaacaggagctgctcgagtctcttgtcgaagctgatacggcaggaaagagctaaaaagatggaagaaaagaaagtgtatctgcaactatacgaagcaatggaggccgttggtcaagatcaatctggagaccaacaagatcatggacttcatc

SEQ ID NO: 258525 - DNA, 508 bp, Zea mays
gatgcctgtgcgtccccgtgcccctcgccagctgatgtcgtcctaggatctcaagccatgttctggacctcacaagtccagggagtgcctgcctctgatcctcattatcaggaacatgctcaagtatgcactgacgtaccgtgaggtcatttctatcctgatgcaacaccatgtacttgttgatggcaaggtcaggactgacaagacctaccctgctgggttcatggttcaagctctgcaaggtgaggtttgttcagtttggccagaaaggcatcccctacatgaacacctatttgttgtacaggaaaacatagaatggaattcaaatttggtggccgcaaaagtgtggagacttgaattcatataaagttaggcttaacattagtgcaaacagttgtattttagtttagatttagagtacacttatgtatgcgttgtttgacaatgcttatttatgatatattgagttgtacttatttatattatattaattataatattgttcaat

SEQ ID NO: 258526 - DNA, 497 bp, Zea mays
catgttcaacggaagcgaaatgaaacaggtcacccatcacattcgtcatgtgcaattctctcatgccgtgcagcccattaattccactgaagaaaacatagaatgtgcatcataatgtcacagaaggcctaaaatgttatagtgtgcggccattgctcacgaggaggcagagtgccgtgttgccgaggtttgcactacagcttggtttctgatggagttgtaccagattttcttgttcaaactagcagttgacgcattgttggaactttagcagtctataaaggattttttttcttaaatgccgctggaccacatacgattgttgatggtaaagaagttgtgaactttgcatcagcaaactacctcggtttaattggcaacgaaaagattattgattcttgcatcagttcattggagaaatatggtgttggttcttgtggtccacgtggcttttatggaacaattgatgtccattttgactgtgagtcaaagatagc

SEQ ID NO: 258527 - DNA, 485 bp, Zea mays
ctaggtcattacttgctaatgtgcatctgattttgctgttgccaggatggaaatgttttttggcagctttctcagtgaatcagtatcaccgcataaccttttcggacacccggatgttgagaaatgcccattcctgaggaatatcaatggagctacaaccttttccctcgcttctgctttgccagtagctgctcaaggaggcaagggtccaatttttgaggaagggtcaggctttgagtctgcattcaagcttttccatggccgagatggaatagttcccctttcagaaagatcatatgtatctgatgaacaccacattgagagcattgacgtcaagttatatacttagttaggctcaatgttagcacaaacagttgatgagcacctttaaatttagaatacacttatgtatgagttatttgccaatgcttatttatgagatattgaatgttatttatctatattatattaattatagtgttatt

SEQ ID NO: 258528 - DNA, 342 bp, Zea mays
ggaaaaaattatgaagattttgacttgtctggacttaaacctacccaatctcacccaatccacatggcatgagagcataatgaataagccttaaagtgtctattattttctaaatgaaattcgactatgaaaaccttttggatatgtggcaccactcgaatcactacatcctgcagcttcggagagtgccgcacaggtgacaattgatgaagtcaagcaactgccaccccttgcaagagaaggaccagtcgagaggcaactctaggggaggaagatttggccatggaggtggccggagattttctggtggtggtggcggcggcagagggttttctggccggg

SEQ ID NO: 258529 - DNA, 488 bp, Zea mays
attataccaagagttgctcacagaacggtctaattgtttgcaatggcgatatcacaagctcttcatggatatgtgacaatggttcgggttacaggtgctcgacctcggggagaacctgctctccggcgtgctccacccgacgctgttcggtaacctcaccagccttttgaagtgtaagatttgttattctttagttatataatttctagtagagacaacttaagtattacaactatgtgttagggagggttcaggaaaaagaatgaattttgtattcagcatatgtgcataatagggcttcgattctcaagtcctgtaatactggaagtatgcataagtgcataacagagtttattaaagaaagaaaagtcctcacttgctggcagtttatccattgtatttttgtaaattaaggttattaaagaaagaaatgtcctcacttctatgggttaatttatgatcttagcacttgctacgactataaagtt

SEQ ID NO: 258530 - DNA, 449 bp, Zea mays
  unsure (1)..(449): unsure at all n locations
tccacgcgtccgcccacgcgtccgcctgcgtcggccctgctcgtagcttggaggcggcgacattctccggcaatggggtgcaaggcgtgcgacaagcccaagcccaactaccgcaagggcctgtggtcgctggaggaggaccagaagctccgcgactacattctcctccacggccacggctgctggagcgcgctccccatgaaagccggaggagtgctcctacctggcacagatgctctacggtagggtcatcatggatgtggtcaccaagagcaggcgtgcatcgcagattcacagtacacaactctaaggtaccaatgtcaagatagctgccattccttaagcgtcgtggttctgacttcagagacctttgactcaattgtccttgatgagttttatngcccatggtgtggtcactgcaagcatcttgctccgatttatgaagagct

SEQ ID NO: 258531 - DNA, 419 bp, Zea mays
ttgtaagaagccccggccctcctgtagagctggggtccctctgaccctctctcctctgcgcttccgctgcgtcggccctgctcgtagcttggaggcggcggcattctccggcaatggggtgcaaggcgtgcgataagcccaagcccaactaccgcaagggcctgtggtcgccggaggaggaccagaagctccgcgactacattctcctccacggccacggctgctggagcgcgctccccgcgaaagccgggctccagcggaacggcaagagctgcaggctgcggtggatcaactaccttcggccggggctgaagcacggcatgttctccccggaggaggaggagacggtgatgagcctccacgccacgctcggcaacaagtggtccaggatcgccaaacacctgcctggcaggaccgac

SEQ ID NO: 258532 - DNA, 477 bp, Zea mays
gttttggtattcaggagcacattgatcttggaatcaagtatgacccgtctactggtatttatggcatggacttttacgtcgttctggaacgagctggttatcgtgttgcacgtcggcgcaggtgcaagtcccgtgttggcatccagcacagggtgaccaaagaagacgccatgaagtggttccaggtgaagtacgagggtgtcatcctcaacaaggcccaaaacacctcgtaatcattgatagtcatcaaacgacttgcccttaattctgtgtactatgaacaaaacaccccgtgtttggttcaagtataatctgtgtactatgaattctgtgtttgttggataccaaatgcactgccagttttgcgtctgtgcccgtaattccatcttgataatcagactagcagttaggaacaaataactgttgttttgattgtgttaatttgagctcgccagcaaaatctaaggaacatcaaaa

SEQ ID NO: 258533 - DNA, 269 bp, Zea mays
atataaaggtaatgtaaatgtcttatgattaagaacagtgtgatgttccatttgctggtctgctatgcataataacctggcatgcaaatgttgaagcatgttgaaatgcttactattcattgttctaagttggggtccatattgatggtagtccctctttcttcgtatgttcataagatgggtcggcatctttagtgtctcagacgcagtggccacgggatttttcaggtcacttggtcgtggaagggcttcttattgcagtcatagtg

SEQ ID NO: 258534 - DNA, 630 bp, Zea mays
taaagaaaggtgtacgaaagtataccgaattactaggacaagggacaaaacagaaagctatgggggtgggggaaacctgcttttccatctctttgctgccaaagaatagataaaagttgatgtcatgtttgtgcagaaacaaggttgtaatggaaggtttcatgactgcaataattcagtttcttgaagcgttagaatcattctatgttgttgaaagagatggttcaatcatcctttttttggttactcttggtggttgtcattcttcagattacatcaaaaagatgacattatcccttggtctcaagaaaatattcttgcttactacacgaactgcagacgaatatttacctctgttattctcttgacttattactatgtgcaaatagtagcaatgctccaattttcagtttttcgtatgcttgcttctaccttgcttaattttgaaatggcgcaggtttgcgcgacatggcttttcatagtgctcaattggatctatcccctgagcataggagaaaagtatcaatctgtacagtggatccaagtattctataaagcatgtatcctccaatttcccacaagcgagaatggcatgatatgatggatgaaatggctgttgcggtcaattgt

SEQ ID NO: 258535 - DNA, 430 bp, Zea mays
atctatcttcaagccaggcgtctccttatccctgcgacgccgctcacctgtgctcatcttccagccgggctctctgcccagcagcatagcacaccatcctctccactcggatccccaagccctcgcctccagctttgccacggcatccgtcccctgcttggacctccacccggccgcgtcctcgccggtggccagcccgctgcatcgccattcctagcgtcggccttggcaccgcttccccaagcgccccagtcgagctcgcccatcctctgctctagccctttctccacgccgtagctgatctcgcccctctcctcagccatggacacgacgacctgcaagccttcttggggggccaagccatctttctgctcgcgccccttcttttttcaactttgcggggattaactcggccaacccccaagggggt

SEQ ID NO: 258536 - DNA, 447 bp, Zea mays
ctcttgtgaaggagtttctcaatgctgttgatgacaagcggaaggaagtcctctctaaaatagaagaggatgttgctaagctcagcggttctgcagccaagcatggaaagatatatgtgacagctgcaaagaagatcatggataagggctctgactacactaagaaggagactgagaggcttcactgcatgctggagaagtggtgtagctagttcagtaaagatgaaaagcgtcaaactagttgtggaatggtggtattgtttatagtacatgtgtttggactttggacactgggttccaatgacattatgagattccaagttcacacagcaggagttgctagcttgcaagccgattcttactccaaaatgggtaggcttacgggttgtgaagattatgatgctactggtaacgcctaatctttatggcaatttggtggctaacacg

SEQ ID NO: 258537 - DNA, 440 bp, Zea mays
agcaactcagcacacacaggaagtcaggatccttcacgtacacctttcatgttcttgcaaccttgattctacatgcttcaggtagtctagaatatcagattgttgtatatatttaacaccttctgtaccatcaaattcagaaatgcactcaagaaaaggcttttcaaaactcttagaatgtattccaagagcagtgcacatattcagaagctaattatgtaatttcttatatgttgctttgaggcaaattgaacagggatttgtttggcttccaaatggtttgttggtcctaaaatagtcagaatcacatgacatctgtgctataggtaatctgctcttctaactcaagtttgcattcagtttagactttaggttatgttagtcataacaaacttgaaaagacatattaacaaggaaagatcatcttaacagttcatgtt

SEQ ID NO: 258538 - DNA, 292 bp, Zea mays
gcataaagcagcgcgcgagcacctcatattttattctcattgtttctacttcgttaattcattgacccatgtctccgtcttggtatattctggagacagatccccacgtccagagttacaagaagatcaagcttggttgtggctgctgctgtgttgcctcctcttgttggaccgaagagagggaggagagaagcagctggcgtgcatgattctactcaagttggagtaccggctaggatgacaagatctcgctcaataggtatatgcattattatttcaagtctatattgag

SEQ ID NO: 258539 - DNA, 522 bp, Zea mays
ttgagtatcttgaaaattcactgcagaaggcacaagaaaactttattaagagccagattgagatgttacaaatccgactgcaaatggtgcagcgtggcactgctgggttgagcagtagcgagtacactgagcacacagaagactgactgaatctgtaaacaggcactcctgcatcgtggagtaataatgagaatactgagcacacgcagctgaatctgtaaataggcggagatgaggatggggataaaagaaaacattcaaagaattggctatacctgggggaaactgaagttttgcctggattttggtaggcttgttgactatgctttcctgttactgtgttagtgccttcttgccagcgttaaatgtttctctacgtgtggtggtttctgtaggttgggtacatctaattgctagtttaattatacgattacacaaaattcttgtaccgagggaaaatagaaaggataattgtacaaatgccccttttgtgtgcatatccatgccacccggattgtctgt

SEQ ID NO: 258540 - DNA, 638 bp, Zea mays
gcggtgcgcgctgagatgcagttggtctatatgcatactacatgctgcacacctcaaaagctgaaatatttaaggccaactatgaggctggggatgtcaactctagcatgatggaccagactgactcttcaatgaaacgctgatgagaacactgctccatcttattattgaagcctgtatctcgagaaagttgatcgatacatctgcttatttatggcctggttatgctgtaccatctgggactttaaaagatacagctttgccccaagaatcctcttgagtaaactttatgaaagggtcttgactttcaggaccccttattgatgctctggtcgcatctcctgcttcaagtgttgcggaattggacaagttatacagtgtagcaacaaatggttcagaagaagaaaaaacagctgctgcaaagattctttgtggcgcatcacttgttcgtggctggaacattcaggaacatgtggtcagtatggtggtcaagctattatcagcttctttaccctcagattcctcaacttcaactcctgggagcatgagccactaccttgctcatatgtctacgttgaacgaaatcttactcggtgtgtcttatggtgatgtcatccacattctttcgttgtatggaa

SEQ ID NO: 258541 - DNA, 530 bp, Zea mays
gaggtttctatgtttttcttgtttttaaattccatcatctcataggacatgctggatcaaagtagaggcttaatgtaatatgtatatccctctacattatacatttcactttatttcttgtttgcttacctgtaggacatgagttctagtatttatcagtccttaatgaaggcgttgaccatggagtatgtggaggacataacttgttatccggtttgtgcctctgcttctggtgctattgcagaactcatcgagaatagttatgttccacctgactggctcattcttctgcaagtggttctgaaaagaataagtactggagatgaaaatgagtctgctcttctgttcaagcttctgggcacaatagttgagggtggacaggaaaaagttctgtctcatattcctgaaattgtatccaacattgccagcactgtaatggagctcctaccccctgtcccagatccttggcctcaggttgttgaacagggttttgcagccctcgtagcaatggtgcaagcttgggagagctc

SEQ ID NO: 258542 - DNA, 584 bp, Zea mays
tgttagagttgttgatcatcagcgtctaagcagggctggatatgttttctctgcatctctgccaccttatcttgccactgctgctgtttctgctgtcaactacctggagcagaatcccgcagttcttgcaaatctaaggagcaatattgctcttttgcataaagaattatcagatactccagggctagaaattttcagccatgttttgtcacctattgtcttccttaagctgaagaaatcgacaggttctcctaccactgacctagaccttcttgaaactattgctggcagggtcttgaaggaagactcagttctcattgtgacatcaaagaagtcaaatctggataggtgcaaactccccgttggaatccgcctgtttgtatcagctggacatactgaatccgacatctccaggctttcctcatccttgaagcgagtttctgcggcagttctttcagactgcttttgatccacatcggatacccttgaaagatgaaagccatccattttctacgcactttgtaccctagaccgtgtgtgtgtgttggaaatgacataacctgacattctacatattatgaatt

SEQ ID NO: 258543 - DNA, 625 bp, Zea mays
ctcagatggaagaaacggcaaatctgaaggtctttgaactggtagctacatgggctgacgctattgccaactgggactcctgggaggagatggaggatcagggtgttttcaacacaattaaagaagctgtcaatttccaccagagatttgacctcgacggtctcttcctgaaaacgcttccgtcgcagtctgaaaatggttcacagagttcagtcatcggccgtgtctctaattttgtgactagggcaattgcagcttacccatccgcaacgtggagggcatgctcgtgcgtccatacactgctgcacgctccaaaattctcccttggagcacaagacactagaaagactattgccgaatcctttgcgcaagcagcgttttcccgcttcaaatctgtatccgacagtcctgctgggctatggaaaccactgctgttggcgatatcctcgtgctacatctgctatcccgatgccatcgaacaagtcctgaacaacgttgatggtaacggttttgcgatctgggcgtctgcattggcacaagtctcaagcagcttgttcaatcctggcctgtcatctgaatccgagatcaagttagctgtgctgacgctatctactgggatcaacca

SEQ ID NO: 258544 - DNA, 645 bp, Zea mays
ttcagcacagaggcagccaccaccactaccaccacaggttttcacccgcaccgctcggttaccgaggagtggaggagctttgcagtcgcagcagcagcagtacagtgtgtgagtgtgaagggactagagcagggcacacagcgcaggccgcatgggcgaggcggaggtggagaagcccaaggaggcggcagaggaggagaagaagaaggaagacaagcccatggccgccgtcaacaagctcgcctccgagctctccttctatcagtgaaaggtgttccgcgtcactgagcacgctggggtcacgctcgccagcctaccgacggtcgcgtcctctcgcgcttcctctgcaacgagtgcatcaaccactccttcgtctacgaggcgccgctccccgtctccaggctcgctgacaagctgcaggcgtggctagacccggtgaacttgctgtcgggaaagtccagctactgtggtttctgtggcgagcctctgcagttcgtcctccaggtgttttctttgtgtgcaatgaagttgccacagtcgactgcttattgtttggatatcgacttggtcacagttaggcttggttgtgtttagatttatgcaccaactgaagataatgtagcagccttccaccgaacgcggttc

SEQ ID NO: 258545 - DNA, 566 bp, Zea mays
tcgaggctgagcagcggttcctcgatgatggcttctggagctttgaacaggtccccttctcctcccaggtcatattctgataccatggatggctgtaccacgacgcctacctggggaacttggtacagccatccatggtatcagaatatgacctgggaggagaaggggacctgttcaaagctccagaagccatcatcgaggaaccgctgctcagcctcgatcctgtcgcagctgccttttcaatgatggctggcaatggaagtgctgtcatggatcaaactattaaggacgcaggcaccggcaccatccaaaatgaccccctcctgagtgaggtgctgtacgagtgcgagaaggaactcatggagaagtccacaatcgaagagacaatttctgaacttatggatgttaagattcctatgctgcaagttgaagaaatcccaagccaagctgaacaggttcttatacagaaccagcagctcccggccatggagaaagagaagcaatccgttcctgaatgctcgctccaaaaaagtgttagttctggatgcctcaactcagcagattgg

SEQ ID NO: 258546 - DNA, 544 bp, Zea mays
agcccctcacgccagccgccaacgccccaatcccgtaaccgcagcctcgccctgctcgcatcttcctctccctctcagcgctggtgctcaatctacaggtcgtcccgctccctacacacccgccctccggtgtgaaccttcatgacgtccgcaaccactctccgatctgctgtcgtgacctcatccagccgtgctgtggcagtggatcggagttcgctccagctctgattgaattccactactatatgtgccacttaaagttgttatgtcaaaatattatggtgaaagcgagcgtctattgggatctattttttatcttgcaaatgatcttcctgaaggaggtaatatattcttagatgaggtatatatcgtaatacttatagcataaacactcaagccactacaagtaagctcttgccctttgcttgtttccagattgatatgtcaagatacgcttgtttcatttgagctcactgttatctgaaaatctatagactgccttcgtccccttatcactgccatgaccgtgacttggccccacagc

SEQ ID NO: 258547 - DNA, 487 bp, Zea mays
tcgtgggccgatacaagcctcaagaatgagtcggcttaagaaggccgacgcgctcgccgctgctaccgaaatcggccagacattccccaaaccctacgctcgctcgctcgccggagccctcattgaaccgagcaggcgggcggaggaggctcgacgatgttccgcaaccagtacgacaccgacgtgaccacgtggagcccccaggggcggctcttccaggtggagtacgccatggaggccgtcaagcagggctccgcctgcgtggggctccggtcccgcacccacgccgtcctcgccgccgtcaacaagcccgcctccgagctctcctcctaccagcggaaggtgttccgcgtcgcccgaccacgccggggtcgcgctcgccggcctcacggccgacggccgcgtcctctcgcgcttcctccgcaacgagtgcatcaaccactccttcgtctacgaggcgccgctccccgtctccaggctcgcgctc

SEQ ID NO: 258548 - DNA, 471 bp, Zea mays
caataatccatcatcgaagccaaatcataagctaaaaggttgagaagatggtgcttctggcatgtggatggcgctatacgattactgtttgtgactcaagtaatctatacacttatggttggcgcaaatacgttcaactaggacatattgattttgaagatgatttagttccacataaactagaagcattgaaagatagcactatatctcaggaaaagatagaatggaactcaaattttggtggttacactggtgtggagacttgaattcatgtatacacttagttagactcaatgttagtgcaaacagttgatgaccaagttttttaattagtattttagtttggatgtatagtacacttatgtatgagttatttgacaatgcttatttatgagatattgaatgacacttgtctatgttatattaattataatgttattaaataaaaaaaaaaaaaaaaagggcggccgc

SEQ ID NO: 258549 - DNA, 569 bp, Zea mays
gttttaattcatcctttctgtgctccaattattttggtgaatcttagcatagaacttgaccttctattattttgtatgtttggtttgcatgggataactggcatgggatatatttatgaacattgatatcatttttatgcttactcacatgggataatctgatcttctaactcaagatatttttattttggtaatctgatcttctaactcaagtttgcattcagtttagactttaggttatggtagtcataacaaacttgaaaagacatattaacaaggaaagatcatattaacagttcatgttacatttgcagatatggacctcggtggttttctccacattaggaaagctggaagagcctttttgaactcagatttttttgctaacagtggtgttatggtgaaacaaagttttgtttgtatgtaccaacagctaaaatgtaaacacgacattatcatagttgagtacaggaataattatctcttaaaaaaaaaaaaaaaaaaaaaaaaaaaaaaaaaaaaaaaaaaaaaaaaaaaaaaaaaaaaaaaaaaaaaaaaagggcggccgt

SEQ ID NO: 258550 - DNA, 377 bp, Zea mays
atgattggctcatcatgatagcttgattcccaccgcttcaaggatataatcgatggggctattgctgaaggtgagctgaagtcaactaaggcgtatgagaaatggtctaaaaagatttcggagatggagccaccaacaaatccattagagaggagagcgaagagtaggaagaaaagtgaggagtacgatctgatcctggccatctcacagcgcagggctgagcggaaaaaccagttcaactccatcctctcgaacatcatgtccaagtgtgattccaaggcaagcagttctgagcccacagaagaggagtttgagctggcgcgacagaggctggagagcaaaatggccaagaggcgcaaatgatgcctgctgccagc

SEQ ID NO: 258551 - DNA, 360 bp, Zea mays
ggctgggcttgtgccaagcttgaatcctcttgtgaaggagtttctcaatgctgctgatgacaagcggaaggaagtcctctctaaaatagaagaggatgttgctaagctcagcggttctgcagccaaatctcgcgtctagaattgccgctagatgggggaggtgagcggctcctggtctcttcgatccaatctaagaagctacaagtgaatgccgaggagagcagcgatgacttggctaacccaccgaaggtagaggagaagcttggtgctgtccctcatggcctgtccaccgactctgaggttgcccagagggaagccgagtctatctctaggaagactctcaggagctcagccgagaag

SEQ ID NO: 258552 - DNA, 753 bp, Zea mays
  unsure (1)..(753): unsure at all n locations
gcagcctcgccccgctcacatcttcctctccctctcagcgctggtgctcaatctataggtcgtcccactccctacacacccgccctccggtgtgaacctccatgacgtctgcaaccactcttcgatctgctgtcgtgacctcatccagccgtgctgtggcagtggatcggagttcgctccagctctgattggggggaaatgactagggtatcaagtggaaaaacataatggtccaggttctactgcacctctttcaggctaagcatctaaactacgatatgtaaattatccttttccaataaaatacatgcttaaaccgtggttgctaggcgaatggtcctactttggtcatcaaatgcaggttagcttaactttttctaatgcattattatttgtggtttccatcacatgtacgttagcttatcttttagcaaatttgtagctgatgtcaattaactttttagtggaattttatctgctcattcttatattcaggaattccactactatatgtgccacttgaagttgttatgtcaaaatattatggtgaaagcgagcgtctattgggatctattttttatcttgcaaatgatcttcctgaaggagattgatatgtcaagatacgcttgtttcatttgagctcaatgttatctgaaaatatatagactgccttcgtccccttcatcactgctaatgaccgtgacttggagacccgacagcggccctcgacgttgtcgncgncgagcccatgct

SEQ ID NO: 258553 - DNA, 1043 bp, Zea mays
gtgctgtagacattggaggtggattttccttaattggagatattgaaaaattggaaagaaatgtgacttgacctgtgctgcaacaaccttaaactaggaggggcttctaattcttcatctctaccaacagttctctcctgttactttttaaaccaataactttttcaagtttgtgcagatgcacacatccttgagccaaaatagaaaaaaaatcatagaagagttctttggctgtcacgtgattcaagagtattaatgatatacaaaagtttgctttatggcaagtcaggtaaccacaaattttgggcaatgacagggatgtgcagtggtggtctcttaaaagaattttgtgttccagcgtagctatttccactgcaaactatcaaatcattacaaactgctgggaacatgctccatcttattatcgaagcctgtatctcgagaaagttgatcgatacatctgcttatttatggcctggttatgttgtaccatctgggactttaaaagatacagctttgccccaagaatccccttggttaaactttatgaaagggtctcgactttcaggaccccttattgatgctctggtcgcatctcctgcttcaagttcaagctctgcaaggtgaggtctgttcagtttggccagaaaggcatcccctacctgaacacctacgacggccgcaccatccgctaccccgacccgctcaaggccaacgacaccatcaagatcgatctagagaccaacaagatcatggacttcttcaagtttgacgtcagcaacgtggtcatggtgaccggcgggaggaacaccgggcgtgtaggagtgatcaagaactgggagaagcacaagggcagcttcgaggtcatcgacgtgctgcttgaaggcttttgcatgctatttctagttttctcttatttgttgtacaagaaaacatagaatggaattcaaatttggtggtcgcaaaagtgtggagacttgaattcatataaagttaggcttaacattagtgcaaaaagttgtattttagttttgatttagagt

SEQ ID NO: 258554 - DNA, 913 bp, Zea mays
attcaggtgacatctttcattgtctcttctcaatcatttatagtgtcatttcgagttttcatggcttgtattgtgctatgagtttttagtgcttcatggtgggcttagttgcatgaagggttctcagctttgagattaattaccaatgcaccttttgagagctcaaaagatggtcttcgcattgagctataacatgtggtggtgacatggcacaacaagaacttgaagaagtagacatgttgctgctgcctgcagggtgacgtctatggtggtgtgctgtgagcaacgcccacacaatgtgatcgggctgcacgccaatgttcaacatgtgccccaaccagaacatgtatgctactactaatataacatttgtcattggttggttcacccccagaggtttgctgcatgttcatggagctagtggataagaagttttcgttgttctttttgcggtttattagatgacatcaattagagttgaattgagccttagagtaggatgaatacaaatgtcttaagtttctttgttccagcagattgtttgagggcaaggttaccgatgaacttcaggaatcggtcttatgatattattagtttgtacagcttagtgttaggttgctcgacttcttcatgaatgaggtgatagacattggtcgatcatgcagggttgaaggtgctttgtataactaaatctaccatggctttctaggaaaagatggaatggaactcaatttttggtggccacacaagtgtggaaacttgaattcatatatacttacactcaacattagcgcaaacagttgaccaagtttttcaattagtattttagtttgaatttagtgtgcaataatgtatgagttatttaacaatgcttattcatgacatattgaatgatacttatatttattatatc

SEQ ID NO: 258555 - DNA, 679 bp, Zea mays
gccgcgctcctgatccttatctcttcgcgtgctgcatcggcgcccgccgggaggcggatggccgcccgcctcgtccatgttgtgggtccgcaatatccgccgcttcgtcgacacgggcgccggcctcggatccgaggccatcatggaactggagactaaaaggatattgcttgagattttcaaggagcggcagcggaagagtgccgaggctggttccatcccaagtttttacaagaaacctgaagaaggatccattagctctagagttcaaaggttggccaagtacaggtttctaaagaaacaatcagagcttctgctgaatgctgatgatcttgatgccatgtgggtttgtctcagagaaaattgtgttattgatgatgctactggtgctgaaaagatgaattatgaagatttctgccatatcgccacagtctgcacggagcagattggtcagaaatgcaaacgatttttcagcccttcaaacttcatgaagtctgcacggagcacttgcacagattgtttggctaattacaagattatctcagtgttttggtttggatttagagtacacttatgtatgaaatattgattggtactcatctatattatattaattatattattatttaatatatgtatgtgtattcttcttcaaatattataatgtggttctcaaatg

SEQ ID NO: 258556 - DNA, 902 bp, Zea mays
atcccacgttacagtaaccttttcatatggctaaccaatcataataattctgcattttgaatgcttaggactgcacttctggatattggtaagcactactagaaatattcagagacaacatgaatggcttccaaagggctgggtgatggaggtaagagctggtggggagaaggcggacaagatgtacaagttttatgtccactcaatcactggtctacgattgctgtcaaagcaagatgtactactctatatcaatgaggcaaaggtctctgggtgcgacaccaatggacaatgtgacacaacttctgaagataacatactttcaaaagtggactttcggccaagtggattgcctgaaggttgggtgaaagaactagtgtacagaaaaaccaaggaagggttgatcaagagagatccgtactacacggatcctgctagttcctacacattccgcacgctgaaatctgcattatccttcctagaaactggaaaggtatccgagcgtgcatttattcaaaggacgagtgttcatgatctgtactcttttgaaatatctgcagacatggaacaagcactgttgaaaaaagaggccattcagaaattagtgaagttctttcaagattgcctagaacagtattttggccatatattggacgctttcttgaagataatcacaaaatcttctaggctaaatacaacaatggctaccaatggtttaacaacattgcacattgcaagacttgacagttcaaatttggtggccacaaaagtgtggagacttgaattcatataaagttaggcttaccattaatccaaacagttgtattttagtttagatttagagtatacttatgtatgcgttatttgccaatgcttatttatgatatattgaatgggccccc

SEQ ID NO: 258557 - DNA, 748 bp, Zea mays
aatgcatgcaactgaagtgcattaccaatgtcccaagagggtaagggtacagtctgatgtatctgaaaggattgctaatggaactagtgttcatgtaaatactcatgttcaaaatttgaatctggatattgaagagcaatcacacaaacactcgatttcacacatcgaggagccaaacactaataattcagaaggatccctggctggtgctgctgtctgggatgtatttcgcaggcaggatcttccaaagcttaatgaatatctagctgttcatcgggaagaatgtgcagctagatgtcaagcagtgtcttctgttaaatattctatttatgatcaaacagtgtaccttaacgattatcataagaagatgttgaaggatcaatatgagggactgaagacaatcgagcagattacaatggactcagcttcggtcgagaccaatatgttcaagctctgcaaggtgaggtttgttcagtttggccaaaaaggcatcccctacctgaacacctacgacggtcgcgctatccgctacctcgacccgctcatcaaggccaacgacaccatcaagatcgatctgcagaccaacaagatcatggacttcatcaagtttgacgtcgacaacatggtcatggtgactggcgggaggaacaccaggcgtgtaggagtcatcaagaacagggagaagcacaagggcagctttgagaccatccacgtgctgcttggagctttttgctatgtctagttttct

SEQ ID NO: 258558 - DNA, 895 bp, Zea mays
gttttgttaagctttatggagcctgactatgcaaaatacagggatatggttcatcttgcaattgacggcatttggcaggtcttcaagctccagcattcaactccaagaaacaacttctgtcgtatagcggcaaaaaatgggatgcttcctaggctggtgaatacactatatagcctgaacgaagcaacaagatttgcttcagtctcagggtcaggtgcttcagtaacacagaatggctcaaccccccgacgaagatctggccaattagacccttcagttcttgaaagttgcaaggcaaggctggatcatcatcattcatctggttctctgcaatctctacaaacagacgcagataagcaccatatattaatggactcgtcatctcctaggcttagtgataaaaccggcagtaacttggagaggaatgataacgacttggttattcggccacagaggcttagtgtttctgctggaaggacatctacagacagatcaccaaagcatgtagaactagtttcaaatggtcatattagcggtcaaaatgaccaggtccgacctctactgagtttgttggaaaaagaaccaccttctcgacatatatctggacaacttgattacgtttgccacataactggattgggaaggcatgaaaccattttgccactattacatacatcgacagaaaggaaaacaaatggtgaacttgacctaatgatggattttgctgaggtttctagacatggaagggagaatggccatctggactctagtataaaagcttcaaatagagctcatagtatgaaatatgcaccttcagcaagtgcgtctaatgaaggggcatcaacttctggagctgcatcacaaacagcatctggtgtgttatcaggatcagggg

SEQ ID NO: 258559 - DNA, 939 bp, Zea mays
  unsure (1)..(939): unsure at all n locations
gacgaacactaacaaataaacaatagcacgatacaatttgcagccaaaactgagactgttacctccccctcttccccatgcctcaattatatcactaacaaaataagccttcgttgacgaaggctaacaaataaacaaaagcacgatacagtttgaagatgtagtgtactgtaatcctccaaggaagataacaatgatcttttctttatgtccgtgtaaccaactgcctttgcaagtgctttggcaagcaagtcagctgcagacagactggaagagcttagcaactgctctgcttgctgcctgaagataggaataacactgtctgacacactcgcaattgcatctgcagcttcactgccagcagattgtgctacatcagtgggtttgtggcgcagagatatgctcaaatttaaccccagactccctttctagtctgctgacactgtgcttatatctgggctcataaagcatgacagcaacacccagtattacctgaaaatcaaatgattgccaatgttattaaatcgaagaagaattcacatacttcnncgctgcgttgcgctacatctccatgcaaggcacgggatccaggaatcaaaccagaaagctctgatgcagaatccttcgtctcagtgaagatgatggttcgacctccatggctataacatcggataatgtcggtaatgagaaactgaaggccagtgcatctgttaagcaccttgctcttccttgtaacaaggcagcaagggcacaagttattccagacattatccgatgttatagccatggaggtcgaaccatcatcttcactgagacgaaggattctgcatcagagctttctggtttgattcctggatcccgtgccttgcatggagatgtagcgcaagcgcagctgcaagtaattcttgctggattccgtagcgggaagttccaagtttt

SEQ ID NO: 258560 - DNA, 449 bp, Zea mays
cgacgaactcgtcactggtgtgggccgtggctgtacgccgcagagtgaagcgagacgagacgacgatgcgcaagtgggcgctctcctccgcgctcctccttctcttcctcctcaccaccctccccgacccagctaagaagctacaggtgaatgcggaagagagcagcgatgacttagctaacccacccaaggtagaggagaagcttggtgctgtccctcatggcctgtccaccgactctgaggttgcccagagggaagctgagtctatctctaggaagactcttaggagctccgccgagaagtttgagttccaggctgaggtgtccagactcatggacatcatcatcaactcactctacagcaacaaggatatctttctgagggagctcatatccaatgcctctgatgcattggataagatcaggttcctttcccttactgataaggaa

SEQ ID NO: 258561 - DNA, 554 bp, Zea mays
aattgcgtgacatgcctactgcatttgttcagatgttctgccgcatagctgcacacaagttctttttcttctgtgatccacacaaacgggggaaagcatgcatgaagaaagtgttgctgagcaattgtcttcaggagctaatggaactacatcaggaaagcgaggaagaggtaactgatgtcgagcaggcagcaaattggttttccttaacttcagctcagcgcatatgtgacatgtttcttgcactagataaggatacaaacggtacactgagcaaacaagaactcaaggaatatgcagatggcacattgactgagattttcattgaaagagtttttgatgagcatgtccgccggagcaaagttggaggtggaaacagtcgcgagatggacttcgaaagctttcttgattttgttttggctctagaaaacaaagatacccctgaaggcttgacatatttatttagatgccttgatcttaatggaagggggttccttacaactgcagacatccacactctatttagagatgtacaccagaaatggattgagggc

SEQ ID NO: 258562 - DNA, 743 bp, Zea mays
gcagattaagttggacaaagagaagaaaatcctctccattcgggataggggtattggtatgaccaaggaagatcttattaagaaccttggaacgattgctaaatctggcacttcaggtacttcaggtactgccttttcatctttccagctgattactgcactcataatatttgtttatgagtgcaggaacaggagctgctcgagtctcttgtcgaagctgatacggtgagttctctgtgatgattggtctcagtattgtactgggtttcagtgtgtctgctcagagtcttagcccgttgaatccatagtttgtctgtttttcaccaggaactgtataggatgttctctaaccaatggccaggccaatgcttgttgtggttggaaacctttgttcgatatatagtgtgaactctgaattgatgcagagaaggcaggaaagagctaaaaagatggaagaaaagaaagtgtatctgcaactatacgaagcaatggaggcgttggtcaagatcaatctggagaccaacaagatcatggacttcatcaagtttgacgtcggcaacgtggtcatggtgactggcgggaggaacaccggacgtgtaggagtcatcaagaacagggagaagcacaagggcagctttgagaccatccacgtgctgcttggagctttttgctatgtctagttttctcctatttgttgtacatgaaaacatagaatagaattcaaatttggtggtcgcaaaagt

SEQ ID NO: 258563 - DNA, 577 bp, Zea mays
gctaaatacagcaatggctaccaatggtttaacaacattgctcattgcgggacttgagcatcgagaagctattgcccgcttgactctgctgaaactcataaaggttgtctatgagcatcatcctcgaccaaaacagctcatagtagagaatgacctccctcagaagctacagaacctcattgaagagcgcagggatggacaacggggcggccaacaagtgttggtcaaacaaatggccacctcattgctgaaagctctgcacatcaatacagtattgtgatattggtggatcatatgttttcctctcaagttgtatatgtttgccctagaggagaaggtgtcttttccttttgctctgctgtggtggtttctcatgagcaccagactcatctgttgtacctgatccctcttttttcgggagaaaggttttttaggtgcaggatgaaatggacgttctgtccttcagtgttgtttatatttagagtgttagtgaggacattgtaaattaagacatctaattaataaacaaaacccatgttgagatatttgtttcatgtgttagtaaattttgcaagat

SEQ ID NO: 258564 - DNA, 536 bp, Zea mays
cgcgcgggtcgatgcaagcctctacactgagtcgtataagatcatgcaggcgcagaccctgtcggactcgagcaagcaggcgtacatgcgcggcaagagggtgctcgagatcaaccccaggcaccccatcatcaaggagctccgcgacaaggtcgcccaggacaacgagagcgaggagctgaagcacacggcgaggctggtgtaccagacggccctgatggagagcgggttcaacctccccgaccccaaggagttcgcgtccagcatctacaagtcggtgcagaagggcctggacctgagccccgacgcgaccgtggaggaggagaacgaggccgaggagcagccggaggtggagaaggagccggagccggagccgtcgtcctacgacaaggacgagctttaggctttcggatttgttttcaagtctagctagctcccgctttagtaggaatgtgaatcagtgactgcctgggtgtttagtcacgtgatggttctgagagacgcccatttttttttcccatgcaacgtgatagggg

SEQ ID NO: 258565 - DNA, 1061 bp, Zea mays
ttttagagcggttcttggccagtcgtacgatagcgcgagcttgatggccaggcgtgggacacacgtcacaccgggtggcaactggcagggcaatgcccgatcaggtctccgtcgtcgattcgtctgaacagctatcctcatcatattttaatgcctcgtgcataatacggagtacatatctatatttacgtcagcgttattgcaacgccctctctctgtggtctcttcttctacatactataatagtagtacattagtactaacaatgttggttggccatggcatgcttgctttcgagatcaacattgacaatggaagcacaaggtccagaatccatgtagaatcctgtagattttccggtgtcaattgccacggactaatgccttctactcagttcaacctccaaagcatgaccggtctgacaaaccactgtgtccaggagcccatgtatgccactggtgtggtacctggaaaggtgataaaatatgtagtagctgtaagaaagcaagatactgttctgagaaacatcaggcactgcattggcgtactggtcataaaaatgattgcctccagataataagttcttccgctgcttcaaattcagttttgccaactgttggaaaagttcctgctaacacttcttggccagaatttgagataaaaatagactatgaaggtagatttgattccgatagtggtgatgagaataactcgaagttgttggtgatgcaaagacatgggaaacctgatgctatgatgcagtcatggatggatcaatttgaggctgattctgacaacgaatgctgggcatctttttaagagcggatctcaagagcaccaaatcaagtgttgaggtattgtcgagaaccaaatgctaaacctatctgggcgttatcttctgggtgtgcatcaaatgctgatatcccatcatgtagctactgtaaaggtccattatgttatgaatttcaggtaatgccacaattgctatatctctttgtagtgggaaatcaaccatactcccttgactgagcaacaattgctgtctacacgtgtcaaggggc

SEQ ID NO: 258566 - DNA, 559 bp, Zea mays
aggtgtcagtgctagaggatttggaaaggcgctgtttgataagaagacaaacccgtgtcctggcaagtggatacctgtagcccgaaacaggtcacccatcacattcgtcatgtgcaattctctcatgccgtgcagcccattaattccactgaagaaaacatagaatgtgcatcataatgtcacagaaggcctaaaatgttatagtgtgcggccattgctcacgaggaggcagagtgccgtgttgccgagtgccactggaccacatacgattgttgatggtaaagaagttgtgaactttgcatcagcaaactacctagggttaattggcaacgaaaagattattgattcttgcattcgtttcattggagaaatatggtgttggttcttgtggtccacatggcttttatggaacaattggtctgtattatcatcctcagacaattgactttggttgaaaggatagaggaggaacttaactttccaatgtattcttgagatgttcatcttgactgagagtcaaagatagcttatcctttaggggtactccgactccattctt

SEQ ID NO: 258567 - DNA, 534 bp, Zea mays
tgagttctgagatcctggtattgtctttgtacacaacttcagtgcgtttgacagtacccattgccatagtaagttgtcctgtccctccaacaatgctccactcgccatttatttgggaggtcccttgtatttggagtgtggacccattgaaccttttatcctccaacactaatcccagggagtagtggtacaccacaacgcgagtattggctacttgaacactagtgccctggagttggccgacgatgttcgcatcaggtgttggcccatcggctacaggccacgagaccacccaggttgtgcccatgtttgatctctctgtgatggttactccgttttgatgtggcccagaacgatactcctccttgtttgtgtatagagtcatcttaagctcagaatattgaggtggtgcagatggagcaaatgtgcaataggtcatgcctagccagacagggtggttcacttagggacctgggagagagcgggggcgtgctgattgagacggtcagctatgatttgctcttatttgctcgt

SEQ ID NO: 258568 - DNA, 713 bp, Zea mays
taggacatgagttctagtatttatcagtccttaatgaaggcgttgaccatggagtatgtggaggacataacttgttatccgaatagttatgttccacatgactggctcattcttctgcaagtggttctgaaaagaataagtactggagatgaaaacgagtctgctcttctgttcaagcttctgggcacaatagttgagggtggacaggaaaaagttatgtctcatattcctgaaattgtatccaacattgccagtactgtaatggagctcctgccccctgtcccagatccttggcctcaggtagtagtgcatctttcttctgtgtggtcaatattttggtactttatcatgatgaccggcgggaggaacaccgggcgtgtaggagtgatcaagaacagggagaagtacaagcgcagagtgatcaagaacagggagaagcacaagggcagcttcgagaccatccacgtgctgcttagagctttttgttatgtctagttttctcctatttgttgtacaggaaaacatagaatggaattcaaatttggtggccacaaaatgtggagacttgaattcatataaagttaggcttaacattagtacaaacagttgtattttagtttagatttagagtacacttatgtatgtgttgtttgacaatgcttatttatgatatattgaatgatacttctttatattaaaaaaaaaaaaaagaa

SEQ ID NO: 258569 - DNA, 719 bp, Zea mays
gggagtctggggttaaatttgagcatatctctggggggcaacccactgatgtagcacagtctgctggcagtgaagctgcagatgccattgcgagtgtgtcagacagtgttattcctatcttcaggcagcaagcagagcagttgctaagctcttccagtctgtctgcagctgacttgcttgccaaagcacttgcgaaggcagttggttacacggacataaagaaaagatcattgttatcttccttggaggattacagtacactacatcttcaaactggcagaccgatgtggtcacctgggtttgctataacattccggtgatcgtgtttcttcttcgtcggggtcatatttgttcccattggtgttatcttcagtttgacgtcggcaacgtggtcatggtgaccggcgggaggaacaccgggcgtgtaggagtgatcaagaactgggagaagcacaagggcatcttcgaggtcatcgacgtgctgcttggagttttttgcatgctatgtctagttttctcctatttgttgtacaggaaaacatagaatggaattcaaatttggtggtcgcaaaagtgtggagacttgaattcatataaagttaggcttaacattagtgcaaacagttgtattttagtttagatttagagtacacttatgtatgccttgtttgacaatgcttatttatgatatattgaatggtacttatttatattatatt

SEQ ID NO: 258570 - DNA, 1138 bp, Zea mays
ccgaggaggcgctcgacggctcggcgctgtccagtaatcagtaggcgccgctgcgtcggcgacttcttctccccaccagcgtggccgcgtgcagggttcaggctgtcacggaactcaagggtattagtgatatacaaaagtttgctttatggcaagtcagtgatgagtgaagggtgactaagaggcttctctaagtgtcaatatacaagacttcattgacgaggagatggtcccagttacattacatggttctgttggacacaatgaagccatccagatatgctattaaaaatcctgctagtcattatggctttaaactgtaccatgtctgttctattttcagctaggcagagcatgttctatttacagcaggccagcagacaccaggcagtaaggtgatgtatgaatcaattatcaggtgacaaaatggttatgtttaatcatgcatgttttcttcctgactctctatgtttctttgaggcattcaactacttgtagtatcagtgcatcactgatgtatatatgtgttgatgttcatcatccaagatcaaatacatcctgctaggtcattacttgctaatgtgcatctgagtttgctgttgccaggatggaaatgttttttggcagctttctcagtgaatcagtatcaccgcagaacctttttggacacccagatgtcgagagatgcccatttctgaggaatatcaatggagctacaaccttttccctctcttctgctttgccagtagctgctcaaggaggcaagggtccaatttttgaggaagggtcaggctttgagtcagcattcaagctttttcatggccgagatggaatagttcccctttcagaaagatcatatgtatctgatgaaaaccacaatgagagcattgacgtcaagttatatacttagttaggctcaatttagagtacacttatgtagagtacacttatttatattgaactgtcggagttcatacatatgtattaagttatatcacttagttaggctcaatgttagcacaaacagttgatgagcaactttaaatttagaatacacttatgtatgagttatttgacaatgcttatttatgagatattgaatgttatttatctatattatattaattatagtgttatt

SEQ ID NO: 258571 - DNA, 1074 bp, Zea mays
  unsure (1)..(1074): unsure at all n locations
tttgtacgcgtggggttttgtcgccatagcactcccgccgaccccctcgccgccgccgggaatggagaccagcaccaagaagcttagcagccttcgtatcacctccctggacgacgatgacgacgagaccgagatcccgcaccagccccctcaagcaggcctctccaccgctgaagcggattatgaggacgacgacgatgaggaggaagaagccgaagtgactcttggtgtccttagcaaaccgaagcacccaggcctcctcctccgccacttgttccccagcaaggccggtggcatcccggcgtggctagacccggtgaacttgccgtcgggaaagtccagctactgtggtttctgtggcgagcctctgcagttcgtcctccagatttatgcaccaattgaagataatgtagcagccttccaccgaacgctgttcatgttcatgtgcccatccatggcatgcttgcttcgagatcaacatgaacaatggaagcacaagtacgggaatccatgtagaagcgtgaagattttccggtgccaattgccacggaataatgccttctactcagctcaacctccaaagcatgatggctctgacaaaccactctgtccaggagctcctgtatgccactggtgtggtacctggaaagggtgataaaatatgtagtagctgcaagaaagcaaggtactgttatgagaaacatcaggcactgcattggcgtactggtcataaaaatgattgcctccagataataagttctgttgcttcaaattcagttctgccagctgtaggaatagggatttgtttggcttccaaatggtttgttggtcctaaaatagtcagaatcacatgacatctgtgctatagatatggacctcggtggttttctccacattaggaaagctggaagagccttttgaactcagtttttttgctaacagtggtgttatggtgaaacagagttttgtgtgtatgtaccaacagataaaatgtaaacacgacattatcatagttgagtacaggaataattatctctttaaaaaaaaaaaaaaaaaaaaaaaaannnnnnnaaa

SEQ ID NO: 258572 - DNA, 1047 bp, Zea mays
cccacgcgtccgtgattataaattgcctaaaacaattggtcatgaaaatgtttatatcacctttatctacacgatcaggttggcacctatacaatatatatgtggaggcataaaagaatttttgggaattctagggagagtttagaatatatttcctagtattcaattgtgcctagatgttcaactaatcctgcatatttttaggtatgcgaggaaaagtaatggagatgctaactgcatgttctgatgcattgatggattagtcttttatcctccctgtctgttatatatgcctttattattgcatggagctaataaatcattatccctactgagattgaattttttttgcattgatatcaaataaatcgtccattgaatcattttttctatgttttcagaatgatggacaaggtacaccatgatagtagaattttttttacaccctggttatcttgttttaattcatcttttctgtgctccaattattttggtgaatcttagcatagaacttgaccttctattattttgtatgtttggtttgcatgggataactggcatgggatatatttatgaacattgatatcgtttttatgcttactcacatgggataatctgatcttctaactcaagatatttttcttttggtaatatgatcgtctaacttaagtttgcattcaatttagactttaggttatgttagtcataacaagcttgaaaagacatattaacaaagaaagatcatattagcagttcatgttacgtttgcagatatggacctcggtggttttctccacattagaaaagctggaagagccttttgaactcagtttttttgctaccagtggtgttatggtgaaacagagttttgtgtgtatgtaccaacaactaaaatgtaaacacgacattatcatagttgagtacataaataattatctcttatatcttattgtaaaatctgaaacagttttcatgtagatggttagcttgcattttacaattacctcagatcacttcttaatgtatcttacaccaatttatgaaaaa

SEQ ID NO: 258573 - DNA, 995 bp, Zea mays
gtcgacccacgcgtccggtccggtccggttctcttcgccgcggcggcggatggccctgccgctctacggctgcaggtcctgcgctgtgcatgatgccatcatcttctgccactgctgtgacgccaggctgtgcctgcactgcgacgccgccgtgcacggggctaccgaggcgggggcgctccacccgcgcgcccggctctgcgacgcgtgcggcgccgcgccggccgcgctgcgctgcgacggcaccgtgacgctgtgcgccgtgtgcgtcggccgcggtgctcccggcgtgacccgcacccgcgtggccacgtacaccggctgtccgggccctgctgagatggtgcgcctcatttccgtagacccaccgcagctggagcaggactttgaggcctggctcgcagacaagctcccgcgtttggtcgtggaggaggatgttgggctcccgccagactgggatgtcgccgtggaaactgcaaggcttgagaagatgctggcagaatgctgtgagcctgagactgagataaatttgatgcaggaagctgaccagcagcgactgcagatgcagatgctgctgcaagatgcaagcgctatggccaagaagcgagaggggagagagagggccaaacaaagatatatcgagaagaggaagaatagaaggttctgcaagcagatcatgtatgcttctcgtaaggccagagcagacacgagatggcgagtgaaaggccgctttgccaagcaggcttccgctagcttctagtgatctccctgatctgctttcacagtcatttttgtgttgtcatctcgctcgcactttgctcaatccctcttcggcttcaacaacaaatttctcttgggtaatttattttccataattacatatattttccctgcttgtcagatgtaatatttttctttccttttattcaagaactaaatgcaattcaatacgtatgtggatcggactaaaaaaaaaaaaaaaaaagggcggccgc

SEQ ID NO: 258574 - DNA, 1200 bp, Zea mays
gctagtcgcttcgctgccacatctctcctcgtccaaagactccaagctcctgtgcggcctgtgttctgctgccgcctctggtccacatctccctacgccgccgccccgtcgtccgccgacacctttagcgctgggaaggatcacaggggatcggagcgaggcgggggacccgcggttttgtcgcccggatggcggcggagcgatgacactggcggcgggtgcggcgcggcgttgggatgcggacgatctgcgatgtgtgcgagagcgcaccggcggtgctcttctgtgcggccgacgaggctgcgctttgccggccttgcgacgagaaggtacacatgtgcaacaagcttgctagtcggcatgtgagagttgggcttgcagaccctaataaactggcacgttgtgatatatgcgagaattcacctgctttcttctactgtgagatagatggcacctcactttgcctgagctgtgatatgactgttcatgttggtggcaaaagaacccatggtagatacctgctcctaaggcaaagggttgaatttccaggagataaaccgggccatatggatgacgtgcctatggagatcaaagatcctgaaaaccagagagagcaaaacacgcccaaggagcaaatggcaaaccaccataacgtcaatgatccagtctctgatggcaattgcgatggccagggtaacattgattcgaaaatgatcgatcttaatatgcgcccggctcgtactcatgggcaaggatcaaattcccagactcagggggtggatcttagtgtgaacaaccatgactctccaggggtggtgccaacaagtaattccgaaagagacgccatcaagtaaacattggaagattggaatgtacatttcaactacatattctgttctataggagctcctgggggcagaaatggggttattcagtggtctctctgttatcactagtaagcgtatttctggcagagttggagctaataactgcatctcaattcggcttgtcgtgccctagacggtattgctgtccaattgcattctctttgcgattgttagaactctgtatagaagcgcagcggctgccgcctgtgctctggagccggagtattgtgtgccattagaaactgtacaaaagattaatagaccgctcatttttctcaaaaaaaaaaaaaaaaaaaaaaaaaaaaaaaaaaaa

SEQ ID NO: 258575 - DNA, 1516 bp, Zea mays
  unsure (1)..(1516): unsure at all n locations
gtcgacccacgcgtccgcgctgccacatctctcctcgtccaaagactccaagctcctgtgcggcctgtgttctgctgccgcctctggtccacatctccccgccgccgccccgtcgtctgccgacacctttagcgctgggaaggatcacaggggatcggcgcgaggcgggggacctgcggtttttgtcgcccggatggcggcggagcgatgacactggcgtcgggagcggcgcggcgttgggatgcggacgatctgcgatgtgtgcgagagcgcaccggcggtgctcttctgtgcggccgacgaggcagcgctttgccggccctgcgacgagaaggtacacatgtgtaacaagcttgctagtcggcatgtgagagttggacttgcagaccctaataaacttgtccggtgtgatatatgtgaaaattcacccgctttcttctactgtgagatagacggcacctcactttgcctgagctgtgatatgactgttcatgttggtggcaagcgaacccatggaagatacctgctcctaaggcaaagggttgaatttccaggagataaaccgggccatatggatgacgtgcctatggaaatccaagatcctgaaaaccagagagaccagaaaaagccacccaaggagcaaacggcaaaccaccataacggcgatgatccggccactgatggcaactgtgatgaccagggtaacattgattcaaaaatgatcgatcttaatatgcgcccggttcgtactcatgggcaagaatcaaattcccagactcagggggtaggtcttagtgtgaacaaccatgactctccaggggtggtgccaacaagcaattccgaaagagacaccagcaagtaaacgttggaagatcggaatatacatttcaactacatatactgttctatacgagttcattttgtggtgtgtgtgtgtgtcactaatttttactcaattctaaattataagtcattctaacttttttgaagaggtaaagtatctcaggtttgactaaaattgtagaggtaatcacagatttatgacatcaactaggtatattttaaaaatataattaattaaaacactaataatacttatttggtatcatgaatgtgattgttttattatataaatttgatcaaacttgagatgctttggctctcttaagaaaattagaatgtactagtaagtatatttttggcagagttgtagctaaaaaaaaaaaaaaagggcggccgccatgacctagattggcaaaaccgccaagttactttcacatgtacttgttattgtcttacagacttttgaccattatacatatgattcaggaattccggtaatctgtcgggtgtcccggtgatactaaatgatccactttatttgttcactagctggatgcccgtacgttgcaacgggaatatataatatcagtatactacgataacttatatacaaaatctatgttatattgttatgagaaaatgtttcataatcaacttgtgatcctagccatnc

SEQ ID NO: 258576 - DNA, 492 bp, Zea mays
agcagctcagcgcagtgctaccggacgaggtggaggccgcacgagcggctgtggagagtggcacgaccccgaacaggattaccgagtgccgttcgtacccgctgtacaggttcgtgcgcgaggagctcggcgccgagtacctgaccggcgagaagacgcggtcgcccggggaggaggtggacaaggtggtgatcgccatgaaccagcgcaagcacatcgacccactgctgcagtgcctcagcgagtggaaaggcgcgcccctgccaattatctgaactacagataagagagaagacaaggtatgacggatgagaaaagaagtactatcctgctactgtatacgaataattcacgcggtgtggcgtgcataaactatactatagctaatgaccgtgcgttgcaacgggaatatataatatcagtatactatgataacttatatacaaaatatgtgttataccgttataagaaaatgtttcataatcaatttgt

SEQ ID NO: 258577 - DNA, 342 bp, Zea mays
gaattcggctcgagggcgcgggcgcggaggtgactgcgggtggcgtcttctgcgacatcctgcggctggcgtcttaccttggcgctccttcttagagcttccacttacagttgtcaatttgaagaggcagatggacagtgccctgcatgatgcctccgtgtttaggcttattatggacttgctcaaagttgttctgaataagtgccaggaaataaggcctctatcttatttaggcctctatcttcggggtagctgactaagtgttgttattgctacggaatccagaattctgtgaattgaaatgaattgtaccgatgaaaaaaaaaaaaaaagggcggccgc

SEQ ID NO: 258578 - DNA, 486 bp, Zea mays
gaattcggctcgagctacgacatccactctcctaggattccctccacagaggagatcgcagaccgcgtcgagaagatgctcgccgtgctcgacaccaacatcctctgggtgaaccctgactgtggtctcaagacacgcaagtacacggaggtcaagcccgccctgaccaacatggtctcggccaccaagctcatccgcacccagcttgccagcgcgaaatgaggtcgtttgatagctccatggtctgatagcgcggaatgagccagttgttttgaataatttgggtgttaccccctgttccatggtgttagtgttaggttagcctctcattggtgagatacgccgtttcaagatgtgttctaagtttggagtgtgtgttttcctttgggctatgtttctgggggtatgtgtgtgctttggttataaacagaaatgaaatatgcagtcttccaattgtatcaaaaaaaaaaaaaaaagggcggccgc

SEQ ID NO: 258579 - DNA, 1139 bp, Zea mays
gtcgacccacgcgtccgcccacgcgtccgcggacgcgtgggcgaccctgcgccggagcccatgtccggctaccgcaaccgggagctcgagactctgttcaccatgtaccagatactcgagtcctggctccgcgtcgcgtcgcagctgctcacccgcctcgacgagcggatcgaagacaagtgctgggaggcggcggccggcgactgctggatcctggagcgcgtgtggaagctgctcgcggacgtcgaggacctccacctgctgatggacccggacgagttcctacggctcaagagccagctcgccgtacgagcggcgccggggtctgagtccgcgtccttctgtttccggtccacggcgctcctgcacgtcgctagcgccactagggacctcaagaagcgtgtgccctgggtgctcggtgtcgaggcggaccccagcggcggcccacgggtgcaggaggcggccatgaagctgtaccacagccgtaggcgcggtgagggcgaggaggcaggcaaggtggacctgctccaggccttccaggcggtggaggtggccgtgagagcattcttcttcgggtaccggcagctggtggcggcggtgatgggcacggcggaggcgtcgggcaaccgggcgctgttcgtgccggcggaggagatggatccgctcgcccaaatgttcctggagccgccatactaccctagcctggacgccgccaagacgtttctagcggattactgggttcagcttcagcagatggcggaggcctctgctccgtcaagacaaagctgaaacggcgaaatggcacggctgagccaccgaatcgcgcagttttgcaggactgaagatactatgcatgcatttcgttggggccttttgcccttgtggtgaatggtgatagagtgattcatttctatagcgatcatgtacttgcagtacatgtcgcactagaatactagattctcttactatcgttgtgcactgcgttgtacgtgttgtgttctacgtagatatagattgattcagttagatgtcaaaaaaaaaaaaaaaaaaaaaaaaaaaaaaaaaaaaaaaaaaaaaaaaaaaaaaaaaaaaaaaaaaaaaaaaaaaaaaaaaaaaaaaaaaaaaaaaaaagggcggcc

SEQ ID NO: 258580 - DNA, 483 bp, Zea mays
gtcgacccacgcgtccggacctcggacgcgtgggcggcggaggagatggatccgctcgcccaaatgttcctggagccgccatactaccccagcctggacgccgccaagacgtttctagcggattactgggttcagcttcagcagatggcggaggcctctgctccgtcaagacaaagctgaaacggcgaaatggcacggctgagccaccgaatcgcgcagttttgcagggactgaagatactatgcatgcatttcgttggggccttttgcccttgtggcgatagagtgattcatttctatagcgatcatgtgctattgcactacatgtcgcactagattctcttactatcgttgtgcacagcgttgtacgtgttgtgttctacctagatagattgattcagttagatgtcacttgtattgccaagtaggtcaattggatatggaacttttgtaaaaaaaaaaaaaaaaaaaaaagggcggccgc

SEQ ID NO: 258581 - DNA, 925 bp, Zea mays
ccgtcctcccttccgcagccgagcacagccgccgcgcccacaaatcacgcgactcccgcttccatgtcctcgcgtcctccattgcagccgcatacatagcgtcgccccttccatcgatggcagccagccgcgcccgcaaatcacgcgactcccccttccatggcgtcgcccccttccatccatggcaggtccgcgcccctacgccccaaatcacgcggatggaaggggtcgcgagggagtctctctctggacgcgcccgtcgccgcctccaagctcaggagggagcggcgcccggcccccgcgagcgtgaacccggggccacaatgcttgaggcggaggaggggccggcggttcgctgccagacggggtccaccgcagcgcccttcctcaggacggaggagccccccgcggctgcggcgggggcaaggaatgcccaggcggggttcaccttcgtcatgaagttcggcggctcgtcgctcgcgtcagccgagcggatgcgggaggtggccggcctcatccttagcttcctcgacgagatgcctgtcgccgtcctctccgccatggggaagaccaccaataacctcctcctaggaccttccatttctagctctcagcgcctgagtcagggtgctcgattctttcgcttactagctaacaaggctagatgcgcgtgtgcctgattcgttgtctgtgtaggccgaagagaaggcggtgagctgcggcggaggaggggcatctgaaatccctgagctcgctgtcatcagggagctacatcttaggacaattgatgagctcggtttagataagtcgattgtttcaggtatgttgttgtttgctccactctgctcttggaacgcctcagttgttcctcttgctctatcatgaatgcttctgttatacaaaaaaaaaaaaaaagggcggccgc

SEQ ID NO: 258582 - DNA, 3165 bp, Zea mays
gtcgacccacgcgtccgccgccctctcgctttcgttgtcatgaggagcctcaccgtggcaagccgccacccgggcgccgctttctctacccgccgccgcccccttcttcaccccgccgcagccggaagggactcgaccttccagcggtgctggcgatgggaaaaaactcaggacagctccttcgggagctcactaaggaccagccgccttccaagaactgtgcacggagatattttgaagaatttgctcgcaccaactgctggtgctgtttcagttgagcaagctgaagctattgctgacctcccaaaaggtgacatgtggtcggtgcacaagtttggtggcacatgcatggggacctctgagagaattcacaatgttgctgatatagtccttcgtgatccttctgagaggaaactggtagttgtatctgcaatgtctaaggttaccgacatgatgtataatcttgtaaacaaggctcaatcaagggatgattcttacattgctgtactggatgaagtttttgataagcatatgacaacagcaaaggatttgcttgctggagaagaccttgcaagattcctgtctcagttacatgcagacatcagtaacctaaaagcaatgcttcgggccatatatatagctgggcatgcaacagagtctttctctgattttgttgttggtcatggagagttatggtctgctcaaatgttatcatatgcaatacagaagtctggaacaccatgcagttggatggatacaagggaagttctagttgtgaatccgtcaggagccaaccaggtagatcctgactatttggaatctgaaaaacgacttgaaaaatggttttctcgatgtccggctgagacaataattgctactgggtttattgcgagtacacctgaaaacatcccaacaaccttaaaaagagatggaagtgatttctctgcagccataattggttcccttgttaaggctcgccaggtgaccatctggactgatgttgatggggtatttagtgcagatcccagaaaagttagtgaggctgtaatcttaagcacattgtcgtatcaggaggcctgggaaatgtcatattttggggcaaatgtcttgcatccacgtactattatacctgtgatgaaatataatatccctattgttataaggaacatattcaatactttctgcccctggaactatgatctgtcaacagcctgctaatgaaaacggtgatttggaggcttgtgtcaaagcttttgcaactatagataaattggctttggttaatgtcgaagggactggaatggctggtgtcccaggtacagcaaatgccatatttggtgctgtgaaggatgttggagcaaatgttatcatgatatcacaggctagcagtgaacactctgtatgctttgctgttccagaaaaggaagttgcattggtttctgcagccttgcatgctaggtttcgtgaagcattggcagcagggaggttatctaaggttgaagtcattcataattgtagcatccttgctactgtcggcctgaggatggcaagtacacctggagtcagcgcgaccctttttgatgcactagctaaggcaaatattaatgtaagggcgatagctcaaggttgcagtgagtacaacattactattgtactgaagcaagaagactgcgtgcgggctctgagagctgcccactcaaggttcttcctctccaaaaccacactggctgttggcatcattggacctgggttgattggtcgcacactacttaatcagctgaaggatcaggctgctgtcctcaaggaaaatatgaacattgatttgcgtgtcaacagaatagctggttctaggacaatgcttttaagtgatataggagtagatttgacccagtggaaagagaagctacaaactgaagcagaacctgccaatcttgataagtttgttcatcatttgtctgagaatcactttttccctaacagagttttggtagattgcacagcagatacaagtgttgcatctcactattatgattggctaaagaaaggaatccatgtcatcactccaaacaagaaagcaaattcagggccacttgacaggtatcttaaacttagaactcttcagcgtgcatcatatactcattacttctatgaagcaactgttggtgctggcctccctatcattagcactctgcgtggtctcctagagacaggtgacaagatattgcgcattgaagggattttcagtggaacgttaagttatatttttaacaacttcgaaggagcaagaacctttagtgatgttgttgctgaagcaaaaaaagcaggatacacagaaccagatccaagagatgatctgtctggtactgatgttgccaggaaggtcataattcttgcaagggaatctggtttggggcttgaactttctgatattcctgtacgaagtcttgtgccggaggcacttaagtcatgtacctcagccgacgaatacatgcagaagttaccatcttttgacgaggattgggcaagagagaggaaaaatgctgaagctgcgggagaagttctgcggtatgttggagtggtggatgtggtcagcaagaaggggcaggtggagctgggagcctacaagagggaccacccgttcgcgcagctatctggttccgacaacatcatagccttcaccacctcgaggtacaaggatcagccactgatcgtgcgaggtccgggggctggtgcggaagtgactgcaggaaggcgtcttttgcgacatactgcgcctgtcttcctaccttggtgccccctcgtagtctgtcaaggttttgcggtgccgtggtgttgtgttgctgctctactactggtttttttgttgttgttgttagtgcttggaatagctggagtaagtatggattaagtgagttctggggtgttaagggttgggtgtcttagttagaaggtcgtattggagggaatggaatccgttcaccgttcttgcgtgttgcaataatcttgtgtggagtctccaggtttgttcggttgctaatagtaagccaagccaatggcgagtctagtgaagaaccaaataaaaaaggctgggctgtaaggaatgtatccacacgttacttcattggtgtcaccataaataaaaaaaaaaaaaaaaagggcggccgc

SEQ ID NO: 258583 - DNA, 1797 bp, Zea mays
gtcgacccacgcgtccgtccacctcctcgaagccgccgcgaccgatcgagcgaagcgtcccttcccgcgccgacgccgaaaccctagctcctcttacgccatggccaccgtgtcgctcactccgcaggcggtcttctccaccgagtccggcggcgccctggcctctgccaccatcctccgcttcccgccaaacttcgtccgccagctcagcaccaaggcacgacgcaactgcagcaacatcggcgtcgcgcagatcgtcgccgccgcgtggtccgactgcctcgctgctcgccgcctccgcggcggcggatgtcagcgcaattcctaacgctaaggttgcgcaaccgtccgccgtcgtattggccgagcgtaacctgctcggctccgacgccagcctcgccgtccacgcgggggagaggctgggaagaaggatagccacggatgctatcaccacgccggtagtgaacacgtcggcctactggttcaacaactcgcaagagctaatcgactttaaggaggggaggcatgctagcttcgagtatgggaggtatgggaacccgaccacggaggcattagagaagaagatgagcgcactggagaaagcagagtccaccgtgtttgtggcgtcagggatgtatgcagctgtggctatgctcagcgcacttgtccctgctggtgggcacattgtgaccaccacggattgctaccggaaaacaaggatttacatggaaactgagctccctaagaggggaatttcgatgactgtcattaggcctgctgacatggatgctctacaaaatgcgttggacaacaataatgtatctcttttcttcacggagactcccacaaatccatttctcagatgcattgatattgaacatgtatcaaatatgtgccatagcaagggagcgttgctttgtatcgacagtacttttgcctcccctatcaatcagaaggcactgactttaggcgctgacctagttattcattctgcaacaaagtacattgctggacacaacgatgttattggaggatgcgtcagtggcagagatgagttagtttccaaagttcgtatttaccaccatgtagttggtggtgttctaaacccgaatgctgcgtaccttatccttcgaggtatgaagacactgcatctccgtgtgcaatgtcagaacgacactgctcttcggatggcccagtttttagaggagcatccaaagattgcccgtgtctactatcctggcttgccaagtcaccctgaacatcacattgccaagagtcaaatgactggctttggcggtgttgttagttttgaggttgctggagactttgatgctacgaggaaattcattgattctgttaaaataccctatcatgcgccttctttcggaggctgtgagagcataattgatcagcctgctatcatgtcctactgggattcaaaggagcagagggacatctatgggatcaaggacaacctgatcaggttcagcattggagtggaggattttgaggaccttaagaatgatcttgttcaggccctcgagaagatataagctccaatccatttgcattaataaagttatgaggtgatggttgtctggatcttgtagagatttgtgatgatatatgagctgatgactgcgaataagttctcttttgcttattttattcgtcaaattcaataagctgtgattgctgcatgatctagtgttgggcttagttacacttgtcaagttaaattggtctggaaccatgtatacttgtagttttaaaaaaaaaaaaaaaaagggcggccgc

SEQ ID NO: 258584 - DNA, 552 bp, Zea mays
  unsure (1)..(552): unsure at all n locations
gcataattgatcagcctgctatcatgtcctctggggattcaaaggagcagagggacatctatgggatcaaggcattcctgatcaggttcagcattggagtggaggattttgaggaccttaagaatgttcttgttcaggccctcgagaagatataagctccaatccatttgcattaataaagttatgaggtgatggttgtctggatcttgtagagatttgtgatgatacatgagctgttgactgcgattaagttctcttgtgcttattttattctttgaattcaataagctgtggttgctgcatcttgcatgtagtgttggacttaattttacttgtcaaattacaatagtttggtcccatgtacttgtgtccgcgcctccgcggttgtgcccctagtgtttttgtgtcatttgctgtgtagtgtgagattaaggcacgatgtccttaatcaccataataaatccatgccttaaatgtaaggatctggntggaatgataaagtgcggttgaagaaagaactatatataatttttctcagtacacattagattc

SEQ ID NO: 258585 - DNA, 1577 bp, Zea mays
cccagccgaccgccccgacttctcggatctgagacgagacgagttaccatctcatcccaactccggaacgaacaagttaccatctcatcccaactccgcctcgaccggatctcgtcggactcggatccgcccgaccaccccgcgccgccgcagatcaaagaagatggcagctgtcgacacattcctcttcacctcggagtctgtgaacgagggacaccctgacaagctctgtgaccaggtctcagatgccgttcttgacgcttgccttgctgaggaccctgacagcaaggttgcttgtgagacctgcaccaagaccaacatggtcatggtctttggtgagatcaccaccaaggccaatgttgactacgagaagattgtcagggagacctgccgcaacattggttttgtgtcaaacgatgttgggcttgacgccgaccactgcaaggtgctcgtgaacattgagcagcagtcccctgatattgctcagggtgtgcatggccacttcaccaagcgccccgaggagattggagctggtgaccagggacacatgttcgggtatgcgaccgatgagacccctgagttgatgcccctcagccatgtccttgccaccaagctaggtgctcgtctcaccgaggtccgcaagaacggaacctgcccctggctcaggcctgatgggaagacccaggtgacagtcgagtaccgcaatgagggtggtgccatggtccccatccgtgtccacaccgtcctcatctccacccagcacgacgagacagtgaccaatgatgagatcgctgctgacctgaaggagcatgtcatcaagcctgtcatccctgagcagtaccttgacgagaagaccatcttccaccttaacccatctggccgctttgtcattggtggacctcacggcgatgctggcctcactggccgcaagatcatcattgacacctacggtggctggggagcccatggtggtggcgctttctccggcaaggacccaaccaaggttgaccgcagcggagcctatgtcgcaaggcaggctgccaagagcatcgtcgccagcggccttgctcgccgcgccatcgtccaggtgtcttacgccatcggcgtgcccgagcctctctccgtgttcgtcgacacgtacggcaccggcgcgatccccgacaaggagatcctcaagattgtcaaggagaacttcgatttcaggcctggcatgatcatcatcaaccttgacctcaagaaaggcggcaacgggcgctacctcaagacggcggcctacggccactttggaagggacgaccctgacttcacctgggaggtggtgaagccactcaagtcggagaaaccttctgcctaaggcggcctttttttcagtaagaagcttttggtggtctgctgtgcttaatcatgcttttatatggcttctacatgttgtggttctttcttgatctgcaccgcgcttatcgtttgtgttgtactgccctaataagtggtgcttatgaggactgtttctggttttaaaaaaaaaaaaaaagggcggccgcacatgaaagagctacagccacagctatttgagaagt

SEQ ID NO: 258586 - DNA, 674 bp, Zea mays
ctcctcgcgtccgctcccacacacccgacgcgcaagcctgaccccaccgacgtacaccccttccccaaagcctccgacgcccaagccgaccccaccgacgtacaccccttccccaaagcctccgacacccaagccgaccccaccgacgtacactcccacaccgaagccgccggccaccaagccgcccacctacactccgacgccgccggtgtctcacacccccagcccgccgccaccatactactagaaagcgatgcctaccataccacactgctgtcagtctctggagcatttaggtggtctggatcaatggaagggttgtgtcctagccagccggcaaagatgagctgctgatggtaatgatgatgataagaggccactgctaccctactacgtaccctcctctttgtgtgctgccatccgtccccgttagacgatcgaggagagaataacgcagagctctctgctcccggcctgtcttctgccgtcccggccgtttaatttactagtgtgttcgtcctatatgtttagcagcagcaggtgtattgtgcgggtatgtaatggtattgcaactatattgggtgtaaaaccataataaatgtgggcaaatatgcaaggaaaaaaggcttctacttctactgtacactaaatatgaaaaaaaaagggcggccgct

SEQ ID NO: 258587 - DNA, 1666 bp, Zea mays
tctctgcgtccgcccctcgtccgcggacgcgtggggtcggatctgagacgagacgagtcccctcgcctcacccaaccggaacgaacaagttaccatctcatcccaaccccgcctcgaccggatctcgtcggactcggatccgcccgaccaccccgcgccgccgcagatcaaagaagatggcagctctcgacaccttcctcttcacctcggagtctgtgaacgagggacaccctgacaagctctgcgaccaggtctcagatgccgttcttgacgcttgccttgctgaggaccctgacagcaaggttgcttgtgagacctgcaccaagaccaacatggtcatggtctttggtgagatcaccaccaaggccaatgtcgactacgagaagattgtcagggagacctgccgcaacattggttttgtgtcaaacgatgtcgggcttgacgccgaccactgcaaggtgctcgtgaacattgagcagcagtcccctgatattgctcagggtgtgcatggccacttcaccaagcgtcccgaggagattggagctggtgaccagggacacatgttcgggtatgcgaccgatgagacccctgagttgatgcccctcagccatgtccttgccaccaagctaggtgctcgtctcactgaggtccgcaagaacggaacctgcccctggctcaggcctgatgggaagacccaggtgacagtcgagtaccgcaatgagggtggtgccatggtccccatccgtgtccacaccgtcctcatttccacccagcacgacgagacagtgaccaatgatgagatcgctgctgacctgaaggagcatgtcatcaagcctgtcatccctgagcagtaccttgacgagaagaccatcttccaccttaacccatccggccgctttgtcattggtggacctcacggcgatgctggtctcactggccgcaagatcatcattgacacctacggtggctggggagcccatggtggtggcgctttctccggcaaggacccaaccaaggttgaccgcagcggagcctatgtcgcgaggcaggctgccaagagcatcgtcgccagcggccttgctcgccgcgccatcgtccaggtgtcttacgccatcggcgtgcccgagcctctctccgtgttcgtcgacacgtacggcaccggcgcgatccccgacaaggagatcctcaagattgtcaaggagaacttcgatttcaggcctggcatgatcatcatcaaccttgacctcaagaaaggcggcaacgggcgctacctcaagacggcggcctatggccactttggaagggacgaccctgacttcacctgggaggtggtgaagccactcaagtcggagaaaccttctgcctaaggcggcctttttttcagtaagaagcttttggtggtctgctgtgcttaatcatgcttttatatggcttctacatgttgtggttctttcttgatctgcaccgcgcttatcgtttgtgttgtactgccctaataagtggtgcttatgaggactgtttctggttttgctgcttatgttgtaatgctttgaaacaatgaaagaagctacaggccacagctattttgagaagtaatggaacctcgtgccgttttgattaaaaaaaaaaaaaaaaaaaaaaaaaaaaaaaaaaaaaaaaaaaaaaa

SEQ ID NO: 258588 - DNA, 441 bp, Zea mays
cgccgccaccatactactagaaaacgatgcctaccataccacactgctgtcagtctctggagcatttaggtggtctggatcaatggaagggttgtgtcctagccagccggcaaaaatgagctgctgatggtaatgatgatgataaaaggcccctgctaccctactacgtaccctcctctttgtgtgctgccatccgtccccgttagacgatcgaggagagaataacgcagagctctctgctcccggcctgtcttctgccgtcccggccgtttaatttactagtgtgttcgtcctatatgtttagcagcagcaggtgtattgtgcgggtatgtaatggtattgcaactatattgggtgtaaaaccataataaatgtgggcaaatatgcaaggaaaaaaggcttctacttctactgtaaaaaaaaaaaaaaaaaaaaataaaa

SEQ ID NO: 258589 - DNA, 1255 bp, Zea mays
cccacgccttcggccccgcctcctcgctctctccacatttcctctcccgataagagtgaggcctcggctcagcttgagcttcccctccctcccctccagcgctccagctcccctccatcctcggccaaaaattctgcggcgagctccgatccggtccgactactaacccacgccgcagaagccgcgcgacctgatcgcgcgggggtcgaggagaggggaagcgcggcgccgcggttgcctgccaccgtaccgccgcaggagaaggaagaggagcccgtatccctccgccccgctgcccgccggaccgatggactccgagcactggatctcgcgcctggccgccgcgaagcgcttctacgcggcgcagctcggccacagcgatcgggccgggatggatgagctggagatggacgaggaggtcaggcccgagttcccctgcccctactgctacgaggaccacgacgtcggatccctctgcgcgcacctggaggaggagcacccgttcgaaccccaagccgcggcctgccctgtctgctctgagatggttacgaaggatatggttaaccatattactacgcaacatggatatttattcaagaatcgccgccggctgcgcagattcatcattccaggcagccaggccctctctttgctgagccgagatctacgggaagcccacttgcaggtgctcctcggaggaggcggacagagatccagcgacaacagcagcagcagcgccacgaacatttcggctgatcctcttctgtcgtcgttcggccttggcttccctacctcagacgcggagcaagcatccaagtcgactgtttccattcctgatgatgctacgacggtgaaagaagcgcccgctcaggcacggaagctaagtatcgattcgtcgctcacaagtgaagaaagggagctgaagcggaagcaagcccgcgtcagagccacgttcgtgcaggacctgctgctctctactctattcggcgactgatgacgaaccagagcgagcctggtattatcactggaaggtgcagagttgatgtgggcgtgatgtatctttctaagttattgtaagccggtctctgtcttcacaactgacgatctgtgtgtggtacgcaccacgcacgcaagtcgcggttgtgcgtgtacgtctgaactctggagcattggtttgttgtaccaacataatgagtcccaacggcggatggctggctatacgtaaaaaaaaaaaaaaaaacgtacaataaatttt

SEQ ID NO: 258590 - DNA, 1713 bp, Zea mays
cccacgcgtccgcccacgcgtccgcccacgcgtccgcccacgcgtccggtcggatctgagacgagacgagacgatcccccctcccctcaaccggaacttgttttaccccatctcatcccactgactccacccacccacccgcccgctgcctccgccggatctcgtcggactcggatccgcccgaccacgaccaccccgcgtcgccgccgcgcagcagcagcagatcagagaagatggccggactcgacaccttcctcttcacctcggagtccgtgaacgagggacaccctgacaagctctgcgaccaggtctcagatgctgttctggacgcttgccttgctgaggaccctgacagcaaggttgcttgcgagacctgcaccaagaccaacatggtcatggtctttggtgagatcaccaccaaggccaatgtcgactacgagaagattgtcagggagacatgccgcaacattggtttcgtgtcgaacgatgtcgggcttgacgctgaccactgcaaggtgcttgtgaacattgagcagcagtcccctgatattgctcagggtgtgcacggccacttcaccaagcgccccgaggagattggagctggtgaccaggggcacatgtttgggtatgcgactgacgagacccctgagctgatgcccctcagccatgtccttgccaccaagcttggtgctcgtctcacggaggttcgcaagaatggaacctgcccctggctcaggcccgatgggaagacccaggtgacagtggagtaccgcaacgagggtggcgccatggttcccatccgtgtgcacacagtcctcatctctacccagcacgacgagacagtcaccaacgacgagattgctgctgacctgaaggagcacgtcatcaagccagtcatccccgagcagtacctcgacgagaagacaatcttccacctcaacccgtctggccgcttcgtcatcggcggacctcacggcgacgctggcctcactggccggaagatcatcatcgacacctacggtggctggggagcccacggcgggggcgccttctccggcaaggacccgaccaaggtggaccgcagcggggcctacgtcgcgaggcaggctgccaagagcatcgtcgccgccggcctcgcccgccgcgccattgtccaggtctcctacgccatcggcgtgcccgagcccctttcggtgttcgtggacacgtacggcaccggcgcgatccccgacaaggagatcctgaagatcgtgaaggagaacttcgacttcaggcccggcatgatcatcatcaacctcgacctcaagaaaggcggcaacgggcgctacctcaagacggcggcctacgggcactttgggagggacgaccccgacttcacctgggaggtggtgaagcccctcaaggcggagaagccgtcttctgcatgaggcgcctcctctgttttggaagaagcttttggtctggtctggtctggtctggtgtgcctgcgctctatcatgcttttttatggctcctacttgtgattcttgatctgccccttgcttatcatttgtactgtactgtcactgtcctaataagtggtacgtgtgcggggtcgtattgtgtctgcttattcacctactagaggattatttctggttttgctgcttatgtaatgcttttaaaaccatgaaagaagctacaggctcctacagctgctttgagaagtaacgg

SEQ ID NO: 258591 - DNA, 773 bp, Zea mays
ggggtgtccgtcagcggggtcagcttgggtgtcgcaggctttgccgaccgggtgtacgttggcggggtcggcttgggcgtggaaggcttggtagccggtctcttagggcttgcagtgtacgtaggcggggtcggcttaggtgtcggaggcttggggcaaggggtgtacgtcggtggggtcggcttgggcgtcgaaggtttggggcttgaagtgtacgtcgacggggtcggcttaggtgtcgaaggcttgggggtcggggtgtacgtcgaaggagtgggagtgggttttggtgtgggtttgtggggcgtaggggcgggagtgtatgtgggtggcgtcggcttggggggcgtcggggtgggagtgtacgtcgacggcgtgggtttggggctcggggtgtacgtgggcggcgtcggcttgtgctccttgggcggcttctccggcttgggcccgtgctccttgggcggcttgtgctccttgggcggcttgtccggcttcggccccttggtggggggcttctcgggcttcggggtcggggtggccggcgtcggcgtcggggtgtacccgccgccgtaaccgtacccggcgtcggcctggatctccacggccaggctcacggccaccaccaccagggccagcagcagagcagccctgccgctgccacccatcctctctctcacacacactctcagtaactgcaagctcttctggttggctctagctggccaatggcgccggacgcgtgggcggacgcgtgggcggacgcgcgtccaaga

SEQ ID NO: 258592 - DNA, 1157 bp, Zea mays
tttttacaagccgtccaaggagcacaagtccgtccaaggagcacgggcccaagccggagaagccgcccaaggagcacaagccgacgccgcccacgtacaccccgagccccaaacccacgccgccgacgtacactcccaccccgacgccccccaagccgacgccacccacatacactcccgcccctacgccccacaaacccacaccaaaacccactcccactcctccgacgtacaccccgacccccaagcctccgacacctaagccgaccccgccgacgtacactccaagccccaaacctccgacgcccaagccgaccccaccgacgtacaccccttcccccaagcctccgacacctaagccgaccccgcctacgtacactccaagccctaagccaccggctaccaagcctcccacgcccaagccgaccccgccaacgtacaccccttcgccaaagcctccgacacccaagccgaccccgccgacgtacaccccttctcccaagcctccgacgcccaagccgaccccgccgacgtacactccaagccccaagcctcccacacacccgacgcccaagccgaccccaccgacgtacaccccttccccaaagcctccgacgcccaagccgaccccaccgacgtacaccccttccccaaagcctccgacacccaagccgaccccaccgacgtacactcccacaccgaagccgccggccaccaagccgcccacctacactccgacgccgtcggtgtctcacacccccagcccgccgccaccatactactagaaagcgatgcctaccataccacactgctgtcagtctctggagcatttaggtggtctggatcaatggaagggttgtgtcctagccagccggcaaagatgagctgctgatggtaatgatgatgataagaggccactgctaccctactacgtaccctcctctttgtgtgctgccatccgtccccgttagacgatcgaggagagaataacgcagagctctctgctcccggcctgtcttctgccgtcccgcccgtttaatttcctagtgtgttcgtcctatatgtttaccaccaccaggtgtattgggcgggtatgtaatggtattccacctaatattgggtgtaaacccataataaatgtgggcaattctccaagg

SEQ ID NO: 258593 - DNA, 2075 bp, Zea mays
aagattgatgtgtaccagaatgcgcgtgcatgcattaggttgcgtgtggcatgtgagagacttaagaaggtactgagcgccaacccagaggccccactgaacattgagtgtttgatggatgagaaggatgtgcggggttttattaaaagggaggagttcgaacagatcagtgcctcggtgctggaacgcgtgaacggaccactggaaaaggccttggctgaagctgggttgactactgaaaatgtgcactttgttgaggttgttggatctggttctcgtgttccggccataatcaagataataactgatttttttgggaaggagccaagacgaaccatgaatgcaagtgagtgtgttgcgcgaggatgtgctcttcagtgtgctattctcagccccactttcaaagtgcgagaattccaggttaatgatgggtttcctttctcaattgcattgtcatggaatggagactcccagaacaccccccaacaaacccttgtattcccaaaggggaatgcaattcctagcactaaagttcttaccttctttaaatccagtacatttgaagttgatgttttgtatgtcgacccaaacggcttacaaattccacaaaaaataagcacatacacaattggccctttccaaacctccaaaggagagaaggccaaactgaaagtgaaagtgcgtctcaacatccatgggaccgttacagttgattcagcaataatgctggaggatgatgtggaagttccagtttcatctgcaaatgaagctccaaatgatactatgaagatggacacagatgatgcaccaagtgatcctgctgttgcatctgatgtgaatatgcaggagcctaaaagcgctgataccgctgaggctgctcatgcagctgaaaatggaccacaagatactgaggaaaaatctgttccgatggaaactgatgcaaaggttgagccgtcaaaaaagaaagttaagaaaattactgttccggtccatgagttggtctatggggccttggctgcggctgacctgcagaaggctgtagagaaagagtatgagatggctcttcaagacagagtaatggaagaaacaaaggagaagaagaatgctgttgaagcttatgtgtatgacatgcgtaacaagctatatgacaagtacagtgattttgtcacgtctgaggacaaggaaggtttgattgctaagcttcaggaggttgaagactggctctatgaagatggcgaggatgaaactaagggggtttatattgctaagctagaagaacttaaaaaagttggtgatcctattgagctgcgcttcaaggaatgggagattagaagttctgctgttagccaactggtatactgcatcaatagcttcagagaagctgcacagtctaccgaccagaagtttgaacacatagacatgtcagaaaagcgaaaggtcattaatgagtgttcggaagcagagacttggctaatagagaaaaagcagcagcaggatgctctgccaaagcatgctaatccggtactccttgctgctgaccttaagaagaaagctgaaacacttgataggttctgcaagccgatcatgacgaaaccgaagccagctcctaagccgcagactccgcctgtggcagaaaaccaagctcctgagcctcagacaccagagcagcagcaatcaggtggcgaaagcacagccagcgagggagccgcagaggagcctcgagccgagcagatggagacagacaaacctgagggagccacagatccctcggcttagctttgccagtgatcaaacatttgtgtgattgaccctgttcacctgctgttatagtcggtaggggggagtgaactaagcgagaggttcgccacatttgatttgaggatgtgtgttgggacattcaaggtattctgtttcttgtccttgacaagggaggtggttgggtgtttgaaggataagagcagtggggtacactttctcacgtttttgtgccccacacgctcgatatccttgttgtaaaaaaatagaggccttaatacgacaaaatatttattccgatcaaaaaaaaggtttactcg

SEQ ID NO: 258594 - DNA, 1809 bp, Zea mays
tctttcggatctggttctcgtgttccggctataatcaagataattactgatttttttgggaaggaaccaagacgtaccatgaatgcaagcgagtgtgttgcgcgaggatgcgctcttcaatgtgctattctcagccccactttcaaagtgcgagaattccaggtcaatgatgggtttcctttctcaattgcattgtcatggaatggagactcccagaatgcaccccaacaaacccttgtattccaaaaggggaatgcaattcctagcactaaagctcttaccatctttaaatccagcacatttgaagttgatgttttgtatgtcgacccagataactcacaaattccacaaaaaataagcacttacacaattggccctttccaaacctccaacggagagaaggccaaactgaaagtgaaagtgcgtctcaacatccatgggaccgttacagttgattcggtgataatgctggaggaggatgtggaagttccagtctcatctgcaaatgaagctccaaacgatactatgaagatggacacagatgatgtgccaagtgatcctgctgctggatctgatgtgactatgcaggagcagcctcctgcagctggaaatggagcacaagataatgaggaaaagtctgtttcgatggaaactgatgcaaaggttgagccgtcaaaaaagaaagttaagaaaactactgttccggtccatgagttggtctatggggccttggctgcagctgacctgcagaaggctgtagagaaagagtatgagatggctcttcaagacagagtaatggaagaaacaaaggagaagaagaatgctgttgaagcttatgtgtatgacatgcgtaacaagctatatgacaagtacagtgattttgtcacacctgaggacaaggaaggtttgatcggtaaacttcaggaggttgaagactggctctatgaagatggcgaggatgagaccaagggagtttatattgctaaactagaagaacttaaaaaggttggtgatcctattgaggtgcgcttcaaagaatgggagattagaggttctgctgttagccaactgctatactgcataaaaagcttcagagaagctgcactgtctaaggaccagaagtttgaacacatagacatgtcagaaaagcaaaaggtcattagcgagtgttcggaagcagagacttggctaatggagaaaaggcagcagcaggatgctctgccaaagcatgctaatccggtcctccttgctgctgaccttaagaagaaagctgaaacacttgacaggttctgcaagccgatcatgacgaaaccgaagccagttcctaagccacagactccgcctccggcagaaacccaagctcctgagcctcagacaccggagcagcagcgatcaaatggcgaaagcacaaccagcgagggagctgcagaggagcctccagccgagcagatggagacagacaaacctgagggagccacagatccctcggcttagctttgcaggtgatggaacatttgtgtgattgaccttatacttggttgggggtgaactaagcaagatggttgttcgccacatttgagaatgtgtgttgggacgttttttcgttatttctgtttcttgacggaggtggttggatggttgaaggatgagagcagtagggtacacttcgtaaatggcgattccgaatttttcgtgtttgtttaatactttgattgtaaaaggtctacttgtttttttttgttgctggagaagcatcaggatccgcacatttcgttcgaattaacataagttcacattaattatttatcc

SEQ ID NO: 258595 - DNA, 2418 bp, Zea mays
  unsure (1)..(2418): unsure at all n locations
cgacgttgcagctatttcatgagacaactgccacggcattggcttatggcatttataagactgacctcccggagcatgaccagctanacgttgcatttgttgatgtcggccatgctagcttgcaggtcagcattgtcggttacaagaagggacagctcaagatgctttcgcatgcatatgaccgttctcttggtgggagggacttcgatgaggccctcttcaagcacttcgcggcgaagttcaaagaagaatataagattgatgtttaccagaatgcccgtgcatgccttaggttgcgtgtggcgtgtgagaagcttaagaagatgctgagcgccaacccagaggccccactgaacattgagtgcttgatggatgagaaagatgtgagagggtttattaagagagaggagtttgaacacatcagtgcacctgtgctggtacgtgtcaaaggacccttggagaaggccttggctgaagctggcttgacaactgaaaatgtgcactttgttgaggttgtcggatctggttctcgtgttccagccataatcaagataatcactgatttttttgggaaggagccgagacgaaccatgaatgcaagcgagtgtgttgcgcggggctgtgctctccagtgtgctattctcagccccactttcaaagtgcgggaattccaggttaatgatgggtttcctttctcaattgcattgtcatggaaacaagactcgcagaacagtgcaccccaacagacccttgtatttccaaaggggaatgtaattcccagcattaaagctctaaccttctataaatccagtacatttgaagttgatgttttgtatgtggacacatgcgactcgcaaattccacagaagataagcacttacacaattggacctttccaaccctccaaaggtgagagggccaaactgaaagttaaagtgcgtctcaacatccacgggattgtcacagttgattcagctatgatgctggaggaggatgtggcagttccagtctcatctgctaatgaagctccaaaggatactacaaagatggacacggatgatgcaccaagtgatcctgttgctggaactgatgcgaatatgcatgagcatagaagtgctgacactactgaggctcctgctgaaaatggagcacaagattctgaggaaaaatctgttccaatggaaactgatgcaaaggttgagccatcgaaaaggaaaattaagaaaacttctgttccgatccatgagttggtctacggcgcattgtctgccactgacctgcagaaggctgtagagaaagagtatgagatggctctgcaggacagagtaatggaagagaccaaagaaaagaaaaatgctgtggaagcttatgtctatgacatgcgtaacaagctgtacgacaagtataacgattttgtcacacccgaggagaaggaagggttgattgcaaagcttcaggaggttgaagattggctgtatgaagatggtgaggatgagacaaagggagtatatatttctaaactggaagagcttaaaaagattggcgatccaattgaggcacggcacaaggagtggacggaaaggggttcctctgtagatcaactggtgtattgtatcaatagtttcagagaggctgcatcggtccagtgaccagaagtttgaccatatcgacatatctgagaaacagaaggtcatcaatgaatgctctgaagcagagaactggttaagagagaggaaacagcagcaggatgccctaccgaagcatgctaatcctgtgctgctcgtatcggatctgaataagaaagctgaaacacttgaccggttctgcaaaccgatcatgacaaaaccaaagccggctccaaagccacagactccgccaccacaacctgaaacccaagcatctgagcctcaaacaccagagcaacaacaaagccggtctggcggaactggtgagccggggagtgagggaggtgtgcagcaggcctccggtgagcatatggacatggacaatcctaaatctgctgatgctgccgcataagtttggttgccatctctatcttatgatcgatcaaaattttctgttattgtgtctggtaggtggatgagttaaggcgacactagcattctcacaagcgatttcgttttaggcagttggattgaggtatatgcatcttgtccggcgttgttttgaaaaaaaggttggccaaatatagcaagttttacataaacgttacatgatcgaaatgcaccatcggctataatcggatgtcgtggatgattcggtcaattataatttgcacttagattccttgagttaggctgcgtcacagctcaggtcatacatgtttctttgaagactacatgttctcgacagaacggaaagctattggtttttgtgcggatagaatttaagcctttt

SEQ ID NO: 258596 - DNA, 504 bp, Zea mays
gcaaaccgatcatgactaaaccaaagccagctccgaagccacagactccgccaccacatactccacctccacagcctgaagcccaagcatctgaccctcaaacaccagaacaacaacaaagcgggactggtgcagctggtgagccgggtagtgagggaggtgtgcagcaggcctccggtgagcaaatggacatggacaggcccgatgattctgcggatgttgcggcataattgtggttgtggttgtcatctgtcttatgatcgatcaaaattttctgtttgtctggtaggtggatgagttaaggcaacagcatattctcccaagcgatttcgttttagggtttggaacattgagattgaggtaatgcgtcttgtccagcgttgttttggtctggactgtgaatcagaatagaaacgttgcatgatcgaattgcgccattagatctcataatcaaaaaacgtggatgattcgacaaaaggtatatccatctggatgtttcatgtt

SEQ ID NO: 258597 - DNA, 567 bp, Zea mays
  unsure (1)..(567): unsure at all n locations
gcccatccgcttgtggaaggcgcgaccggagcccaagaatgtaccgactctgcgaaggcgggcgcgccaggtcggctcttgccgaaggcgacagacttgacggttcnccggacgagggcgacgatccggccgtccggcccggacgtctcagctaccagcatgaggtagtgcggcgagtggcggatgcgcgcgacggggtcgccgagcaggtcggcgtgcagcgacatcccgccggcggcggcggccgggccgacctcgcactcccgctcgacggcctccgtgccgtcgcggtccgtcttgggatcgtagtcccgagcttttggtggtctgctgtgcttaatcatgcttttatatggcttctacatgctgtggttctttcttgatctgccccgcgcttatcgtttgtgttgtactgccctaataagtggtgcttatgaggactgtttctggttttgctgcttatgttgtaatgctttgaaccaatgaaagaagctccaggccccagctattttgagaagtaaaaaaaaaaaaaaaaaaaaaaaaaaaaaaaaaaaaaaaaaaaaaaga

SEQ ID NO: 258598 - DNA, 427 bp, Zea mays
tcgtgcgccattggccagctagagccaaccagaagagcttgcagttactgagagtgtgtgtgagagagaggatgggtggcagcggcagggctgctctgctgctggccctggtggtggtggccgtgagcctggccgtggagatccaggccgacgccgggtacggttactgcggcgggtacaccccgacgccgacgccggccaccccgaccccgaagcccgagaagccccccaccaaggggccgaagccggacaagccgtccaaggagcacaagccgcccatggagcacgggcccaagccggagaagccgtccatggagcacaagccgacgcctgccacgtacaccccgagccccaaacccacgccgtcgacgtacactcccaccccgacgcccccccagccgacgccacccacatacacttccggccc

SEQ ID NO: 258599 - DNA, 798 bp, Zea mays
cccacgcgtccgcccacgcgtccgcgccggcctcactggccggaagatcatcatcgacacctacggtggctggggagcccacggcgggggcgccttctccggcaaggacccgaccaaggtggaccgcagcggggcctacgtcgcgaggcaggctgccaagagcatcgtcgccgccggcctcgcccgccgcgccatcgtccaggtctcctacgccatcggcgtgcccgagcccctatcggtgttcgtggacacgtacggcaccggcgcgatccccgacaaggagatcctgaagatcgtgaaggagaacttcgacttcaggcccggcatgatcatcatcaacctcgacctcaagaaaggcggcaacgggcgctacctcaagacggcggcctacgggcactttgggagggacgaccccgacttcacctgggaggtggtgaagcccctcaaggcggagaagccgtcttctgcatgaggcgcctcctctgtttcggaagaagcttttggtctggtctgcctgcgctctatcatgcttttttatggctcctacgtgttgtgattcttgatctgccccttgcttatcatttgtactgtactgtcactgtcctaataagtggtacgtgtgcggggtcgtattgtgtctgcttattcacctagaggattatttctggttttgctgcttatgtaatgcttttgaaacgatgaaggaagctacatgctctacagctgctttgagaagtaacggaacctcgtgcattttggtcaaaacaccaaaaaaaaaaaaaaaaaaaaaaaaattat

SEQ ID NO: 258600 - DNA, 584 bp, Zea mays
ccccagccaccggctaccaggcggcttttttaagccgacccggccgacgtacactcccacaccgaagccgccggccaccaagccgcccacctacactccgacgccgccggtgtctcacacccccagcccgccgccaccttactactagaaaccgatgcctaccataccacactgctgtcagtctctggagcatttaggtggtctcgatcgatggaagaattgtgtcctagccagccggcaaaggtgacctgctgatgatgatgatgagaggcgagtcctacgccctagtcctactactaccctctttgtgtgctgccatccatccgtccccgctagacgatcgaggagagaataacgcagagctctgtgctcccggcctctgtcttctgccgtcccggccgtttaatttatagtctctactgtgtgttcgtcccatgtgtttagcagcagcagcaggtgtattgtgcgggtatgtaatggtattgcaactatattgggtgtaaaaccataataaatgtggaaaaaatgcaaggaaaaaaggcttctactgtttacccttaaaaaaaaaaaaacacccccaacct

SEQ ID NO: 258601 - DNA, 1122 bp, Zea mays
ggcagataagggcggataaactgcttgaactggaagcgaccctagtccaaaccaccgcaccgacaccgactccgagccccgccgcgccgcgctacctccgctcctctcttcgcccctgccggcgtcgaggccgaagcgaaggcgagcatgcatcacgaccccaaccccttcgacgagggcagcgccgaggacaaccccttctcaaatggaggagccggaggcggcaagcagcagtacggcttccggccgactgagcccgtcgggttcggcggcgctagcaggggcgacgccgtcgttgacgtcccgctcgagaccatgggggactctcggagcaaggtgaaggagctctcgtcgtgggaatcagatctgaagcggcgagaggcggatatcaagaggagggaagaggcgctgaagaatgctggcgtgccaatggaggagaagaactggccaccattcttccccatcatccaccatgatattgccaatgagataccagcaaatgtgcagaagttgcagtatcttgcatttgcaagctggcttggaattgtgctttgtttgtcctggaacttcgttgctgtcatagtctgctggatcaaggagggagattcaaagttgtttttccttgcaacaatctatgctttgcttggaattcctctgtcatatttgatatggtacaggccactctaccgtgcaatgaggactaacagtgctttcagttttggatggtttttcctgtgttacctgatccacattggtttttgcataattgctgccattgctccaccaattgtatttcatgggaaatcattaactggtattctggctgcgattgacactttctctgaacatgtgataattgggatcttttactttgtggggtttgcactgttttgtctggagacactgctgagcattggggttcttcagaaagtgtacatgtacttcagagggaacaagtgaagccagtcatgatggagagttacgtttgttgagaaaatttggagttacttgtggctacttgtagcacatgttcattcgatggttttgtgcatacctgtcagtacaccttgaatctataatttcttatgtcaaaaaaaaaaaaaaaaaaaaaagggcggccgc

SEQ ID NO: 258602 - DNA, 1122 bp, Zea mays
cccacgcgtccgcccacgcgtccgctctccacatttcctctcccgataagagtgaggcctcggctcagcttgagcttcccctccctcccctcctgcgctccagctcccctccatcctcggccaaaaattctgcggcgagctccgatccggtccgactactaacccacgccgcagaagccgcgcgacctgatcgcgcgggggtcgaggagaggggaagcgcggcgccgcggttgcctgccaccgtaccgccgcaggagaaggaagaggagcccgtatccctccgccccgctgcccgccggaccgatggaccccgagttcccctgcccctactgctacgaggaccacgacgtcggatccctctgcgcgcacctggatgaggagcacccgttcgaaccccaagccgcggcctgccctgtctgctctgagatggttacgaaggatatggttaaccatattactacgcaacatggatatttattcaagaatcgccgccggctgcgcagattcatcattccaggcagccaggccctctctttgctgagccgagatctacgggaagcccacttgcaggtgctcctcggaggaggcggacagagatccagcgacaacagcagcagcagcgccacgaacatttcggctgatcctcttctgtcgtcgttcggccttggcttccctacctcagacgcggagcaagcatccaagtcgactgtttccattcctgatgatgctacgacggtgaaagaagcgcccgctcaggcacggaagctaagtatcgattcgtcgctcacaagtgaagaaagggagctgaagcggaagcaagcccgcgtcagagccacgttcgtgcaggacctgctgctctctactctattcggcgactgatgacgaaccgtgcgtgctccacccgacttgctgaaactcctcggcggtccagaaccctctagtaaggtgcagagttgatgtgggcgtgatgtatctttctaagttattggaagccggtctcctgtcttcacaactgacgatctgtgtgtggtacgctacgcacgcatgtcgcggttgtgcgtgtacgtctgaactctggagcattggtttgttgtaccaccataatgagtcacaacggcggat

SEQ ID NO: 258603 - DNA, 667 bp, Zea mays
ttttctccggcaaggacccgaccaagggggggcgtattggggcctacgtcgcgaggcaggctgccaagagcatcgtcgccgccggcctcgcccgccgtgccatcgtccaggtctcctacgccatcggcgtgcccgagcccctgtcggtgttcgtggacacgtacggcaccggcgcgatccccgacaaggagatcctgaagatcgtgaaggagaacttcgacttcaggcccggcatgatcatcatcaacctcgacctcaagaaaggcggcaacgggcgctacctcaagacggcggcctacgggcactttgggagggacgaccccgacttcacctgggaggtggtgaagcccctcaaggcggagaagccgtcttctgcatgaggcgcctcctctgttttggaagaagctggaaaacgcttttggtctggtctggtctggtctggtgtgcctgcgctctatcatgcttttttatggctcctacttgtgattcttgatctgccccttgcttatcatttgtactgtactgtcactgtcctaataagtggtacgtgtgcggggtcgtattgtgtctgcttattcacctactagaggattatttctggttttgctgcttatgtaatgcttttaaaaccatgaaagaagctacaggctcctacacctgctttgag

SEQ ID NO: 258604 - DNA, 545 bp, Zea mays
cggacgcgtgggcggacgcttgggcttacgcgtggagtcgacacgtacgggaccggggcgatcttcgacaaggagatcctcaagattgtcaaggagaacttctatttcaggcctggcatgatcatcatcaaccttgacctcaagaaaggcggcaacgggcgctacctcaagacggcggcctacggccactttggaagggacgaccctgacttcacctgggaggtggtgaagccactcaagtcggagaaaccttctgcctaaggcggccttttttttcagtaagaagcttttggtggtctgctgtgcttaatcatgcttttatatggcttctacatgttgtggttctttcttgatctgcaccgcgcttatcgtttgtgttgtactgccctaataagtggtgcttatgaggactgtttctggttttgctgcttatgttgtaatgctttgaaacaatgaaagaagctacaggccacacctattttgagaagtatgcctaagaaaaagcgcggccaccgactaatgcgtcccaagcccgggaattagtc

SEQ ID NO: 258605 - DNA, 489 bp, Zea mays
agccgatccccaccgacgtacactcccacaccgaagccgccggccaccaagccgcccacctacactccgacgccgccggtgtctcacacccccagcccgccgccaccatactactagaaagcgatgcctaccataccacactgctgtcagtctctggagcatttaggtggtctggatcaatggaagggttgtgtcctagccagccggcaaagatgagctgctgatggtaatgatgatgataagaggccactgctaccctactacgtaccctcctctttgtgtgctgccatccgtccccgttagacgatcgaggagagaataacgcagagctctctgctcccggcctgtcttctgccgtcccggcccgttaatttactagtgtggtccgcctatatgtttagcagcagcaggtgtattgtgcgggtatgtaatggtattgcaaactatattgggtggccaaccataattaatgtgggcccatatgcaggg

SEQ ID NO: 258606 - DNA, 591 bp, Zea mays
cggacgcgtgggcggtcgcgtcgggtcggatctgagacgaggcgagacgaccccccctcccctcaaccggaacttgttttaccccatctcatcccactgactccacccacccgcccgctgcctccgccggatctcgtcggactcggatccgcccgaccaccccgcgccgccgccgcgcagcagcagcagcagatcagagaagatggccggactcgacaccttcctcttcacctcggagtccgtgaacgagggacaccctgacaagctctgcgaccaggtctcagatgctgttctggacgcttgccttgctgaggaccctgacagcaaggttgcttgcgagacctgcaccaagaccaacatggtcatggtctttggtgagatcaccaccaaggccaatgtcgactacgagaagattgtcagggagacatgccgcaacattggtttcgtgtcgaacgatgtcgggcttgacgctgaccactgcaaggtgcttgtgaacattgagcagcagtcccctgatattgctcagggtgtgcacggccacttcaccaagcgcccctaggagattggagctggtgaccaggggcacatgtt

SEQ ID NO: 258607 - DNA, 859 bp, Zea mays
cccacgcgtccgcccacgcgtccgcccacgcgtgcgagggcttcggatcccacaccgaggaaaggagaagagagggggtcggaataatggcggccgaggagggtgccgtgatcgcgtgccacaccaaggacgagttcgacgcccgcatggccaaggccaaggagcagggcaagctggtggtcatcgacttcatggccccctggtgcagtgggtgccagatgatggccccggtgtacgcggactgcgccagcaagtacccttccgcggtcttcctcgaggtcgacgtcgacgaactgctggaagtcgcgaagatctacggcgtccatgtgatgccgaccttctgcttcatcaggaacggcgagacgctcgagagctttgctaccgtcgacgaggacgagctccgggacgccgtcaggaagtacgccgtcgctggcactacgacggctcctgcctcggcgtccgcctaattcaggagatgtgatgtgtagcaaatagcgcgcgcgcaccagtcgtcaataaataaataaataaataaataaataaataaataaaggccaacgtacgacgacaaattagtggcgcgcgcggtagtagctagcagagtatgcgccgtcactgtgtcgatctgcagtttggtcgtttaaaagtgattgtagtgtgtactatgttcagctcgatgatctcggagtcgctatatacgctcgctcccgtgctggacgggttatcgatctgatgaacaagaatacaataatatgtatggatacttgtgactgggttccgcggaagtctggctttaattaccgtgtgattgggtacctgcaccaaaataaaatattttaaaaaaaaaagggcgggtcgt

SEQ ID NO: 258608 - DNA, 411 bp, Zea mays
  unsure (1)..(411): unsure at all n locations
cgagcagatggagacagacaaacctgagggagccacagatccctcggcttagctttgccagtgatcaaacatttgtgtgattgaccctgttcacctgctgttatagtcggtaggggggagtgaactaagcgagaggttcgccacatttgatttgaggatgtgtgttgggacattcaaggtattctgtttcttgtccttgacaagggaggtggttgggtgtttgaaggataagagcagtggggtacactttctcacgtttttgtgccccacacgctcgatatctttattgatgatggtccgtaaaaccaaggtaaatggctattccaaaattttcgtgttttttactgtaacggtctactataaaattttttttctgcaaaaaaaaaaaaaaaaaaaaaaagggcggccgcn

SEQ ID NO: 258609 - DNA, 663 bp, Zea mays
tcggtacgcgtgggccgagccccaaacccacgccgccgacgtacactcccaccccgacgccccccaagccgacgccacccacatacactcccgcccctacgccccacaaacccacaccaaaacccactcccactcctgcgacgtacactccaagccctaagccaccggctaccaagcctccctcgcccaagccgaccccgccaacgtacaccccttcgccaaagcctccgacacccaagccgaccccgccgacgtacaccccttctcccaagcctccgacgcccaagccgaccccgccgacgtacactgcaagccccaagcctgccacacacccgacgcccaagccgaccccaccgacgtacaccccttccccaaagcctccgacgcccaagccgaccccaccgacgtacaccccttccccaaagcctgcgacacccaagccgaccccaccgacgtacactcccacaccgaagccgccggccaccaagccgcccacctacactccgacgccggcggtgtctgacacccccagcccgcccccaccatactactagaaagcgatgcctaccataccacactgctgtcagtctctggagcacttatgtggtctggatcaatggaagggttgtgtcctagccacgccggaaagatgagctgttgatg

SEQ ID NO: 258610 - DNA, 775 bp, Zea mays
cgacgttacctttatacactcccgcccctacgccccacaaacccacaccaaaacccactcccactcctccgacgtacaccccgacccccaagcctccgacacctaagccgaccccgccgacgtacactccaagccccaaacctccgacgcccaagccgaccccaccgacgtacaccccttcccccaagcctccgacacctaagccgaccccgccaacgtacaccccttcgccaaagcctccgacacccaagccgaccccgccgacgtacaccccttctcccaagcctccgacgcccaagccgacacgtacggcaccggcgcgatccccgacaaggagatcctcaagattgtcaaggagaacttcgatttcaggcctggcatgatcatcatcaaccttgacctcaagaaaggcggcaacgggcgctacctcaagacggcggcctatggccactttggaagggacgaccctgacttcacctgggaggtggtgaagccactcaagtgggaaaacccttttcctaaagggggcctttttttcagtaaaaagcttttgggggtctgctgggcttaatcaggcttttatatggcttcaacatgttggggttctttcttgatcggccccgcgcttatcgtttgtgttggcctgccctaataagtggggcttataaggccggtttcgggtttcacggcttatgttgtaatgctttgaaccaatgaaaaaagccccgggccccagctttttttagaagtaaaaagaaaaaaaaaacatttctct

SEQ ID NO: 258611 - DNA, 462 bp, Zea mays
cggacgcgtgggcggacgcgtggtcggacgcgtgggctgactcgtggtcgccaccgtgctactggaaagcgatgcctaccataccacactgctgtcagtctctggagcatttaggtggtctggatcaatggaagggttgtgtcctagccagccggcaaagatgagctgctgatggtaatgatgatgataagaggccactgcttaccctactacgtaccctcctctttgtgtgctgccatccgtccccgttagacgatcgaggagagaataacgcagagctctctgctcccggcctgtcttctgccgtcccggccgtttaatttactagtgtgttcgtcctatatgtttagcagcagcaggtgtattgtgcgggtatgtaatggtattgcaactatattgggtgtaaaaccataataaatgtgggcaaatatgcaaggaaaaaaaaaaaataaaaacaaagga

SEQ ID NO: 258612 - DNA, 501 bp, Zea mays
tgcctctgcgcgcagagggaccacgacgtcggatccctctgcgcgcagagggaggaggagcacccgttcgaaccccaagacgcgtatcgactcgtcgctcacaagtgaagaaagggagctgaagcggaagcaagcccgcgtcagagccacgttcgtgcaggacctgctgctctctactctattcggcgactgatgacgaaccagagcgagcctaagctattatcactggaagggtggaggtccacgaagaccagcgcggcggtccagaacacctctagtaaggtgcagagttgatgtgggcgtgatgtatctttctaagttattgtaagccggtctcttgtcttcacaactgacgatctgtgtgtggtacgctacgcacgcaagtcgcggttgtgcgtgtacgtctgaactctggagcattggtttgttgtaccccgaaaaaaagccggtatccaagaacatgtgttacaaaactgaccatcggcaccggtgaatgaattg

SEQ ID NO: 258613 - DNA, 876 bp, Zea mays
ggtccggtccggtttctgggtctcccacgcgtcttcctcttgtccggcgccattggccagctagagccaaccagaagagcttgcagttactgagagtgtgtgagagagagaggatgatgggtggcagcggcagggctgctctgctgctggccctggtggccgtgagcctggccgtggagatccaggccgacgccgggtacgggtacaccccgacgccgacgccggccaccccgaccccgaagccggagaagccccccaccaaggggcccaagccggagaagccgccaaaggagcacaagccgcccaaggagcacgggcccaagccggagaagccgcccaaggagcacaagccgacgccgcccacgtacaccccgagccccaaacccacgccgtcgacgtacactcccaccccgacgccccccaagccgacgccacccacatacactcccgcccctacgccccacaaacccactcccactcctccgacgtacaccccttcccccaaacctccgacacctaagccgaccccgccgacgtacactccaagcccccagccaccggcttgcaagcctcccacgcccaagccgaccccgccgacgtacaccccttctcccaagcctccgacacctaagccgaccccgcctacgtacactccaagccccaagccaccggctaccaagcctccgacgcccaagccgaccccaccgacgtacaccccttcgcccaaacctgcgacacctaaagccgaccccggctacgtacactccaagccccaagccaccggctaccaagcctaccacgcccaagccgaccccgacgacgtacacccctactaccaagcctccgacacccaagccgaccccgtcgacgtacacc

SEQ ID NO: 258614 - DNA, 467 bp, Zea mays
gccgcccacttacactccgacgccgccggtgtctcaccacccccagccgccgccaccaatactactagaaagcgatgcctaccataccacactgctgtcagtctctggagcatttaggtggtctggatcaatggaagggttgtgtcctagccagccggcaaagatgagctgctgatggtaatgatgatgataagaggccactgctaccctactacgtaccctcctctttgtgtgctgccatccgtccccgttagacgatcgaggagagaataacgcagagctctctgctcccggcctgtcttctgccgtcccggccgtttaatttactagtgtgttcgtcctatatgtttagcagcagcaggtgtattgtgcgggtatgtaatggtattgcaactatattgggtgtaaggccataagtaactgtgggcaaatatgcaaggaaaaaataaaaaaaaaaaggacggccg

SEQ ID NO: 258615 - DNA, 697 bp, Zea mays
actgatgtgaatgtgcatgagcctgatactactgcagatgctcctgcagctgaaaatggaacacaaaatcccgaggaaaaatctgttccaatggaaactgatgcaaaggttgagccatcaaaaaggaaagttaagagaacttctgttccggtccatgcgttggtctatggtgccttggctgcagctgacctgcagaaggctgtagagaaagagtatgagatggctcttcaggacagagtaatggaagaaaccaaagagaagaaaaatgctgtggaagcttatgtctatgacatgcgtaacaagctctacgacaggtacaacgattttgtgacacctgaggagaaggaagggttgattggaaagcttcaggaggttgaagattggctatatgaagatggtgaggatgagacaaagggagtctatatttctaaactggaagatcttaagaagattggtgacccaattgaggcacggtacaaggagtcgacagaaaggggttcctctgtagatcaactggtctactgcatcaacagtttcagagaggctgctttgtccagtgaccaaaagtttggccatatcgacatatctgagaaacagaaggtcatcaatgagtgctctgaagtagagaactggttgagagagaggaagcagcagcaggacgccctacctaagcacaccgatcctgtgctgctcgtat

SEQ ID NO: 258616 - DNA, 466 bp, Zea mays
tctccccttctcgccaaaggggaagccctgcccgtacttccgttgcggcgctacgagcttcgacgggcctcgatctccacctctgaagtgactacttgtgatctagatctgaagctgtagtggtcagcagcttagtgtgaatcgaagatgagcgtggtggggttcgacctcggcaatgagagctgtatcgtggcggttgcgcggcagcgtggcatcgacgtggttctcaacgaggagtccaagcgcgagacacccgccatcgtttgcttcggggacaagcagcggttcatcggcaccgccggcgccgcgtccttcaccatgaaccccaaaaactccatctctcagattaagcgcctgctcggccgcaagttctcagatcccgagctgcagcgcgatctcgccttcttcccattccgagtcacggagggccccgatggttttcccctggtccatgtaccgtacctgg

SEQ ID NO: 258617 - DNA, 423 bp, Zea mays
cggacgcgtggtcggatctgagacgagacgagtcccctccccccacctcgcctcacccaaccggaacgaacaagttacaatctcatcccaaccccgcctcgaccggatctcgtcggactcggatccgcccgaccaccccgcgccgccgcagatcaaagaagatggcagctgtcgacacattcctcttcacctcggagtctgtgaacgagggacaccctgacaagctctgtgaccaggtctcagatgccgttcttgacgcttgccttgctgaggaccctgacagcaaggttgcttgtgagacctgcaccaagaccaacatggtcatggtctttggtgagatcaccaccaaggccaatgttgactacgagaagattgtcagggagacctgccgcaacattggttttgtgtcaaacgatgttgggc

SEQ ID NO: 258618 - DNA, 523 bp, Zea mays
gtggcggcgcaggatcgtagcaccgagggtttccagtgcacgttctagaagattcccgtctacattggccgaccccgcggcccacaccgtatatcaccgcctcctatccggcctctgcccttctcgccgaacggaaaaccctgcccggaccttcgttgcagcgctacgagcttcgacgggccgctcgatctccacctctgaagtggctgcttgtgatctagatctgaaagctgcagtggttgacagctgagtgtgaaactgtgaatcgaagatgagcgtggtgggcttcgacctcggcaatgagagctgcatcgtggcggtcgcgcggcagcgcgcatcgacgtggtcctcaacgaggagtccaagcgcgagacacccgccatcgtctgcttcggggacaagcagcggttcatcggcaccgccggcgccgcgtcctctaccatgaaccccaagaactccatttctcagatcaagcgcttgctaggccgcaagtactccgaccccgaggtacagagagatctcg

SEQ ID NO: 258619 - DNA, 777 bp, Zea mays
tctcaagatgctttcacatgcatatgaccgttctcttggcggcagggacttcgatgaggtcctcttcaagcactttgtggcaaagttcaaagaagagtacaagcttgacgtctaccagaatgcccgcgcatgccttaggttgcgtgtggcgtgtgagaagattaagaaggtgctgagtgccaacccagaggctccactgaacattgagtgcttgatggatgagaaggatgtgagagggcttattagagggggacgagtttgaacacatcagtgcacctgtgctggaacgtgtcaaaggacccttgcagaaggccttgactgaagctggcttgacaactgaaaatgtgcacatggctgaggttgtcggatctggttctcgtgttccggccataatcaagataatcactgaattttgtgggaaggagccaaggcgaaccatgaatgcaagtgactgtgttgcacgaggatgtgctcttcagtgtgctatgctcagccccactttcaaagtgcgggaattccaggttaatgatgggtttcctttctcagttgcgttgtcatggaaacaagactcccagaacagtgcaccccaacagacccttgtattcccaaaggggaatgcaattccgagcattaaatctctaacgttctataaatcgagtacatttgaagttgatgttttgtatgtgggtacaggcgactcgcaaattccacaaaagaatagcacttacacgattggcccctttccacccttcaaatgtgagaagaccaagctgaaag

SEQ ID NO: 258620 - DNA, 446 bp, Zea mays
ccgactcctccggtgtctcacacccccagcccgccggcaccattctactagaaagcgatgcctaccataccacactgatgtgagtctctggagcatttaggtggtctggatcaatggaagggttgtgtcctagccagccggcaaagatgagctgctgatggtaatgatgatgataagaggccactgctaccctactacgtaccctcctctttgtgtgctgccatccgtccccgttagacgatcgaggagagaataacgcagagctctctgctcccggcctgtcttctgccgtcccggccgtttaatttactagtgtgttcgtcctatatgtttagcagcagcaggtgtattgtgcgggtatgtaatggtattgcaactatattgggtgtaaaaccataataaatgtgggcaaatatgcaaggaaaaaaggcttctacttctactgt

SEQ ID NO: 258621 - DNA, 573 bp, Zea mays
aggaggcggacagagatccagcgacaacagcagcagcctgccctgtctgctcagagatggttacgaaggatatggttaaccatattactacgcaacatggatatttattcaagaatcgccgccggctgcgcagattcatcattccaggcagccaggccctctctttgctgagccgagatctacgggaagcccacttgcaggtgctcctcggaggaggcggacagagatccagcgacaacagcagcagcagcagcgccacgaacatttcggctgatcctcttctgtcgtcgttcggccttggcttccctacctcagacgcggagaagcatccaagtcgactgtttccattcctgatgatgcaacgacggtgaaagaagcgcccgctcaggcacggaagctaagtatcgactcgtcgctcacaagtgaagaaagggagctgaagcggaagcaagcccgcgtcagagccacgttcgtgcaggacctgctgctctctactctattcggcgactgatgacgaaccagagcgagcctaagctattatccactggaagggtggaggtccacgaggaccag

SEQ ID NO: 258622 - DNA, 762 bp, Zea mays
ccccatagaccaactcatggaccggaacagtagttttcttaactttcttttttgacggctcaacctttgcatcagtttccatcgaaacagacttttcctcattatcttgtgctccatttccagctgcaggaggctgctcctgcatagtcacatcagatccagcagcaggatcacttggcacatcatctgtgtccatcttcatagtatcgtttggagcttcatttgcagatgagactggaacttccacatcctcctccagcattatcaccgaatcaactgtaacggtcccatggatgttgagacgcactttcactttcagtttggccttctctccgttggaggtttggaacgggccaattgtgtaacccacgcgtccgcccacgcgtccgcccacgcgtccgcccacgcgtccgctgcgctccagctcccctccatcctcggccaaaaattctgcggcgagctccgatccggtgcgactactaacccacgccgcagaagccgcgcgtcctgatcgcgcgggggtcgaggagaggggaagcgcggcgccgcggttgcctgccaccgcaccgccgcaggagaaggaagaggagcccgtatccctccgccccgctgcccgccggaccgatggactccgagcactggatctcgcgcctggccgccgcgaagcgcttctacgcggcgcagctcggccacagcgatcgggccgggatggatgagctggagatggacgaggaggtcaggcccgagttcccctgcccctac

SEQ ID NO: 258623 - DNA, 657 bp, Zea mays
ggggagcccatggtggtggcgctttctccggacaccgtaggtgtcaatgatgatcttgcggccagtgaggccatcattgacacctacggtggctggggagcccgtggtggtggcgctttctccggcaaggacccaaccaaggttgaccgcagcggagcctatgtcgcaaggcgggctgccaagagcatcgtcgccagcggccttgctcgccgcgccatcgtccaggtgtcttacgccatcggcgtgcccgagcctctctccgtgttcgtcgacacgtacggcaccggcgcgatccccgacaaggagatcctcaagaaaggcggcaacgggcgctacctcaagacggcggcctacggccactttggaagggacgaccctgacttcacctgggaggtggtgaagccactcaagtcggagaaaccttctgcctaaggcggcctttttttttcagtaagaagcttttggtggtctgctgtgcttaatcatgcttttatatggcttctacatgttgtggttctttcttgatctgcaccgcgcttatcgtttgtgttgtactgccctaataagtggtgcttatgaggactgtttctggttttgctgcttatgttgtaatgctttgaaacaatgaaagaagctacaggccacagctattttgag

SEQ ID NO: 258624 - DNA, 270 bp, Zea mays
taccctactacgtaccctcctctttgtgtgctgccatccgtccccgttagacgatcgaggagagaataacgcagagctctctgctcccggcctgtcttctgccgtcccggccgtttaatttactagtgtgttcgtcctatatgtttagcagcagcaggtgtattgtgcgggtatgtaatggtattgcaactatattgggtgtaaaaccataataaatgtgggcaaatatgcaaggaaaaaaggcttctacttctactgtaaaaaaagaaa

SEQ ID NO: 258625 - DNA, 349 bp, Zea mays
gtcagtctctggagcatttaggtggtctggatcaatggaagggttgtgtcctacccagccggcaaaaatgagctgctgatggtaatgatgatgataaaaggcccctgcttaccctactacgtaccctcctctttgtgtgctgccatccgtccccgttagacgatcgaggagagaataacgcagagctctctgctcccggcctgtcttctgccgtcccggccgtttaatttactagtgtgttcgtcctatatgtttaacagcagcaggtgtattgtgcgggtatgtaatggtattgcaactatattgggtgtaaaaccataataaatgtgggcaaatatgcaaggaaccc

SEQ ID NO: 258626 - DNA, 697 bp, Zea mays
tcgcgggtcgacgcaagcctctacacatgacgtcctgaggagactgatgacgaaccagagcgagcctaagctattatcactggaagggtgcaggacctgctgctctctactctattcggcgactgatgacgaaccagagcgagcctaagctattatcactggaagggtggaggtccacgaagaccagcgcggcggtccagaacacctctagtaaggtgcagagttgatgtgggcgtgatgtatctttctaagttattgtaagccggtctctgtcttcacaactgacgatctgtgtgtggtacgctccacgcacgcaagtcgcggttgtgcgtgtacgtctgaactctggagcattggtttgtcatcagtcgccgaatagagtagagagcagcaggtcctgcacgaacgtggctctgacgcgggcttgcttccgcttcagctccctttcttcacttgtgagcgacgaatcgatacttagcttccgtgcctgagcgggcgcttctttcaccgtcgtagcatcatcaggaatggaaacggtcgacttggatgcttgctcagcgtccgaggtagggaagccaaggccgaacgacgacagaagaggatcagccgaaatgttcgtggcgctgctgctgttgttgtcgctggatctctgtccgccgcctccgaggagcacctgcaagtgggcttcccgtagatc

SEQ ID NO: 258627 - DNA, 319 bp, Zea mays
  unsure (1)..(319): unsure at all n locations
ggagagaataacgcagagctctctgctcccggcctgtcttctgccgtcccggccgtttagtttactagtgtgttcgtcctatatgtttagcagcagcaggtgtattgtgcgggtatgtaatggtattgcaactatattgggtgtaaaaccataataaatgtgggcaaatatgcaaggaaaaaaaaaaaaaaaaaaaaaaaaacaaaaacaaaaaaaaaaaaaaaaaaaaaaaaaaaaaaaaaaaaaaaaaaaaaaaaaaaaaaaaaaaaaaaaaaaaaaaaaaaaaaaannnnnnngggggggggccgttttaaaggat

SEQ ID NO: 258628 - DNA, 223 bp, Zea mays
gatgacccctacagaccatgtaccttagaccacgcaaactaggtgctcgtctcaccgaggtccgcaggagcggaacctgcccctggctcaggcctgatgggaagacccaggtgacaggacgagtaccgcaatgagggtggaacgacgccggcgataaaagcagtgactgtcgttatatcaacacaagtcgacgagatagtaaccaatgttgagaccgctgctg

SEQ ID NO: 258629 - DNA, 357 bp, Zea mays
gacgacgacgacgacgacgacgcgagaagtcgaggcgccgctgcttgctaggaccgagcttcaggaagtctccaacggccccggcgccggcacggcctgcccgcgcgccgccacagggattgattgtgatcagatctattctgtagtggtcagcggctgagggtgaaccgaagatgagcgttgtgggattcgatctcggcaatgagagctgcattgtggcagtcgcgcggcagcgcggcatcgacgtggtccctcaacgatgagtccaaacgcgagacacccgccatcgtctgcttcggggacaagcagcggttcatcggtacgggggtcgccttttcctaaccttgaaccccaaaa

SEQ ID NO: 258630 - DNA, 343 bp, Zea mays
cccacgcgtccgcccacgcgtccgcccacgcgttcgggaagggttgtgtcctagccagccggcgaagatgagctgctgatggtaatgatgatgataagaggccactgctaccctactacggaccctcctctttgtgtgctgccatccgtccccgttagacgatcgaggagagaataacgcagagctctctgctcccggcctgtcttctgccgtcccggccgtttaatttactagtgtgttcgtcctatatgtttagcagcagcaggtgtattgtgcgggtatgtaatggtattgcaactatattgggtgtaaaaccataatcaatgtgggcaaatatgcaagg

SEQ ID NO: 258631 - DNA, 403 bp, Zea mays
  unsure (1)..(403): unsure at all n locations
ccaccatactactagaaagcgatgccttccataccacactgctgtcagtctctggagcatttaggtggtctggatcaatggaagggttgtgtcctagccagccggcaaagatgagctgctgatggtaatgatgatgataagaggcccctgctacccttcgacgtaccctcctctttgtgtgctgccatccggccccgttagacgatctaggagagaatagcgcagagctctctgctcccggcctgtcttctgccgtcccggccgtttactttactagtgtgttcgtcctatatgtttagcagcagcaggtgtattgtgcgggtatgtcatggtattgcgattataccgcggtgtaccccaaaatcccccgggctaatatgcaaggaaaaaaattaaggnanaa

SEQ ID NO: 258632 - DNA, 271 bp, Zea mays
catccgtccccgttaaacgatcgaggaaaaaataacccagagctctctgctcccggcctgtcttctgccgtcccggccgtttaatttactagtgtgttcgtcctatatgtttagcaccaccaggtgtattgtgcgggtatgtaatggtattgccactatattgggtgtaaaaccataataaatgtgggcaaatatgcaaggaaaaaaggcttcttctttttctgtcccccccccaaaaaaagaataaaccaaaaaaaaaaaaaaaaataga

SEQ ID NO: 258633 - DNA, 328 bp, Zea mays
agggttgtgtcctagccagccggcaaagataagctgctgatggtaatgatgatgataagaggcccctgctaccctactagggacccccccctttgtgtgctgccccccgtccccgtttgacgatcgaggagaaaataacccagagctttttgctcccggcctgttttttgccgtcccggccgttttatttactagggtgttcgtcccatatgtttaccaccccccggtgtattgtgcgggtatgtaatggtattgcccccatattgggggtaaacccctaataaatgtgggcaaatatgcaaggaaaaaaggcttctacttctcctgt

SEQ ID NO: 258634 - DNA, 320 bp, Zea mays
ccgacgcgttcggaagggttgtgtcctagccagccgtcaaagatgagctgctgatggtggggatgatgatggggcgccgctgctaccctactacgtaccctcctctttgtgtgctgccatccgtccccgttagacgatcgaggcgagaataacgcagagctctctgctcccggcctgtcttctgccgtcccggccgtttaatttactagtgtgttcgtcctatatgtttagcagcagcaggtgtattgtgcgggtatgtaatggtattgcaactatattgggtgtaaaaccataataaatgtgggcatgatatgcaaggt

SEQ ID NO: 258635 - DNA, 245 bp, Zea mays
ccctcctctttgtgtactgccatccgtccccgttagacgatcgaggaaagaataacgcagagctctctgctcccggcctgtcttctgccgtcccggccgtttaatttactagtgtgttcgtcctatatgtttaccaccagcaggtgtattgtccgggtatgtaatggtattgcaactatattgggtgtaaaaccataataaatgtgggcaaatatgcaaggaaaaaaggcttctacttctactgt

SEQ ID NO: 258636 - DNA, 295 bp, Zea mays
tgagctgctgatggtaatgatgatgataagaggccactgccttccctactacgtaccctcctctttgtgtgctgccatccgtccccgttagacgatcgaggagagaataacgcagagctctctgctcccggcctgtcttctgccgtcccggccgtttaatttactagtgtgttcgtcctatatgtttagcagcagcaggtgtattgtgcgggtatgtaatggtattgcaactatattgggtgtaaaaccataataaatgtgggcaaatatgcaaggaaaaaaggcttctacttct

SEQ ID NO: 258637 - DNA, 178 bp, Zea mays
gctcccggcctgtcttctgccgtcccggccgtttaatttactagtgtgttcgtcctatatgtttaccaccaccaggtgtattgtgcgggtatgtaatggtattgcaactatattgggtgtaaaaccataataaatgtgggcaaatatgcaaggaaaaaaggcttctacttctcctgtg

SEQ ID NO: 258638 - DNA, 222 bp, Zea mays
ccccccgcccccgttaaccgttcaaggaaaaaataacccaaagctctttgcccccggcctgttttttcccgtcccgcccgtttaatttacaagggtgttcgccccatatgtttaccaccacccggttttttgtgcgggtatgtaatggtattccccccattttgggggtaaacccctaataaatgtgggcaaatatccaaggaaaaaaggcttttccttttt

SEQ ID NO: 258639 - DNA, 245 bp, Zea mays
catccgtccccgtttttcgatcgaggagagaatatcgcagagctctctgctcccggcctgtcttctgccgtcccggccgtttaatttactagtgtgttcgtcctatatgtttagcagcaccaggtgtattgtgcgggtatgtaatggtattgcaactatattgggtgtaaaaccataataaatgtgggcaaatatgcaaggaaaaaaggcttctacttctactgcccacttactaccgtactcct

SEQ ID NO: 258640 - DNA, 202 bp, Zea mays
  unsure (1)..(202): unsure at all n locations
catccgtccccgttaaacgatcgaggaaaaaataacncaaagctttttgctcccggcctgttttttgccgtcccggccgtttaatttacaagtgggttcgccccatatgtttagcaccacccggtgtattgtccgggtatgtaatggtattgcccctatattgggtgtacaaccctaataaatgtgggcccatattcaaggc

SEQ ID NO: 258641 - DNA, 149 bp, Zea mays
tcccggccgttttatttactagtgtgttcgtcctatatgtttagcaccagcaggtgtattgtgcgggtatgtaatggttttgcaactatattgggtgtaaacccataataaatgtgggcaaatatgcaaggaaaaaaggtttttccccc

SEQ ID NO: 258642 - DNA, 1024 bp, Zea mays
gggtgcatgcggctcatcaggaaggtgaccgccgagctgcctatctacttcgccaactcgtcgacccacgcgtccgcccacccccagtcgcgctctgccatcgagatactgcagcagttcgactgggaggtgcccgactgggtgatcgtgccgggaggcaatctggggaacatatacgccttctacaaggggttcgagatgtgccgtgtcctcgggctcgtcgaccgcgtgccgcggctcgtctgcgcgcaggcggccaacgcgaacccgctctacggctactacaagtcaggctggaccgagttccagccgcaggtggccaggccgacgttcgcgtcagcgatccagatcggcgacccggtgtccgtcgaccgggccgtggtcgcgctcaaggcgacggacggcattgtcgaggaggccacggaggaagagctcatgaacgcgatgtcgctcgccgaccgcaccgggatgttcgcctgcccgcacaccggggtcgcgctcgccgccctgttcaagctcagggagcagcgcgtcatcgggacgaacgaccgcaccgtggtcgtcagcacggctcacggcctcaagttctcgcagtcgaagatcgactaccatgacagcaagatcgaggacatggcttgcaagtactccaacccgcctgtgagcgtgaaggccgactttggcgccgtcatggatgtgctgaagaagaggctcaagggcaagctctgagcgcctgtgcctggctaatgcaatcaactgattggaatgcagtggtttcgtcggtatcggggggtcttttaggcttcagaaattctgtctgggttaggctatctgtttgtggagtttagcaggagaatggatctctctcctgcaagactggcgctctctcttgtgctgctacgatgtgttaccatggataataagtgacctagttgctgttggattgaataatcatcactcgctcctttgtcctctgtgctggcaaaaaaaaaaaaaaaaaaaaagggcggccgcttgacgattttgg

SEQ ID NO: 258643 - DNA, 1810 bp, Zea mays
ggagacaccgaggccagcgccatccacccgctcccctccgcgcccggccgcaccgctcccctccgctcggccttcatgaattcggctcgagaagcgacgggcgtcatatcccatcctgatctctcctcccttcttcagtgcagcagcaggccagcagcacgccacccgccccactcctgcctccgatccgctgcttactcgccacccggagatggccaccgccgccgccttctccgtctcctcgccggcggcctccgccgtcgccgcgcgatccaaggtgtttggaggaggagttaaccaggcgagaactagaactggctgccgcgtcggcatcacgcggaagaactttggccgtgtcatgatggcccttgcagtggatgtttctcgttttgaaggagtgccaatggctcctccagacccaattcttggggtttctgaggcctttaaagcagataaaagcgagctgaagctcaatcttggtgttggtgcctataggacagaagagctgcagccatacgtgctcaatgtagtcaagaaggctgaaaatcttatgttggagaaaggagaaaacaaagagtatcttcccattgaaggtttagccgcgtttaacaaagcaacagcagagctattgcttggagctgataaccctgttattaatcaaggactggttgctacacttcagtctctctcgggcactggatcactgcgtctcgctgcagcattcatacaaagatactttcctgaagctaaagtgctgatatcgtcgcctacctggggtaaccacaagaatatcttcaatgatgctagggtaccttggtcagagtacaggtactatgaccccaagactgttgggttggattttgagggaatgatagctgatattgaggctgctcctgaaggttcttttgttctgctacatggttgtgctcacaacccaactggaatagacccaactcctgaacagtgggagaaaattgcagatgtcattcaagagaaaaagcatatgccattctttgatgttgcatatcagggttttgccagtggaagccttgatgaagatgcattttctgtcaggctttttgttaagcgtggcatggaagtgtttgttgcacaatcttacagcaagaaccttggtctatattctgaaagggttggtgcgataaatgtcgtgtgctcagcaccagaagttgcagatagggtaaagagccagctgaaacgattggcacgtcccatgtactcgaacccccctattcacggtgccaagatagttgccaacgttgttggtgatccaatcatgtttggtgaatggaaacaagagatggagctaatggctggacggatcaagaatgtaagacagaagctctacgacagtttgtctgccaaggataagagcggcaaggactggtctttcattctgaggcagattggcatgttctcctacaccggcttgaacaaagcacagagtgacaacatgacggataaatggcatatttacatgaccaaggatgggcggatctccttagctgggctgtccctggctaagtgtgattatcttgccgacgccatcatcgattccttccataatgtgaactaggctgaggtacgatagttgagggtcaagctattgatgtttagttccgtggacgctaggctgggatttttgggtccttccagctatacagctcttccgttgtgctccatctggtgtaacttggataaataaatattttgtcgctgaactaaaactcgtgtgcttttttacctgtaaaaaaaaaaaaaaaaaaaaaaaaaaaaaaaaaagggcggccgc

SEQ ID NO: 258644 - DNA, 475 bp, Zea mays
ggcatgttctcctacaccggcttgaacaaagcgcagagtgacaacatgacggataaatggcatatttacatgaccaaggatgggcggatctcgttagctgggctgtccctggctaagtgtgattatcttgccgacgccatcatcgattccttccataatgtgaactaggctgaggtacgatagttgagggtcaagctattgatgtttagttccgtggacgctaggctgggatttttgggtccttccagctatacagctcttccgttgtgctccatctggtgtaacttggataaataaaaattttgtcgctgaactaaaactcgtgtgcttttttacctgtaactgtaaggtcagcgcgtggctacagacttgtaaacacttgaatggaaaaaaaacaatgacattaccggatattaatggccaactggccggtatgcgcttaagaagtcaaaaaaaaaaaaaaaagggcggccgc

SEQ ID NO: 258645 - DNA, 1464 bp, Zea mays
gaattcggctcgagggcatgcccttgacaagggtgaggcagttaattttttgaaaggtgcagttgtgacagcagatcgaatcgtgactgtcagtaagggttattcatgggaggtcacaactgctgaaggtggacagggcctcaatgagctcttaagctccagaaagagtgtattaaacggaattgtaaatggaattgacattaatgattggaaccctgccacagacaaatgtatcccctgtcattattctgttgatgacctctctggaaaggccaaatgtaaaggtgcattgcagaaggagctgggtttacctataaggcctgatgttcctctgattggctttattggaagattggattatcagaaaggcattgatctcattcaacttatcataccagatctcatgcgggaagatgttcaatttgtcatgcttggatctggtgacccagagcttgaagattggatgagatctacagagtcgatcttcaaggataaatttcgtggatgggttggatttagtgttccagtttcccaccgaataactgccggctgcgatatattgttaatgccatccagattcgaaccttgtggtctcaatcagctatatgctatgcagtatggcacagttcctgttgtccatgcaactgggggccttagagataccgtggagaacttcaaccctttcggtgagaatggagagcagggtacagggtgggcattcgcacccctaaccacagaaaacatgttgtggacattgcgaactgcaatatctacatacagggaacacaagtcctcctgggaagggctaatgaagcgaggcatgtcaaaagacttcacgtgggaccatgccgctgaacaatacgaacaaatcttccagtgggccttcatcgatcgaccctatgtcatgtaaaaaaggaccaaagtggtggttccttgaagatcatcagttcatcatcctatagtaagctgaatgatgaaagaaaacccctgtacattacatggaaggcagaccggctattggctccattgctccaatgtctgctttggctgccttgcctcgatggaccggatgcagtgaggaatccagccgaacgacagttttgaaggataggaaggggagctggaagcagtcacgcaggcagcctcgccgtgattcatatggaacaagctggagtcagtttctgctgtgccactcactgtttaccttaagattattacctgtgttgttgtcctttgctcgttagggctgataacataatgactcattagaaaatcatgcctcgtttttattaactgaagtggacacttcgcattaaaaaaaaaaaaaaaaaaaaaaaaaaaaaaaaaaaaaaaaaaaaaaaaaaaaaaaaaaaaaaaaaaaaaaaaaaaaaaaaaaaaaaaaaaaaaaaaaaaaaaaaaaaaaaaaaaaaaaaaaaaaaaaaaaaaaaagggcggccgcggggg

SEQ ID NO: 258646 - DNA, 1666 bp, Zea mays
gtcgacccacgcgtccgcccacgcgtccgcggacgcgtgggctcgccgcgcggtggcgggaggtccacggcagcaacaactgggagggtctgctggaccccatcgacggcgtgctcctccaggagctcatccgctacggcgagttcgcccaggccacctacgacagcttcgactacgaccgcttctccccctactgcggcagctgcaagtacccggcgaagaccttcttccacgacgtcggcctcggcggcatcggctacgaggtcacccgctacctctacgccacctgcaacgacctcaagttccccaacttcggcatcaagacggccgccaacgccaagatgtggagcgagtccggcacgttcatcgggtacgtggccgtgtccaccgacgaggagacggcgcggctcggccgccgggacatcgccgtggcgtggcgcggcaccatcacccgcctcgagtgggtggccgatctgacggccaaccagatccccctgcgcgagacgggcgtcccctgcccggaccccgacgtgaaggtggagcgagggttcgcggcgctgtacacggacaagggcaccagctgccgcttctgccggtactcggcgcgggagcaggtgctggccgaggtgcgcaagctggtggatctgtaccacgggcggggcgagcaggtgagcgtgacggtcacgggccacagcctgggcagcgcgctggcgatgctgtgcgccttcgacatcgcggagacgcgcgcgaacgtgtcgccgggcgacagggtggcgccggtgtgcgtgttctccttcgccggcccgcgcgtcgggaacgtcgccttccggaggcggttcgagcgggagctgggcgtgcgggcgctgcgcgtcgtgaacgtgcacgacagcgtgcccaaggtgcccggcgtgttcttcaacgagtcggcgttcccggagctcgtcctgcgggcggcggacaggctgggcctcggcggcgtgtacacgcacctgggcgtgctgctgcagctggaccacaaggtgtcgccgttcctcaaggagaccctggacctctcgtgctaccacaacctggaggcgcacctgcacctgctggacggcttccgcggctccggcgcggggttcgagccccgcgggagggaccccgcgctggtgaacaagtccaccgacttcctccgggaggaccacatggtgccgcccgtgtggtaccaggcggagaacaagggcatggtgaggacggaggacggccggtgggtgctgccgccgcggcagagggtgctcgacgaccacccggaggacactgaccatcacctccagcggctcggtctcaccgcgtgaagctcagcaatactctgatagtagcgttaattagtgcgtgtggcgttcgcgtacgtgcgcggggcagtcggttactctgttgccgcgcgcggcagctcagtggcgcgttcatgccgtgcatgatgcgggtgacgtgcgggatgggcacgtcgctgcctgagaagctcgcaccgttggcgttcgtgtggctgcagaaaggtcgtcttggattgtaattctctctacttatttttgtaaattgacccagaaaagctgctgcttgcagcgccaaaaaaaaaaaaaaaaaaaaaaaaaaaaaaaaaaaaaaaaaaaaaaaaaaaaggggcggccgc

SEQ ID NO: 258647 - DNA, 713 bp, Zea mays
gaattcgattagggcaagcttggtcgacggcccgggctggtctgcccatcgtcgcgcgccggaggcccgacggccgaggatggtccttcgtgtgggacgacgactcgcttctgctccagctccgcgacggcattcccgaggatatggaggtgctcttcgtcggctccctccgcgccgatgtccccgtagccgagcaggacgaggtgtcgcaggcgttgctcgaccggttccgctgcgcgccggtcttcctccctgaccgcctcaacgaccgcttctaccacggcttctgcaagcgccaactctggcctctgttccactacatgctccccttctcctcatccgcgtccgccgccggcaccacctcttcctcctccgccgccacttgcaacggtcgcttcgaccgcagcgcttgggaggcgtacgtgctcgccaacaagttcttcttcgagaaggtcgtcgaggtaatcaacccggaggatgactacgtttgggttcacgactaccatctcatggcgctgcctaccttcctccgccgctgcttcaaccgcctccgcatcggattcttcctccacagccccttcccctcgtccgagatctaccgcaccctccctgttcgggaggagatactcaaggcgctgctcaactgtgacctaattggcttccacacttttgattacgccaggagatctggatccgcgatcactagtgaattc

SEQ ID NO: 258648 - DNA, 1718 bp, Zea mays
gcggccgcgaattcgaattcgattagggcaagcttggtcgacggcccgggctggtaaagaaaattggatgaaagttactcgaccccgtcaatttaacagtgacattgaatttgtcgaggctgttgagatgaagacatgccagattgagggtattttactaataaggagattttaggtgtgaatgacaaacgcttcagccgaatacttaaaagactggctaagaagaacaaagctaatttggtggaggtttcatccaacagtgatgaggaaagaacaccaactctggtagaagtagagtatgttgctgcatcaaagagttttttttttttgtggaaaacttcagcgtgtagttttattggtcagcaatgtttgtttggcagtagcatgcatgagtccgattctctgaccatctccatttaccggtgccctggttattatccccccatcacaagagtggccaacatgcagcccctgaaacctggcgaagtccaagggggagcgaggagacgaacgtgtggccacggtgaggtggggatccggtccttcaccccttcaacttgggattccctctctatttagccatccgtccggtgcacgatgctacaagctcctcgtcaccagtcagaaaacagtgggatcgagttgtttcactgcacgagcacatcctccggcgaccaccggcctccctctccgtcctctagcgaccgaccaacgcgccgagcgaagatgtcgtggcagacgtacgtggacgagcacctgatgtgcgagatcgagggccaccacctcacgtcggcggccatcgtcggccacgacggcgccacctgggctcagagcaccgcattccccgaggtcaccgccgccaccgtcacatttgattcaatccccactagtattgcatacgttattgtcatctgacatgcgaggggatcgattttgttgtggtggtcgtccatccagttcaaggccgaggagatggctgccatcatgaaggatttcgacgagccggggcacctcgccccgaccggcctgatcctgggaggcaccaagtacatggtcatccaaggcgaacctggagctgtcatccgtggcaagaaggtagtaaccgcgcgtcagccgtcgtcggccgtcgtcgtcgtggctgctccgtcctctccgacccgttcctgtcctaacaacagtcgttttttgtttgtctgtgttggttcccagggatccgggggcatcactgtgaagaaaacagggcagtcactcatcattggcatctacgacgagcccatgactcccgggcagtgcaacctggtggtggaaaggctgggcgactacctgctcgaacaggggatgtaacaacaaccccttcccctggaatgcatgttgatgatgttgctggttccaacttcgttttcagtaataataacaacaaagcgaagaccctcctaccctaccctatttgcttgagcggctcttgtccgcgccacaagataccaattgttgcgctgggaatattcagttacgatgacccgctttagttcagtttcttttttttgggggttggttcgatcatttggctgtagcgtgaatcgcatgagatctggatccaatcactagtgaattcgcggccgcaaatattttttcttctgcatatatttgaagaatcttgttcagggccccttttcaaaatgaacgcggggaattttttttttcttgtttccaatgtcttt

SEQ ID NO: 258649 - DNA, 619 bp, Zea mays
  unsure (1)..(619): unsure at all n locations
cccacgcgtccgtcgacccacgcggtcagaaaatagtgggatcgagttgtttcactgcacgagcacatcctccggcgaccaccggcctccctctccgtcctctagcgaccgaccaacgcgccgagcgaagatgtcgtggcagacgtacgtggacgagcacctgatgtgcgagatcgagggccaccacctcacgtcggcggccatcgtcggccacgacggcgccacctgggctcagagcaccgcgttccccgagttcaagcccgaggagatggctgccatcatgaaggatttcgacgagccggggcacctcgccccgaccggcctgatcctgggaggcaccaagtacatggtcatccaaggcgaacctggagctgtcatccgtggcaagaagggatccgggggcatcactgtgaagaaaacagggcagtcactcatcattggcatctacgacgagcccatgactcccgggcagtgcaacctggtggtggaaaggctgggcgactacctgctcgaacaggggatgtaatgacaaccccttcccctggaatgcatgttgatgatgtttgcctgggggtttttccccccaaanaaaccccccttttttttccccccggggggg

SEQ ID NO: 258650 - DNA, 560 bp, Zea mays
cggacgcgtgggcgaacctggagctgtcatccgtggcaagaagggatccgggggcatcactgtgaagaaaacagggcagtcactcatcattggcatctacgacgagcccatgactcccgggcagtgcaacctggtggtggaaaggctgggcgactacctgctcgaacaggggatgtaacaacaaccccttcccctggaatgcatgttgatgatgttgctggttccaacttcgttttcagtaataataacaacaaagcgaagaccctcctacctaccctatttgcttgagcggctcttgtccgcgccacaagataccaattgttgcgctgggaatattcagttacgatgacccgctttagttcagtttttttttttgtggggttggttcgatcatttggctgtagcgtgaatcgcatggacaacagactccaattactaagcaaatatttttttcttctgcatatatttgaagaatcttgttcacgccccctttcgaaatgaaatgcgggaaattttgttcttgttcaaacaagggctctgcgtgctgcaccggataaaaa

SEQ ID NO: 258651 - DNA, 427 bp, Zea mays
aggggatgtaacaacaacccctgttctagcaggtagtcgcccaggggatggggcaacgaccccttcccctggaatgcatgttgatgatgttgctcgttccaacttcgttttcagtaataataacaacaaagcgaagaccctcctacctaccctatttgcttgagcggctctcgtccgcgccacaagataccacttgttgcgctgggaatattcagttacgatgacccgctttagttcacctttttttttggggggcgcggttcgatcattctggctgtagcgtgaatcgcatggacaacagaatgcacttgctaagcaaatattgctcttatgcatatatttgaagaaccatgtacaagcccgactttcgcaaagtaatgctggaaattgagttataaatcacacgacatactttaaaccatctgct

SEQ ID NO: 258652 - DNA, 549 bp, Zea mays
atgggatcgagttgtttcactgcacgagcacatcctccggcgaccaccggcctccctctccgtcatctagcgaccgaccaacgcgacggcgccacctgggctcagagcaccgcattccccgagttcaagcccgaggagatggctgccatcatgaaggatttcgacgagccggggcacctcgccccgaccggcctgatactgggaggcaccaagtacatggtcatccacggcgaacctgcagctgtcatccgtggcacgaagggatccgggggcatcactgtgaagaatacagggcaatcagtcatcattgggatcgacgacgagcccatgactcccgggcagtgtaacctggtggtgagaaggctgcgcgactacctgctcgaacaggggatgtgatgacaaccccttctcctggaatgcatgttgatgatgttgctggttccaacttcgtattcagtaataacaacacagctaagagcctcctacctaccctaattgcttgagcggctcttgtccgcgccataagataccaactgttgcactgggaaa

SEQ ID NO: 258653 - DNA, 2349 bp, Zea mays
  unsure (1)..(2349): unsure at all n locations
tagaatacatgataaagttaggattacgtagnagatacatggacaacacaacattcatggatcctttgataaaaaatgaaggcctatcaaatatttcattaggcacttattatataacttgtcaatccatttcttaactcttctcttttaaacaacagcgaagtctcactctagctatatatggagatgaagaagatggagaaggaggatgacaccatcattgttggcgccagcatcactgtcgtaatagggtagtggtagcaaatagatatcacggtccaatgcatgcatgtgtaatgcattgcttgggatccaacccaatctagtatagctagcataggtcggcttaaagtattgtcagcactaaagttaattatttggcggtgtaggcggtgttggccttccagttggcagggatgacatcgtcgtagacggacttggtgcctccctcggtagtgaggcggacggtgaggggtcccttaagcggtttgtcgctgtccttcctccagatggcgccccaggagtgcttcaggggctcgtacgtgtcggagcccttctccttgacgtccactgccacaatgtcaccgtcgccgtcgacgtacttgaccagcagcgccaggtagttggggccgcaccccttttcaaggtggaaggtgaccttggagtcgtacttgcacttaacccttcggaactgcatgtcgatgatgcccgccttgcgcagcttctcctcctcgcccttcttggccatggcgccgaacgccgtgcctgctaaatcgaagtggtacgccgcgataggctcatagttcatgtccgtgatgtgcaccaccacgggcttgccggagcactccacaggcttatcgcacttgatctcgaagcaggacccacaacccagaccatccttgaagatggggatgttgccgcatgcgcccatgctattgaaggggggcttgttcacgtccttgtacccgcagccgccaccgttgtcgtcgggaccggcacccgtcggcttgccataccatgtcgctttagcgtccagccagtccttgccataggtggccgtgatgttcttgcctggggggactttgggaggaccgcaccatgcgccgctcaccaagaacaccaacgccacaaccatcgcaacctgtgcccgcatcgacgaccacatggttctcacattcacagccatgttttgtcttggattagtgaatcggactgtgcgacgatgaatgagctagcaaacagggtctgaatttgtggtcatgagtactgtcggagagggaattctccggtcgggtggcggaacgcacccgccctaaatcctaagatgaggaggggcccaagcgttttgcctgctagatggaatcgggaagaacacaagaacacacaagggtttagagtggttcgggccgccagagcgtaataccctactccactgtgtgatgtattgagcttgagagcttgtatgaacttgtgagtttgagtgagtgtgtgagcctaagttgggtcttccttgtaacgtcgtgtgccctcccttttatagctcaaggggggcacgtacaagggtgctgagccccgacatgtgggccgagggacaaatggaaggaagcaactaatgcccgtaacgccagggtgaaccccgagcgctataatgtctgtagtgcatatagtattggtatcccatgctgcctccttggtaacacgcgagtgatgatgagcacagtgtatgccgcagcataggcgtactgcttgccaacggaatggacaggcacgccgcctgcaggatggctggtcgttgcctgtcagcagagtggacagggcacattaaatgctgaggcggcacatcgcctgccagtggagtggacaaggctcattaaattctgaggcggcacatcgcctgccagtggagtggacacgcgatgcggcttatctgtaataaatgcagaggccgtgtggcccagaggccttacgtcaggcttcgcccgctggcttacgtcacggtggtgggccacgtggcagcatcgggtctccacctgagtggagagcagaagcgtacaccgcatggcccgaacacgtgtcggctccggaccctcgcttggtcttcaacaaggtccaggtattctttgtcccagaatcccgggaccttgttgtgagtggcccggatcccacacagaggggtccgggacccatccaaggggttcagttcgcgcccgtggaggtcctggaccttacctggaggtccggtccatataaacaggggtccagcactttcccatgggggtccggacccactgctgataccttggaggataccagcccgggccgtcgaccaagcttgccctaatcgaattc

SEQ ID NO: 258654 - DNA, 452 bp, Zea mays
catgtagaatccatatgtacatatatatatcatatattccattttaaaatgtggccatgataaaattgggattgcatatataggagatacatagacaatacaatattcgtgttgttgtttgtcacactccttatatccttttattaaataaaaaataaaaaataaaggtctatcaagtgtgccatttgatacttattattatttggttagtttatttggcggtgtaggcagtgttgggcttccagccggcggggatgacatcgtcgtagacggtcttagtgcctccctcggtggtgagttggacggtgatgggtcccttgatcggcttgtcgctgtccttcctccagatggcgccccaggagtgctttagaggctcgtacgtgtcggagcccttctccttggtggcccccgccccaatgtcgccgacgcgtggtcgacccgtaatttagacc

SEQ ID NO: 258655 - DNA, 500 bp, Zea mays
ctagaattgatacatatgtatcatatatttcgattattcattaaaaatatgtattcattttaaaatgtgtccatgataaaattgggatggcataggagatccatagataatccaatatttgtgttgttgtcacacaccttatatccttttattgaataaaaaaataaaaaaggtctatcaagtggtgtaggcagtgttgggcttccattcggcgcgaagactgtctgatgacgtcgtcgtagacagtcttagtgcctccctcggtggtgagtcggacggtgatgggtcccttgatcggcttgtcgctatccttcctccagatggcgccccaagagtgcttcagaggctcgtaggtgtcagagcccttctccttgatgtccaccgccacaatgtcaccatctccatcaacgtacttgaccaacagggccaggtagttgcggttgcatcccttctccaaatggaaggtgaccttagatccatacttgcaccggacgcgtggg

SEQ ID NO: 258656 - DNA, 601 bp, Zea mays
ctgttctcctttccttttttttcttttccttttcttttttttttttttttctttttttttttttttttttttttttaacttgtcaatccatttcttaactcttctcttttaaacaacagcgaagtctcactctagctatatatggagatgaagaagatggagaaggaggatgacaccatcattgttggcgccagcatcactgtcgtaatagggtagtggtagcaaatagatatcacggtccaatgcatgcatgtgtaatgcatggcttgggatccaacccattctagtatagctagcataggccggcttaaagtattgtcagcactaaagttatttatttggcggtgtaggcggtgttggccttccagttggcagggatgacatcgtcgtagccgggcattggtgcctccctcggtagtgaggcggacggtgaagggtcccttaaacggtttgttgctgtccttcctccaaatggcgccccaagaagtcatagtggggttggattgtgtggaacccttttcccttatggtcacggccataaaggccccgttgccgtttacgtaattgtccaacagttccaggtagttggtccgcacccctt

SEQ ID NO: 258657 - DNA, 1899 bp, Zea mays
attatcatgataatatatgtttccgttgcaacgcacgggcactaacctagttattaccttagtttagtagtcgattgagtgttgcagctcagaaaccacaagtacagcaagccatgactcttggtccacacgcgcgtcatacattatttaccatctcgactaaaaaccccatcatactttttgctcggacagaatttatcggagaaattaaacttggccctatctttagttatagcaaaagatagtagccgggccctcagttttggccaccttcctcgcttcaactggtcgtcggccccggcgccggtgccggagccggcgcagatcccgtctcatcagccagcttcatgtcggaatagacgacgcggccttccgactcggagtcggtgctgttgtccccggccgaggcgtcggagctgttgttgtccccggccgagtcgtcgacgctgtcgaggatgcggattctgttcttgccggcggaggcggtggtggcgaggtggcagatgagcagccccaccagcgccaagctcactagtgattggatccagatcttgggcgccatcgcgcgtggaatctagctagtcgtagcaggtacctccccttctctgctcggatcgtccggctgtgattgctttcctttgttcctggctcatctcgaatgctgacggtaaggtttttatagtgccgggatccatggccgtttgcggtgttcgcgttgaaagtggccggggtgacctaattttggggtttgtgaattgcagccctccgttgccgcggctttgaatagctcttgtgctgcctgccacgcataatggcttctcttctacgtccgtccgtgttaccgatttatttatttagcattcgaaatcgcagcgtcgattgcggacacattccaccttgatttatttctgtgttcattataagcttagcctgtcgaccattttagatcctgctttaatttggatcaaccaatttgcattatagcaatataataaaacaatccctaggtgataaagcatccgtctacagaaaaaaggtgctcaggcccgaccgaccaggacagatcataggaaatcttaccaccacggatgctttgaagggccaaatgcaacagaaaatctgctttattttatcacaacgttctttatttattgttcatattggcggactcgttttgcagaatttgccacttgggaatcgaaattcgacaggcatactactccactatagctgccgtcggtcggctagctacgaaatgtagcctctgctcttgagggcctccacagcgtccctgatgatcttctccagagggctgaagtgcagccccaacgcgacgagcttcttggacccctcctcggctccctgtcgcaccagcccaggctgggtatccttggggaacctgcaacgtacgcaactataagctaagcaatgctctatctatccaggttttcattttcacagaacatggtcgggtcgcttacttgggcaccttgtactcagggtacagctcggcgaccttggccgcgaagtcgctccagtgggagatggactgggcgcagatgtgcctcccggacgccgccgggctctcgaacaccaggatatgcgccatggcggcgtcgtgcacatgcaccgcccccatccagatgtccctgtactcctccgtgcaacctgcgaccacgaacaggccggcatcctcctttagtttcttcttcgtctcattcgcatggcaacgcgaacggcatgcatatcgagcagcaagcaggaaagcaacgactactccacgcaccttgtagcaggcgtaggagcacggtcatgctgcagttgatggtgggcggaatcatggggcccatggcagtcaccgggttgacgacaaccacgtcaccagcccgggccgtcgac

SEQ ID NO: 258658 - DNA, 681 bp, Zea mays
agagcggccgccctttttttttttttgtgcattgtgtatgatcttattaagcatatcatatatatatatattattaccttagtttagtagtcgattgagtgttgcagctcagaaaccacaagtacagcaagccatgactcttggtcttggtccacacgcgcgtcatacatttaccatctcgactaaaaaccccatcatactttttgctcggacagaatttattggagaaattaaacttggccctatctttagttatagcaaaagatagtagccgggccctcagttttggccaccttcctcgcttcaactggtcgtcggccccggcgccggtgccggagccggcgcagatcccgtctcatcagccagcttcatgtcggaatagacgacgcggccttccgactcggagtcggtgctgttgtccccggccgaggcgtcggagctgttgttgtccccggccgagtcgtcgacgctgtcgaggatgcggattctgttcttgccggcggaggcggtggtggcgaggtggcagatgagcagccccaccagcgccaagctcagcaaggccacgcggatcctggtgggcgccatcgcgcgtggaatctagctagtcgtagcaggtacctccccttctctgctcggatcgtccggctgtgattgctttgccttccgaaggcttgggtggcc

SEQ ID NO: 258659 - DNA, 393 bp, Zea mays
ggttcacagacttattattaaaatctaacagagaaaagcggaacaagcctccgcaatcatagcctttaccaataaattgtccagacttagacacaactaatttattggactccaaaactaccttgaacccatgtctacacagaagggttccgctaacgagattcttgtgtatagaagggacatgatgcacgttcttcagctacacgatctttcccgaagtaaacttcagatccaccgtgccaatgccatgaacagaagcatgtgacccattccccattaggacggaagaatcccggacagccttgtagcaggcgtaggagcacgatcatgctgcagttgatggtgggcggaatcattgggcccatggcagtcaccgggttgacgacaaccacg

SEQ ID NO: 258660 - DNA, 658 bp, Zea mays
gcaacagaaaatctgggttattttatcacaacgttctttatctattgttcatattggcgaactcgttttgcagaatttgccacttgggaatcgaaattcgacaggcatactactccactatagctgccgtcggtcggctagctacgaactgtagcctctgctcttgagggcctccacagcgtccctgatgatcttctccagagggctgaagtgcagccccaacgcgacgagcttcttggacccctcctcggctccctgtcgcaccagcccaggctgggtatccttggggaacttgggcaccttgtactcagggtacagctcggcgaccttggccgcgaagtcgctccagtgggagatggactgggcgcagatgtgcctcccggacgctgccgggctctcgaacaccaggatatgcgccatggcggcgtcgtgcacatgcaccgcccccatccagatgtccctgtactcctccgtgcaaccttgtagcaggcgtaggagcacggtcatgctgaagttgatggtgggcggaatcatggggcccatggcagtcaccgggttgacgacaaccacgtctaccccgttctcctccgcaaacctccaagccgccttctctgccagcgtcttggaaacagggtaccagacctcgttcttcttgcag

SEQ ID NO: 258661 - DNA, 2107 bp, Zea mays
gaattcggctcgaggagtagtagaaactaggaagggccgttcgtgtcttgcggagaagatggagaacctgaggaggttcctgaacccgctggtgctcaacctgcagaagatggagctggagctcacctgccccgtctgcctgaagttgctcacctcgcccacaacgctgccgtgttaccacacatcctgcagcaagtgtgcccttacaccgacttcaaaaggctacagctgtgccatttgcaaatcaggctattgttctcaagatttaaggccagcttctcaccttgagtcgatagtgagcattcataggagcctcagctctaccgtcagcaccatgattgaacaacaggattctcaaattaacattcatgttgcaaaggcagcatctcatggaacaccagaatcaggaaacagaagtggggtggaggagaaatctgaccagatgaaatcttacaaccctgttgcttcaaagctagtatataaccaaccaactggacctgcatttgggaacattgatagtgttcaagcaaaagatcctgcatttgagaacaatgctggtgccgcagctgttgcaccaatggcttttgtacgaaagggtcattctgggtcacaatcttctgatggccctggagatttggactgtgacagcaatgacctcgaaggagaactgatgacaagcctatcacctcttcaaactgcattgaaacgagaggcaaatgcaatggatgatcataccagagaattgaagaagcaaaaatcaaatgatcaagttcaaagacaaacaaacatggccagtgcttggaaatgtgagttctgtcattcttcccaagttactgagtgtactggccctttgtcacattatttgaatggggagccagtagaagctgatcaagcttggaaatcaagtgttcagcatgtccatgagaaatgcattgaatgggctcctcaagcattctttactggtgacaccgcaaacaacttggggcctgagttggcccgtgcttctaagatcaaatgcagtgtttgtggcttaaaaggcgcagcacttggctgccttgtgaagagctgccgcaaaagtttcatgtcccatgtgcctacaacatcaaaggctgcaaatgggatcaagagaactttgttatgctgtgtcctacacattccgtcaaaaaagttgccttgtgagagattaaagccaaaaaagaaggccaagctgcagcaaccatcttccgacattgatggtccgatttcaccctctccgatgcaaagggctgaactttggactgcctcaccttttctgactagtgaatgggtgatatgtggatctgcgctcgttggccatgagaaggaaatcttggatcagtttgagtgtcacactggcatcacagtaaccaacacctggagttcagatgtgactcatgtgattgctaatacggatgaacgtggggcatgtgcacggacactcaaggtcctcatggctattttagctgggaagtgggttctcaatgtgaattggctgaaagcctgtatggaggctagggaaccagtcccagaagagccctacgagataaggtgtgatgttcatggctctgtcgacggccctcgctcaggaaggctccgagcgatgcagcaggcacacaggtctgtttgctgggttgaccttctacttcagtggccatttcatgccgggatacagggccaacctcgaagatttgatcgccgcagcaggggggtccgttctggagaaggccgagctctctagcacgtccttgatcctctacagcatggaggcgccgccgccccacaacaacctagacgccctcgagaccatcaacaagagattagccgaggcccaggaactggcgaccacggctggctgcaaagccattcctcatacatggcttctggactgtatcgcgtcgtgcgcggttgagttgaacgtgtcgtgttctactgcctaggttcaaacgtaggaatgtgacatctgctgctgtttttttttgaaaaaggagattaagagacgattggcttgttgtcttgatccaaagtatctttagacgttgtagcatgaaagcggaatttagtcggaaaaaaaaaaaaaaagggcggccgc

SEQ ID NO: 258662 - DNA, 1821 bp, Zea mays
ctcctctgcctttccccatcgtctctccgtctacacctcatcataatcacagagcgctagggaggagagagggggaagagagagggctagggtttcgtgctccctcacgcaacgaatccgagccggatcggggggtgcgcggagtcaccggcggcccggcgttgcctgggctgtgatacagttgcaatggcatctgtaactgatgagacagctaagattgagggtttgacatctgctgcagcctttgtggagggtggcattcaggacgcatgtgatgatgcatgcagcatttgccttgaggctttctgtgagagtgacccttctgcattgactggctgcaaacatgagttccatctccaatgcattcttgaatggtgccagagaagttcacagtgcccaatgtgttggcagcctattactatgaaggatcctaccagtcaggagctgcttgaggcagtagagcgtgagaggaatataagaactaatcaaactcggaacacaactatatttcatcatcctgctcttggggattttgagctgcagcatctgcctgttggtaatgatgctgagcttgaagagcgtatactgcagcatctagctgctgctgctgcaatgggaagggcacaccatcttggaagaagggaggggcacaggggacgatctggctctcatggtcgtccacatttcctagttttctctacacaaccaaattcaccttctgctggcacaatctcttcatcttctgctcatatggagggagaaaatgattcaaatcctgccacacctagagctagcgagtcatctccacgagctattcgcattggagaagtgggaaaccaaagtcctgggatgcttacctacgatgctgaacaggatgctgtcgtttcttccggaaatagcactcctgtatcgagtcctaggttttttaacaggagacactccactggacagtcaactccagacagggctgggccatcggatattcagtctttctcagactccctgaagtcccgcttaaatgccgtctctatgaagtacaaagaatctattacaaagagtactcgagggtggaaggagagattgttttcacgtaattcatccgtggcggatcttggttctgaagtgagaagagaagttaatgctggaattgcgtccgtatcacggatgatggagcgtctggaaactagaggaaatagcagaacaagtgatagcccggcagcatccacttctgaagttccccctgctacagaatcaagcaatgaaagggttacagagagcaactctgctgctgctgctggtggtggtggtactaccactacgggtaccagcgctagcaacgcctccgccccttgtgttgcgacatccggttcaaattaggacatgtaagggtctcagaaagaaggcttacacctgcaattcttcatcttcgaaggtttgtgagcctggcggcagagcagaagtgcagtaacatgatgccgtcatttttttctcaaccactgcataaacggctgcaaggggaaaaaaccaaacggtgatttgatgtattggctcgataaaatggtggtgcgtgtggcctaggagaagtcggatttcatcttctgttttcgtctctttgtaaaaaaaatcgtctgagggcagatgtttaccggtataaataacggatatgtcatcttcatagtacgtggatcagttataaatatgattggaacagcaaagcttgctgctgttataaaaaaaaaaaaaaaaaaaaagggcggccctgttctgtgtgggtgaattgatggattttgctgtacacaagatatgcatctttccaggtct

SEQ ID NO: 258663 - DNA, 621 bp, Zea mays
cccacgcgtccgcccacgcgtccggcttgcctcgctcggctcacaccccttttcgtctcgtctctgcctttcctccgcaaacacagagcgcaggaggagagagagagagagagtgagaggggagagagagggctagggttttgtgcccccacccccaccacgcctcacgcatcgaatccgagccgggtcggggttgctgcgaatcgccggcggtgcttgggctgtgattccattgcaatggcatctgaaactgatgagaaagctaagatggagagtttgacatctgctgcagcctttgtggagggtggcattcaggatgcatgcaacatttgccttgaggccttctgtgagagtgacccttctgcagcaatattgaaggatcaaccaaaatggatggagcaacacatgagtcaccaaaatccaccacccaacccaatcggtatccaaccaaatactgtagacttagatgctgaagattctgttccatcaagctttacttcgaagaggccgctaggtcttgattcgtccaaggaaaaggcaaagaagcaaaggtctgttgacacatcgtccactttttctgagtacctcaggtggatgggtgaaatatctttggaacggttg

SEQ ID NO: 258664 - DNA, 734 bp, Zea mays
cggacggtgggcggacgcgtgggcggacgcgtgggcggacgcgtgggcggacgcgtgggagaatctattacacagagtactcgagggtggaaggagcgattgttttcacgtaattcatccgatggcggatcttggttctgaagtgagaagagaagttaatgctggaattgcgtccgtatcacggatgatggagcgtctggaaactagaggaaatagcagaacaagtgatagcccggcagcatccacttctgaagttccctctgctacagaatcaagcaatgaaagggttacagagagcaactctgctgctgctgctgctggtggtggtactaccactacgggtaccagcgctagcaacgcctccgccccttgtgttgcgacatccggttcaaattaggacatgtttgtgagcctggcggcagagcagaagtgcagtaacatgatgccgtcatttttttctcaaccactgcataaacggctgcaaggggaaaaaaaccaaacggtgatttgatgtattggctcgataaaatggtggtgcgtgtggcctaggagaagtcggatttcatcttctgttttcgtctctttgtaaaaaaaatcgtctgagggcagatgtttacacggtataaataacggatatgtcatctgcataggacgtgggatcagttataaatatgattggaacagcaaagcttgctgctgtttttagacactgacaccttacaccggggcggccg

SEQ ID NO: 258665 - DNA, 501 bp, Zea mays
ctctcctctgcctttccccatcgtctctccgtctacacctcatcataatcacagattcacagagcgctagggaggagagagggctagggtttcgtgctccctcacgcaacgaatccgagccggatcggggggtgcgcggagtcaccggcggcccggcgttgcctgggctgtgatacagttgcaatggcatctgtaactgatgagacagctaagattgagggtttgacatctgctgcagcctttgtggagggtggcattcaggacgcatgtgatgatgcatgcagcatttgccttgaggctttctgtgagagtgacccttctgcattgactggctgcaaacatgagttccatctccaatgcattcttgaatggtgccagagaagttcacagtgcccaatgtgttggcagcctattactatgaaggatcctaccagtcaggagctgcttgaggcagtagagcgtgagaggaatataagaactaatcaaactcggaacacaact

SEQ ID NO: 258666 - DNA, 1104 bp, Zea mays
ctctcgcgtccgcccacgcggaattcggctcgtggaggacatagccgcacaaagggaaggagaccctcgccaacctcgaagctagtccaaactagtgggaggttgagtgcagggatcgatcgaggaagacgagacaagcttcttcttctgctgccgccgccgccagctctagctcaccacgagttactagccaatctgacaccgaccgtccatggcgcggggcaaggtgcaacttcggcgcgtcgagaacccggtgcaccggcaggtgacattctgcaagcgccgcgcggggctgctcaagaaggcccgggagctctccgtcctctgcgacgccagcgtcggcatcatcgtcttctccgcgcacggcaagctctacgacctcgccaccaccgggaccatggaggagctgatcgagaggtacaaggctgccagcgccggagaagcgacgaccgacggctgcggcaggcacaacaggatggaccccaaacatgaaaccacggtgctgcaacaggaaatcaacctgcttcagaagggactgaggtacatctacgggaacagggcgaacgagcacatgaatgttgacgaactgaacgccctagagaggtacttggagatatggatgtacaacacccgctctgcaaagatgcagataatggctcaagagatccaagcactgaaaagcaaggaaggcatgttgaaagctgccaacgagattctccaggaaaagatagtagagcagagtagtttgcttgacgtaggcatggtggtagcggaccagcagaatgggcgttttagcacagtcccactggtagaagaggtgatcagtagtaacccactgactatactgagtggctattctagctgtaggggttcagagatgggctactccttctgttgattactactagtgtgtaatacatacagtcaataatgtctgtgtaatgggttggttgttctgctgctttggtgtatcatattcgtatcatgtaggccttagataagcccttcaggagtgcccctggtattgtgtcgtcgtgccttttacttttccagaatgaagaaatattgtctattgaggaaaaaaaaaaaaaaagggcggccgcg

SEQ ID NO: 258667 - DNA, 558 bp, Zea mays
ctcattcgtccgccgacgcgtcggggacatagccgcacaaagggaaggataccctcgccaacctcgaagctagtccaaactagtgggaggttgagtgcagggatcgatcggggaagacgagacaagcttcttctgctgctgctgccgcccccgccagctctagttcaccagagttactacttactagccaatctgacaccgatccaccgccggcaccgaccgtccatggcgcggggcaaggtgcagcttcggcgcgtcgagaacccggtgcaccggcaggtgacattctgcaagcgccgcgcggggctgctcaagaaggcccgggagctctccgtcctctgcgacgccagcgtcggcatcatcgtcttctctgcgcacggcaagctctacgacctcgccaccaccgggaccatggaggagctgatcgagaggtacaaagctgccagcgccggagaagcgacgaccgacggctgcggcaggcacaacaggatggaccccaaacatgaaccacggtgctgcacaggaaatcaactgttagagggcctgaggtacattacg

SEQ ID NO: 258668 - DNA, 475 bp, Zea mays
tcgttaagctagtccaaactagtgggaggttgtgtgcagtgatcgatcgaggaagacgagaagcttttcgctgctagctaccgcccgcccggtgtctgtcgatctgtgacgaccgccaagccgaagccgaaggcagcagcagtcgtcaagttcatcgatctcggcatcgacgaccgcccggccgtccatggcgcgaggcaaggtgcagctgcggcgcatcgagaacccggtgcaccggcaggtgaccttctgcaagcgccgcgccgggctgctcaagaaggcccgggagctctccgtcctctgcgacgcccacgtcggcatcatcgtcttctccgcgcacggcaagctctacgacctcgccaccaccgggaccatggaagagctgatcgagaggtacagggctgccagcagcggagaagcagccgacggctgcggcgacaataacagaatggacccaaagcaagaaaccatggtg

SEQ ID NO: 258669 - DNA, 410 bp, Zea mays
ccgctctgcaaaaatgcagataatggctcaagagatccaagcccttaaaagcaaggaaggcatgtttaaagctgccaaccagattctccaggaaaagatagtagagcagagtagtttgctttacgtaggcatggtggtaacggcccaccagaatgggcgttttagcccagtccccctggtagaaaaggtgatcagtagtaaccccctgactgtactgagtggctattctacctgtaggggttcaaagatgggctaccccttctgcccgtaataacaaacagcctgggggctcccttctgttgattaccactagtgtgtaatacatacagtcaataaagtctgtaatgggttggttgttctcctcctttggtgtatcatattcgattattcgtatcatgtaggccttagat

SEQ ID NO: 258670 - DNA, 439 bp, Zea mays
tgtacaacatccgctctgcaaagatgcagataatgattcaagagatacaagcactgaaaagcaaggaaggcatgctgcaagctgctaacgaagttcttcaggagaagatagtagaacagagtagtttgcttgacgtaggcatggttgtagcggatcaacagaacgggcattttagtacagtcccactggtagaagagatgatcagtaaccccctgactatactgagtggctattctaactgtaggggctattccttctgacactgtcatgcccccctggggggctaactctctgttgattactactactagtgtgtaatactcccagttaataaagcttgtgtaccttgccatatagccagccctccaggagtgccctggtattgtatctgtgtgctttttttttacttcccataataaagaactgttaagaagccccc

SEQ ID NO: 258671 - DNA, 1460 bp, Zea mays
agctggtctgctgttgaaacttatggaaaagttccactcgagatggccaatcagtatccatacttggttctcgattactgatgtttggtggagaggataacaagagaaggctactgaatgatcttcatatgaattcggctcgagcaatgatgtgggaagaagtcaaatcagagaaaggtggtccagctcctaggtatgatcattcggctgctgtttacgctgaccagtatcttctgatctttggtggctcttctcactctacatgcttcaatgatctttacctacttgacttgcaaactctggagtggtctcaacctgatgcccaaggagcacacataactcctagaagtggtcatgctggtgctatgattgatgaaaattggtacattgttggcggtggagataatgcaagtggttccactgatacagttgtaattaatgcttccaagtttgtgtggtcagtggtcactagcgtctcagctagagatcctctagcttgtgagggtctcaccctttgctcaaccacagttgatggcgaaaaagttctaattgcctttggcggttacaatgggaaatacagcaacgagatctttgttttgaaatccaagccaagaaatttagtccaacctcgtcttcttcaatcagcagctgcagccgccgccgccgcttctgtgacagctgcctatgctgtaattactgccacagatgagaaaaccagagatattgttgctacagatgattttgatatcaagagagctcaacctgcaagtaattccaaaaagtttgttgctgaaattgatgtacttaatggagagaatggtaaactagcggctagattggcagaggttcgcgatgaaaactcaaaactaaaggataaattagacatgacaaacttgtcatatggtgaattagcaaaggaacttaaatcagttcaagatcaactagcagcagagggttcaagatgccagaagcttgagtcccaaattgctgctgcacggaagagactggaatctgctggttctttggagaatgaactagaagtattgcatcaacatatatctcaggtggaggaaaccattgcaactactcagagaagaaaatctgggggtgtttggaagtgggtggcgggtagtacagaggtctctgacgatgaatagttgacaagcagcttccgaacaggaaacgtaagcggaggatctgctacagttttgaggcagcttgtctgttgccagttgccgggtgcttcctcaaggtcttgctcatggttgatctcgaaaatatgtctcccgaaataatcttgtttatcttcttcggtggtggcacctggtagaaaattttcctgggcagtcttagacattaattcaacagtaaaagcataacatcatgcaagtataccaaatactgagagcgtaaaaaaaaaaaaaaaaaaaaaaaaaaaaaaaaaaaaaaagggcggccgc

SEQ ID NO: 258672 - DNA, 625 bp, Zea mays
ccataactgacctagatcttgacggggtgtggaacgctcgactctgatgtatttctctttcctccgacgcagcttctcctgctcgtcgagggaacttaaatcagttcaagatcaactagcagcagagggttcaagatgccagaagcttgagtcccaaattgctgctgcacggaagagactggaatctgctggttctttggagaatgaactagaagtattgcatcaacatatatctcaggtggaggaaaccattgcaactactcagagaagaaaatctgggggtgtttggaagtgggtggcgggtagtacagaggtctctgacgatgaatagtaagtcctatctgcagcatgcttggatggaacaatgctttatgtactcaggggttccgctacagttgtagctttatattttctatttcgcgcgccctttttggtcagaaacttgtttaaatagagttttaactcatgaattgtctagagcccagtagcacgctgcatcatgctgttgttaagttgtactctgtttcaaattgtaagtcgttttagtttttttcctaagtcaaatatgtctaactttggccaagtttatagaattagcatctccaatatcaaatatgccctatcc

SEQ ID NO: 258673 - DNA, 1641 bp, Zea mays
atggccagtgaattgaatttaggtgacactatagaagagctatgacgtcgcatgcacgcgtacgtaagctcggctgctacttacctttttttacagcagtgcatgttcgtctcatggtgctgcattcagtttacaatgtgtctgaaggatttgaagaccccacccccagatagtggatgggcttttttttacatattgtatgtgtcaacaggtaatcagaaggctggctcagaatcgtgaggctgcacgcaaaagccggctgcggaagaaggcgtacattcagcagctcgagagctgtaagctgaagctttctcagatggaacaggacatgcagcgagcccgtacccagggcctctttcttggaggagatccgggtgcaagcaccagttcaggtgccgccatgtttgacgtggagtacgcccggtggctggacaaccacagccggcgcctggccgagctgaacggagccctacacgcgcacctggcagacggtgacctcagagccatcgtcgacgacgccctcacccaccacgacgagctgttccagctcaaggccatggcggccaaatccgacgtgttccacctcatcactggggtgtggacgacccccgccgagcgctgcttcctctggatgggtggattcaggccctccgatctgctcaagacactgctgccccagctagatccactgacagagcagcaagtggtcggcatatgcagccttcagcagtcatcacagcaggcagaggaagctctctcgcagggcttggagcagctgcatcagtcgcttgctgacaccatggccggtgggtctctgactgacgacgccaacatgagcttcatgagccaaatggctcttgccctcggcaaactggccaaccttgaaggctttgtgatacaggccgataacttgaggcaacagactcttcatcagatgcaccggattctgacagttcggcaggcagctcgatgtctcttggcaattggcgagtaccacaaccgccttcgtgccttaagttccctctgggcttctagacctcgagagatactggtgaccgatgaaggcaattgtgagataagcatcgcagcacaaccatcccaaaaccaattttcaaccttctgactgacacatgttgtggaactaaccctcagcataggagcaagagaaaaatgactgggaagagaatgactgggaagagagattgtttggatgcacgtagcagatatctgagagctacagaggaaagctgggaaatagaagaagctctaaaacaaggagtgtttctggaaattctttagttttcaaaaaacactttctgaaaatgtgtgtacaagaaaattccaggaaggtgaaattgcttcattgactgcagtgggaaggggaaagagagaagctagaatctcatgtcgagtactccagtacaatgtgttcttttgtctggtctaaattcttgtaacagctcttcctatgatggaagaatccattcaacaattccacctatgattactggattgagtatgttgaataggttggttgaggctatctagtaatttttatgactatgtttatccattatctaggactatttggttactatattatataatctttatcaaaaaaaaaaaaaaaagggcggccgc

SEQ ID NO: 258674 - DNA, 825 bp, Zea mays
gaattcggctcgaggaaataaagagggagaggcgaaaacaatctaacagggagtctgcaaggagatctagattacgcaagcagcaagagtgcgaggagttagcccggaaggtagctgacctaacgaccgagaacagcgctctcagagcagaacttgacaacctcaagaaggcttgtcaagacatggaagcagaaaattcacgtctgttgggtggggtggctgacgcccaggtaccaagtgtcacgaccacactgggaatgagcatcgagccgccgaagttgcagctgcagctgcagcagcatcatgatgaggagggccagctccacaagaaatctagtaataacagcaatgggaactgtgctggaggcagccacaaaccggaggctaacactactaggtgagatacagaggtggatgaggaagtgacaaagatgagatgagatgaggtgtttcttatctaaccacaacacccatcatcggtcagtgtgtgtgttttttcttagcgaagctgtcgttttagtcctcgcagcccgctggggccatgtagagtcgcccccactgcagccatgtattatttatggctcgtcgcggtgtgctttgtgtttttttgtgtgttgtgtaaaaactattgatgtaacaaaacctagagagcctagaggttttttttatgtctgctaactcctgacgagggatgtaatgtaaccggccaatttgttgcctaaaaaaaaaaaaaaaaaaaaaaaaaaaaaaaaaaaaaaaaaaaaaaaaaaaaaaaaaaaaaaaaaaaaaaaaaaaaaaaaaaaaaaaaaaaaaaagggcggccgc

SEQ ID NO: 258675 - DNA, 1709 bp, Zea mays
ggtttctctcgtctttctcctccctctcctgtcttttcttctagacatctcgcgggtcttatcgactccaacaagaacacactacacaccagccagcgagatagcgaacgctaggaacccagtggccatctttggagcggccatgacgctggatcagaaccatgccatgccgatgcagcccccggccctgcagcccggaagagcatatggagcagagggcagtgctgtggtgcatggttccatcagaacagtaggtatgactgctttgatcacctcttgtgaaaaggaaatattgactgatatgagtccacactaggcctggccctataaaacacaatcacacaaataacaataacagtttatgtttcagcaggaggccctactcttgccttgaatgagtgccagattttggtacagcagaaaccccagggagattcacgactgctgaattcggctcgaggcaggaagaagcgacctcgcagatcacgagatgggcctacgtcagtggcagctgtcatccagcggtgggctgagcgcaacaagcatttggagtatgaggaatctgaggaggcaaagcgaccaagaaaagcacctgcaaagggttcaaagaagggctgtatgaagggaaaaggggggcctgacaatactcaatgtggataccgtggagtgaggcagcgtacttgggggaagtgggttgctgaaataagagagccaaatcgtgtcgacagactctggctgggtaccttcccaaccgcggaggatgcagctagggcctatgatgaggcagccagagcgatgtatggagacttggcacggactaacttccccggacaggatgcaacaacctctgcccaagctgctctatcatcgacctctgcccaggctgctccaacagctgttgaagctcttcagactggcacgtcatgcgagtcgacaacgacatcaaatcactcggacatcgcatccacctcacacaagcttgaagccgacatctcgagctacctaaaggaaaaatgtccagctggatcatgtggtatccaagacggcacacccattgtagctgacaaggaggtctttgggccgttggagcctatcacaaatcttccagatggtggtgatggttttgatatcggtgagatgctgaggatgatggaaagcgatccacataatgcaggtggagccgacgctggcatgggacagccctggtatcttgatgagctggattcgagtgtcttagagagcatgctccagccggagccggagccagagccagagccattcctgatgtctgaagaaccggacatgtttcttgctggcttcgaaagcgctggtttcgtcgagggtctggagcggctaaactgaatttctgatgtttgaccgttgatcctcatcccacttcatgtctgagcttgtgaattcggaggcaaacattggcagaacttataagctctagcaattctaggctttacattcctctgtgatagttctctatgcatgggaactgggtttgcttcacaatttttgtaagaccagaagtgatgtaaatagttcccaccttgtggaaggacagaaaaaaataataaaaagaatgcttgctttcgttcctttaaaaaaaaaaaaaaaaaaaaaaaaaaaaaaaaaaaaaaaaaaaaaaaaaaaaaaaaaaaaaaaaaaaaaaaaaaaaaaaaaaaaaaaaaaagggcggccgc

SEQ ID NO: 258676 - DNA, 808 bp, Zea mays
cggcggaggaggtgtggaaggagatcactggcggaggtggcagtggggaagccgtggctcccgtggcggctcaggctgtcgctcccgatggtggcgctggcacaggcggcccggaggtgacgctggaggacttcctggccagggagagcgcggtgaaggaggatgaggttaagatttctgtcccccccgcgccggtcatggggttaccgggcggagcggagggcgtgagtgtgcctggcggcggaggcgggagggaacggaagcggcagcttgtgagtacagtggatcgcgctcgctctgctatccagcgagagaaacgaatgataaaaaaccgcgagtctgctgccaggtcacgggagaggaagcaggcctatatcgccgagctagaatacatggtaacgcggctcgcggaggagaaagctgagttgctgagacaacaggaagagcagttccagacgcggcttgaagaggtaactttctttggttcatgtcaatctgattatattgcgataaaatgggtgtgaagtgcatatatgtattatgctagtttatgggtacgtttggtttagctgtgaaaagttaatgtgaaaaagctgttgtaagaaaaaagctaaaagttctttagttaatttttttgtgagttgtccacggtaaataaattatatattgtttaaaaaaaaaaaaaaaaaaaaaaaaaaaaaaaaaaaaaaaaaaaaaaaaaaaaaaaaaaaaaaaaaaaaaaaaaaaaaaaaaaaaaaaaaaaaaaaaaaaaaaaaaaaaaaaaaaaaaaaaaaaaaagggcggccgc

SEQ ID NO: 258677 - DNA, 494 bp, Zea mays
cgcggccgagctcgtgggtccagtggatcgcgctcgctctgctgtgcagcgacagaaacgaatgatcaaaaacgcgcgagtctgctgccaggtcacgggagaggaagcaggcctatatcgccgagctagaatacatggtaacgcggctcgcggaggagaaagctgagttgttgagacaacaggaagagcagttccagacgcggcttgaagagctcgtggaccgagcgacgccagccattctgaggaaaaaaccatcacgagatcttagaagaacgaactcaatgcagtggtagatttgagccaagctcggccgccgtctccttactgttataacatagaatttgcgccctgtatgtcatttttctatttatatatgcgccaacttagttgtagtaccttaactgaaattgcatgggcaattagccgacacaaagcttcaatgaaatcatgttgtgtagggtaaatcatcacaaagaaaggttgctgttcctgcc

SEQ ID NO: 258678 - DNA, 2594 bp, Zea mays
gaattcggctcgagagcagatcaaggtctggttccagaaccgcagatgccgcgagaagcagcggaaggaggcctcgcgcctgcagactgtgaaccggaagctgactgcgatgaacaagctgttgatggaggagaatgacaggctgcagaagcaggtctcccgactcgtgtacgagaatggatacatgcgacagcagcttcacaatccttctgctgcgactacagacacgagctgtgagtctgtggtcacaagtggtcagcaccaccaacagcaaaacacagcagctccgcgtcctcaacgggatgcgaacaacccagctggtctactagctattgctgaggagaccttggcagagttcatgtccaaagcgacaggaactgctgtcgattgggtgcaaatggttgggatgaagcctggtccggattccattggaatcatcgctgtttcgcacaactgcagtggcgtagcagcccgagcttgcggcctagtgagccttgagcccacaaaggtcgcggagatcctcaaggatcgcccttcttggtaccgcgattgtcggtgtgtggatattctccatgttatccctacgggtaatggtggaactatcgagcttatctacatgcagacttacgcaccgacaactttggcggcaccgcgcgacttttggactctccgatacactagtggtcttgaggatggcagtcttgtgatctgtgagagatcactgacacaatcgactggaggcccatcaggacccaacactccaaattttgtaagagccgaagtgcttcctagtggctatctaattcgaccctgtgagggaggtggctccatgattcacattgtggatcatgttgatttagatgcttggagtgtgcctgaggtccttagaccactttatgaatccccaaagattcttgcacagaaaacaactattgctgcactgcgtcacattaggcaaattgcgcatgaatcgagtggggaaatgccctatggagggggccgacagccagcagttttgagaacatttagccagaggcttagcaggggtttcaatgatgctgtcaatgggtttccagatgacggttggtcactgatgagcagtgacggtgctgaggatgttactattgctatcaactcttctccaaacaaacttattggtcctcatgtcaactcttcccagctgtttactgcgatcggaggtggcatcctgtgtgctaaggcatcaatgctgcttcagaatgtgccacctgccctactagtacgatttctgagggagcatcgctccgaatgggctgatcctggtgttgatgcttattctgccgctgctctgagggctagtccatatgcagttcctggcttgcgtgctagtgggtttatgggcagccaggttattctgccgcttgcacataccttagagcatgaagagttcttggaggttattaggcttgagggacacagcctctgccatgacgaagttgttctgtcacgagatatgtatcttctgcagttgtgcagcggtgtggatgaaaatgcagctggtgcatgtgcacagcttgtgtttgcacccatcgatgaatcttttgccgacgatgcgccactgctaccctcaggcttccgtgtcattccactggatgcaaagacggatccaccatcaggcacacgcacacttgaccttgcatctaccctcgaggttggatctggtgggacaacgcgtgcttcgagtgacgcctccagcacctgcaacacaagatcagtgctgaccattgctttccagttctcatatgaaaatcacctacgagagagcgtcgcagccatggccaggcaatacgtcaggaccgtggtggcatcggtgcagagggtagccatggcaatagctccttcgcgcattggtggacagcttgagatgaagcaaactccaggatctcctgaggcacacacgctggcaaggtggatcggcaggagctacaggttccacactggagccgaactcctccgcacggacacccaatgcacggatgcttccttgaaagcgctgtggcaacactcggactcgatcatgtgctgttccctgaaggctgctcccgtgttcacctttgccaaccaagccggcctggacatgctggagacgacgctgattgctctccaggacatctcccttgagaagatccttgacgacgatggcaggaaggcgctctgcaccgagtaccctaagattatgcaacagggcttcgcgtacctccccggtggcgtgtgtgtgtcgagcatggggcggccggtgtcgtacgagcaggcggtggcgtggaaggtcctgagcgacgacgacaccccgcactgccttgccttcatgttcgtgaactggtccttcgtgtgagaacccggtccccctagtagtagagccaagttgcctagcgtttgcggctctgttgtttgaactctgtaccccatgtaccgtcgcttttgcctgtgtccaggcaacctatgaaacacacctttgtagttgttcatcacccccgtggaacaaacagctttgtactaaaaaaaaaaaaaaaaaaaaaaaaaaaaaaaaaaaaaaaaaaaaaaaaaagggcggccgc

SEQ ID NO: 258679 - DNA, 442 bp, Zea mays
cggacgcgtgggcggacgcgtggggtgtcgacgactccagggtttcgcgtacctccccggcggtgtgtgcgtgtcgagcatggggcggccggtggcgtacgagcaggccgtggcgtggaaggtcctgagcgacgacgacacgccgcactgcctcgccttcatgttcgtcaactggtccttcgtgtgagtgaggaccggccccctagcagagccagccagtcgcgcgcgcccgcccgcctagcatttgcagctgttatttgttgaactctgtatccaagtactggtcgctcttgcctttgtccaggcaatcctgtgaaacgcacctgccccccagttcatccgtggaacaaacgccttttgtagttgcttgcttgctatgttatgatggatcctggtctgctgcatctcctaaaaattggcttggcccattgagtgcgtcccc

SEQ ID NO: 258680 - DNA, 381 bp, Zea mays
ggcagatcaaggtctggttccagatccgcagatgccgggagaagcagcggagggagtcctctcgtctgcagaccgtcaaccggaagctgggtgccatgaacaagctgttgatggaggagaacgaccggctgcagaagcaggtttcccgtctcgtcttggacaacgggtatatgaagaatcgactccacagtccttctgtagccaccaccgacacaacctgtgagtccgtggtgacaagtggtcagcacaaccaacaacccagcagttctgcatcctccacaaagggatgcgaacaacccagcaggtctactcgctattgctgaggagacattggcagagttcatgtccaaggcgactggaactgctgtcaactgggtgcaa

SEQ ID NO: 258681 - DNA, 2315 bp, Zea mays
tctttgacgcgtgggcaaactcaaactctgttttgtcagaatgcgatcaatgatcttcttatacaggttactgctaattctgttcggttagtcagttgcacctcccgggagttagtgaatcaatggaatgcaccagcaggattctcagtcaatgttgcttcagctaatgccagccaggttctgttggcaaccggtggtggccatcttgtttacctggaaattagggatgctaaacttgttgaagtgaagcatgctcagctagaacatgagatttcttgtcttgatttgaacccaattggggagaatccacaatatagttccctagctgctgttgggatgtggacagatataagtgttagaatattttcgcttccagatcttgaattgataaggaaggaaaatttgggtggagaaattgttcctcggtctgttctgctgtgcaccttggagggggtttcgtatttgctttgtgctcttggggatggtcatttgttcagttttctactgaatgcaagtacaggtgaactgactgatagaaagaaggttaccctcgggacccaacccatcagccttcgtaccttctcatcaaagggtaccacccacgtgttcgcttcgtcagataggccaactgtcatctatagcagcaataagaagcttctctacagcaatgtcaatttgaaagaggttaatcatatgtgccctttcaatacagccgcttttccagacagtcttgcaattgctaaagagggtgaactttcaattggaactatcgatgatatacagaagcttcatatccgcacaatcccccttaatgaacaagcacgtcgcatttgtcaccaggagcaatcaaagacactagcattttgcagtttcaagtacaaccagagtgtggaggaaagtgagactcatttaatacgtctgctagatcatcaacgtttgagtccctgtgtgtatatcctctagatcaatatgaatgtggctgctccatcattagctgttcgtttgcggatgataataatgtctattactgtgtgggaactgcatatgttatacctgaagaaaatgaaccaaccaagggccgaatccttgtatttgcagttgaagatggaagtttgcaattaattgtggagaaagaaaccaaaggagcagtttattcgttgaatgcattcaatgggaaattgttggctgctatcaaccagaagattcaattgtataagtggatgtcacgcgaggatggttcacatgagctgcaatctgagtgtggccaccatgggcacatacttgccttgtatactcaaacacgtggtgacttcattgtggttggcgatctgatgaagtcaatttccttgctggtgtataagcatgaggaaagcgcgatcgaagagcgtgctagggattacaatgcaaactggatgactgcagttgagatgcttgatgatgaagtctatgttggggcggagaatggctataacttattcaccgtgcgcaagaacagtgatgctgccacagatgacgaaagggccaagcttgaggtcgttggggagtaccatctcggggagtttgtgaacagattccgccatggttcactcgtgatgcgccttccagactcagagatagggaagattcctacggtcatctttggcacaataaacggggtcattggcattatcgcctccctcccgcatgaccattacaccttcctggagaagttccagtccactcttgtcaagtacataaagggagttggaaacatgagccatgagcaatggcggtcgttccataacgacaagaagacagcggaggcacggaacttccttgatggtgacctgatcgagtcgttccttgaccttagccggagcaagatggaggtggtgtccaaggctatgggcgtttcggtggaggatctgtccaagattgtggaagagctgacgaggcttcactagtacatggatacgcagaagctttgcttgtaacttgatgcatgtacatcctctttttgccatctatttttgtgctgtagcagttccatgagctgcctcagcagttgccgcgggccgtgttggcccgaagctgtagcctgccctgctttgttggttgactcggaatactttttgggttgtgccagtttgttgagattgttttttttcttttattctatgttgaatggaaagattagcggtgaatcctgtcaaaaaaaaaaaaaaaaaaaaaaaaaaaaagggcggccgcgagatgaccgaatgactgtcttgtaggacctggttcattccaggcccaattcaatcgggcagggtcagcaacccaaccctttgttt

SEQ ID NO: 258682 - DNA, 666 bp, Zea mays
cttccagactcagagataggtaagaaacatcacgagtgaaccatggcggaatctgttcacaaactctccgagatggtactcattaacgacctcaagcttggccctttcgtcatggttcactcgtgatgcgcctaccagactcagagatagggaagattcctacggtcatctttggcacaataaacggggtcattggcattatcgcctccctcccgcatgaacattacaccttccttgagaagttccagtccactcttgtcaagtacataaagggcgtcggaaacctgagccacgagcaatggcggtccttccataacgacaagaagacggcggaggctcggaacttccttgacggtgacctgatcgagtctttccttgaccttagccggagcaagatggaggaggtgtccaaggcgatgggcgtccccgtggaggagctgtccaagagggtggaagagctaacgaggcttcactagtgtagatggaacatggaagcgttgcttgtaagcaagtagtaacttgttccctgagctgtagcctccgcggctcgcacgatcaaagtgttcggccgtggctgcagtctatccctatgctatatcctatcgtgatttgtttgtttgagctgtgccagtttcttttctttattattaatgcttaatggaagag

SEQ ID NO: 258683 - DNA, 526 bp, Zea mays
gaattcggcacgaggcttcaagtgcggcgaggagggccacatggcaagggactgctcccagggcggcggctacggatggggaggcggcggcggccgcggcagcgagtgctacaactgcggccaggagggccacatctcccgcgactgccccaacaaaaggcgttaggcgcggcgccaccgtcgcgtcggatccggcggagtcccatgtcgcctctcgccgcttccctacccctccaaaggtatcgctcggctgactcttgcgtgaagtcgtcggagcaaactatctatcagtagtactagcagtgtcgtttcgttttggtctgtcgtggcgtggtagtaagaaatgcaagtgagcagcaccagtatctttccgtttgaatcagttgtaaggcagtcatggtcatggttggctctgccggatctatctgtcatgaactatctatattatatcattatcaatgttatgcaatgagtctttggcattgaaaaaaaaaaaaaaaaaaaaaaaaaactcgagggggggccc

SEQ ID NO: 258684 - DNA, 1462 bp, Zea mays
cttgtttctccggacgcgctcgttcgttcgcgaaggcgccccttcctgccctcgcatccgctcctccctccccgacaccgaccgacccctcgtccgctcgcctccctccccgatccccaccgccatggccgccgccgccgccgccgcgtcctcctcttcctcctccgaggttccgatcgccgcccgcacctgcgtctccgtcggcgaggtggcggtgggcgcggtggctacaggcagcggcgaccgggtggcggcggatgaattcgggacgagcatctgcctcgacaggatagcgctccaggagacggccctcgtcaagggttgcgaccacgcctactgtgtgacctgtattttgaggtgggcatcctacaaggagaaccctctctgcccacagtgcaagcatccattcgaattcctcagcgtgcaccgctctctcgacggctgcctacatgactacctgtttgaggagagtgtttgcctccttctgagggcagcttggtttgaacctctgatcgtagaggctcacgaggaggctctggaagaagaagagtttctccaccagcagtaccaatacgatgatgacgaagatgatcttgacgaggaatcttattacatgaacaggtccccaagcatccgtattggtaacaggagatggggtgacaatgggtacatcaggggaggcaggaaagaggcgaggccagtgaatactgatgtggctgctggtccatccaggactccgaagaagaaagagaaagccgcatcctcttcggcgtcggtgtcagtgtctggttcggggtcaggatcggggtctgtatccaaggatgtcgctggaaggcgggcgaagagggcgcagaagcgagaagctgcagacaaggcagctgcagagaagcacctgaagcacctgcagaggttggggctgagaaaatcgccagagcctgtagtgcccgaggaggttgggccacaggtgaatgagtgacttaagccgccgccgagtgctatatggtgctgctaaaaacactgcagccctttgggccacaaaataatcttccactgtgaagagcttgagcgtggccttgtatcatggcagcttttcgcctcgttgtacatagtctagtttctcatcactgttttagattcagcacagaaatgcagctgccgtctgcacgactgttgcagctatgaagctgtatgtaccttactgttggtgcactattttagttattgctaatcacaggggatgcaatcggcatctgtgttgattaaaaaaaaaaaaaaaaaaaaaaaaaaaaaaaaaaaaaaaaaaaaaaaaaaaaaaaaaaaaaaaaaaaaaaaaaaaaaaaaaaaaaaaaaaaaaaaaaaaaaaaaaaaaaaaaaaaaaaaaaaaaaaaaaactcgagggggggcccacatacccttccatgcaacttcataaccctcttttagggccccctaaattcaatta

SEQ ID NO: 258685 - DNA, 1519 bp, Zea mays
ctacttgccctagaaccctcgccgccgcccctctttaggattcccatgtccctggtcgccccctgacacgcccgccccggatcctgcacccgaattccgcgtggaattccgggccgaaccgcctctctgcgtgcgcctccgaccaccaaactctctctctcacacgcgcgcgcgcgcgcacgtctgaggcggtttgattctccggtgggggttccttggcggccgctctagaactagtggatcccccgggctgcaggtgctgatgggggtgccgaagcagcgctggacgccggaggaagaggccgcgctcaaggccggcgtcgccaagcacgggcccggcaagtggcgcaccatcctccgggactcggacttcagcgcgctcctgcgcctccgctccaatgttgacctcaaggacaagtggcgcaacttgagcgtcaccgcaggaggttacgggtctagagagaaggcaaggatggcgttgaagaaaggcaggcgcgtggtgcctaagcttactgctgagccaatggatgtagatgagaaggatatggacaacgctcatgacacagtcattgatgtggaaccgttagcaatggctttcgagcccttgccttttttggaaagcccagataagtcagttgctaggctcgatgatctcatagtagaagctataaggaagcttaacgagccatctgggtccaataaggcagtcatttctggatatattgaggaccaatactggccgcctgctgattttcaatacctgctatctacaaaattgaagtcattggttaattctggaaaattaatcaaggtaaaccaaaagtacagaattgcaccaagttcttccttgggcggaataagcactaaggtatcctcttctgaagggatgaacacagaaaataataatgttaaacggctaactaagcctcaagtggttgctgaactggagaagatgaaaggcatgaccagggaagaggctgctgcctttgctgccaaggcagttgccgaggcagaagtagcaatggcagaagctgaggaagcagcaagagttgcagaggctgcagaaaatgatgctgaagctgcaaaggcttttcttgatgctgtcattttgtcaatgagaaacaggaacgctgcttccatgatacttcgagcttgctgatcctttacccatgcagcacaccgatgttctgctgcaaagattttctggatagacgagtttcttgtatagccttatagatcatggcgggttttcaacagcttgctgttgtcctgtgctgtgcagccaatcgacaacatgataacaagaatgatcgagaaagtagtcttcatttttttttgtttcccattgtgttgctttgtaattaaactatagccttttcccttcattagttgatgaagtgatgtcgtctaatagaacaactgtagtgaaaagaaaatgtcaaaaaaaaaaaaaaaaaaaaaactcgagggggggccgaatttttgcagaaatgattatatggtggcagcgtttaagttt

SEQ ID NO: 258686 - DNA, 517 bp, Zea mays
ctcccacccaacaacaaaacaagcctaatggcttcctctccatctcacgccactgcggttgcctacttgccctataaccctcgccgccgcccctctttaggattcccatgtccctggtcgccccctgacacgcccgccccggatcctgcacccgaattccgcgtggaattccgggccgaaccgcctctctgcgtgcgcctccgaccaccaaactctctctctcacacgcgcgcgcgcgcgcacgtctgaggcggttggattctccggtgggggtcccttggtctcgaactctcgatttgctgctgatgggggtgccgaagcagcgctggacgccggaggaagaggccgcgctcaaggccggcgtcgccaagcacgggcccggcaagtggcgcaccatcctccgggactcggacttcagcgcgctcctgcgcctccgctccaatgttgacctcaaggacaagtggcgcaacttgagcgtcaccgcatgaggttacgggtctagagagaaagcaaggat

SEQ ID NO: 258687 - DNA, 1025 bp, Zea mays
cccacgcgtccgggaggttctcaatttgggctgacaagctacccctggcaatgcactgatgaacctgaggtacagagatgagcgggcagcacccatcactggaaaagaagttagaacaggtttggaaggacctgggctttctgtttctcaaaagatattttattgtattagctttgttggtggccaatatgtatggtcacgattacaatctttttctgctttccgtcgatggggcgattctgaacagagaccactagctcgccgtgcttgggcgttgatgcggaatgctgaagtattttatagggctgcttcattctttaacctattattgtttctttatggtggaaggtacaaaactgttgtagaaaggattctgaaggcaagacttgtttatgggagccccaacatgaatagagctgttagttttgagtacatgaatcggcagctggtctggaatgagttttcggaaatgttgcttttgcttcttcccctcctaaactcgtcttcggtaaagaagttccttctccccttctccaaagataagtcaggaggttcttctggtgatgaagcagattgtcctatatgtcggtccagtcctagcattccatttattgctcttccatgtcaacacaggtattgctactattgcctacgcacacgttgttcggctacgacttcttacagatgcacacgttgtgacggggcggtggttgcaattcaaagactaggatcaggttagttttacgacctagttgggttaaagaattctcgcccgtttctacagagaatcagcacttcggtgtttcatacggttacaagtttggatacgcgtcattcactgtatgtacatgtaattgccccaagtgtggacagttcggatgccatgagcccataactgacttgttgtatatcgaatgaatagtccgtcacaaaactaacacggattcactatgcgttttcttttcgattcgtctatttcagaaatcgtgaaatgaaaatgccaaacaattattggaagaccacta

SEQ ID NO: 258688 - DNA, 1228 bp, Zea mays
gaattcggctcgagctctgtaaccaagtacattcagctggcatgattgacactgttccgggtccagctagtgatgatgatgttgatgctggaggtggaagatcctaccctggggatgatgctaatgatgatgatttggactcgaaacgcaggaaaatggaatctactggtatcgacgccgctttgatgggtaaaccaaatcgtgagcctcgtgttgttgtacaaactgttagtgaagttgatatcttggacgatgggtatcgttggcgcaaatatgggcagaaagtagtgaaaggaaatcccaacccacggagttactacaagtgcacaaatacaggatgcccggtcaggaagcatgttgagagagcatcacatgacccgaagtcggtgatcacaacatatgaaggaaaacataaccatgaagtccctgtttccaggaatgcaagccatgagatgtccacagctcccatgaagcctgctgtgcatcctattaacagcaacatgccaggccttggtggcatgatgagagcatgtgatgccagggccttcaccaatcaatattctcaggcagctgaaagtgacaccatcagtcttgaccttggtgtaggcatcagccctacccacagcgatgcaacaaaccaaatgcagccttcagttccagaatctatgcagtatcaaatgcaacacatggctcctgtatatggtagcatgggacttccaggaatgcctgtgacagcagtacctggaaattcggctagcagcatatacggttctagagaagaaaacggaaatgaagggtttactttcaaagccgcaccattggaccgatcaactaacttatgttacagtagtgctggtaacttagtgatgggtccatgagtgtctctgctgatggtcatacctccatgaagcacatattaccgtaatcatgaagattgcttcagaaggtgctctactgtgtatcgtcatccacacataattgaatcggaggtggtcaaggtatacctgggagctgcagcgttgacacatgagccttttgctgtttggatgtacacttgctgtatgtgacgctgcagctcaacattcgttgtacagcaaaccagttatgattaattagattcttgataatttggttatgtaaaaaaaaaaaaaaaaaaaaaaaaaaaaaaaaaaaaaaaaaaaaaaaaaaaaaaaaaaaaaaaaaaaaaaaaaaaaaaaagggcggccgc

SEQ ID NO: 258689 - DNA, 1187 bp, Zea mays
tcactatgccctaagggttttctcctgccaattgctaatgctgtactccacaactgtgtggctaggaaaatggaatctgctggtatcgatgccgctttgatgggtaaaccaaatcgtgagcctcgtgttgttgtacaaactgttagtgaagttgatatcttggacgatgggtatcgttggcgcaaatatgggcagaagtagtgaaaggaaatcccaacccacggagttactacaagtgcacaaatacaggatgcccggtcaggaagcatgttgagagagcatcacatgacccgaagtcagtgatcacaacatatgaaggagggcataaccatgaagtgcctgcttccaggaatgcaagccatgagatgtctgcagctcccatgaagccggtggtgcatcctattaacagcagcatgccaggctttggtggcatgatgagaaccatgcgatgccagggccttcaacaatcaatattctcaggcagccgaaagtgacaccatcagtcttgaccttggtgtaggtatcagccctaaccacagcgatgcaacaaaccagatgcagccctcagttccagaacctatgcagtatcagatgcgacacatggctcctgtgtacggtagcatgggacttccaggaatgcctgtgccagcaatacctggcagcatgtacggttccagagaagaaaaaggaaacgaagggtttactttcaaagctgcacctttggaccgatcagctaacttatgttacagtagtgctggtaacttagtgatgggtccatgagtgcctcttctgatggctatacctccatgaatcacacctatcaccgtcgtcatgaagttctcttcagaagatgctcctctacttcgtatcgtccgcacataattggaggcggtcaaggtatacctgggagctgcagcgatggcacatgatgtcttttgctgtgtggatgaactcgctgtatgtgacgctgcagctaaacattcgttgtacagcaaaccagttatgattaattagattatgataatttggttatgtaaacttctttctggacagaaccgaagagccatctggtggcaaagctttgttatctcctgcatatgaacgatgccagtttgccattcatatgaaatgaaatatatcatttcacaagtgcggtttcttcaaaaaaaaaaaaaaaaggcggccgc

SEQ ID NO: 258690 - DNA, 480 bp, Zea mays
cggatcgattggtttactttcaaagccgcaccatgggacggtttaaataacttatgcggtgggtttgctgaaaacttagtgatgggtccatgagtgtctctgctgatggtcatacctccatgaagcacatattaccgtaatcatgaagattgcttcagaaggggctctactgtgtatcgtcatccacacataattgaatcggaggtggtcaaggtatacctgggagctgcagcgttgacacatgagccttttgctggtcggatggacccttgctgtatgtgacgctgcagctcaacattcgttggacagcaaaccagttatgattaattagattctgataatttgggtagggaaacttctttctgcactggaatatgggatagaaccaaagatccgtctggtggcaaagctttgttatgccctgcatatgaacgatgccagtttgatatccatatgaaatgaaatatatcttttcggccc

SEQ ID NO: 258691 - DNA, 1168 bp, Zea mays
gaattcggctcgagtttgtattggagcatccaaccatttctcgattccatgctgttttgcagttcagaaatgatgggaaggttttcctttttgatcttggaagcacacatggatcctttatcaataaaaatctgatcaagaagaagctgtacacagagattcatgttggagatgtaattcgatttgggcagtaaatcatcacggctgtacatttttcaaggaccatctgagctaatgcctccagaaaaagacttgcagaagcttcgggatgctagaattcagcaagacatgcttgatcgtgaagcttccattttacgtgcaaaaactcaagcagctttggcagagggaatctcatggggtatgacagatgatgcaatagaagagtctgcagaggatgatgcagatgaaattacttggcaaacctacaaaggtcagcttactgatagacaagagaaaactcgtagcaagatagtaaaacgaatggagaagattgccaacatgaaaaaagaaattgatgcaataagagttaaggacatttctcaaggtgggctaacccaaggtcaacaaacacaaattgcacgaaatgaacaacggatgtctcagattatggaggagctagataatctagaagaaactttaaatgacagtatacgggaaagtattggtgctcgttctggaaaggcaaagcgtggcagctataaagcaagtctcgaggaagaagatgacgttcttagtgacgatgatgaattttatgatcgaacgaagaagaaatctactcagaaatcaagtgagcaacaatcggttgagactgctgacagccttcttgagaaaaaagatttcatcaccaatgatattgaaagtaaaacaaaattgctggaagaagagaagcataagctgtctcagagtgatacaccagatctcagggatgaccttgatgcttatatgagtggcttgtcatctcaattagtacatgataagattgcccgaattcagaaggagctctctgatcttcaggatgagctggacagagtagtgtacctactgaaaatagctgaccctacgggagaagcagctcgtaagagggatctaaagccaagagaagcgaaacctccaacatctaatgataatccaagactagaatcaaaaaaaaaaaaaaaagggcggccgc

SEQ ID NO: 258692 - DNA, 1523 bp, Zea mays
gaattcggctcgagggcacacagccgccgtttcttttacttgcgctcggcacgcaggcgacggctgcggcgctcaggttggggttctcatcgacggcgtcagcggcttcccctcccgcctctcgccagtcgcttcgcgccctcgcctccggtcctccgcacactggccggtgaccctgcatagtattatctgattttcctggaggccacattttaaggactgaggttacaatggcagatgccagccctagaacagaaacatcaacagatgatactgacgacaataacgggcttgaaccaggcagaggtggtcttgttgcttctgactccagtgacagatccaaagacaaacatggagatcaaaagacattgcgtcgccttgctcaaaatcgtgaggctgcaaggaagagccgactaaggaagaaggcatatgttcaacagttggagaatagcaggctaaaacttacccaactagagcaagagctgcaaagagctcgtcagcagggcatttttatatctagttcagttgatcagtcacactccatgagtggaaatggggcattggcctttgatatggagtatgcgaggtggttggaagagcacaatcggcaaattagtgaactaagggctggtgtcagtgctcatgcaagtgatactgatcttcgaagtgttgttgataagatcatgtcacactatgatgagatttttaggctcaaaggcaatgcagccaaggcagatgtttttcacgtcttatctggcatgtggaagacaccggcggagaggtgttttttgtggctaggaggtttccgaccatctgaggttttaaagcttctttcgacacaacttgaacctctcaccgaacagcagctgtcagggataagcaaccttcagcaatcttcacagcaggctgaggatgctctttcacaaggaatggaggcccttcagcaatcattggccgaaaccttggctgggtctctttcgtcttctggatcaacaggaaatgtggcaaactacatgggtcaaatggccatggctatgggaaaacttggaacgcttgagaatttccttcgtcaggctgacaacctgcggctgcagactctacaacagatgcaaaggatcctgaccactagacagtcagctcgggcgctacttgtgataagtgattactcttcacgtctccgtgccctaagctctctctggcttgctcggcccaaggaatagcaagaacatgctatttgactgcaatacttttcacaatttggttttcaatggtcaggagatttgacaaggctgcgacagacttgattcggacatatctgcacatactatgacccaaatggaaggggatgttcatgtagcttaggctgcttagctttgtagttaagtgttgttgatgtatcattaccaactgctgtaaaattctcactctgtatgcccctgatttgcagcgaaccattagaatgcacattgatgttcacctgtcaaaaaaaaaaaaaaaaaaaaaaaaagggcggccgcacataa

SEQ ID NO: 258693 - DNA, 1092 bp, Zea mays
gaattcggctcgaggagccgcacggagtggacggcgatgctacggccgcggctgagcgcgacgacgtggacgccggggcgtacgacgaggaggaggacgaagaagaggagctcgcagggtcccgcggcggcctcggggagaagaagcggcggctggcagcggatcaggtgcgcgcgctggagcggagcttcgaggtagacaacaagctggacccggagcgcaaggcccggatcgcgcgcgacctcagcctccacccgcgccaggtcgccgtctggtttcagaaccgccgcgcgcgctggaagaccaagcagatcgagcgcgacttcgccgcgctccgcgtgcgccacgacgcactccgcgtcgagtgcgacgcgctccgccgcgacaaagacgccctcgccgccgagataaaggagctgaggggcatggtggaaaagcagatggaggtgaagctggagtccgcggcggaggagctgctgccggtggcgacgaggtcagcagcagcagccgctgtgtataacaaggacgggtcgacggacagcgactcgagcgccgtgttcaacgaggaggcgtcgccctacccttactccggcgcggccttagaccatcagcagcagcaagaaaccagccacccgctgggcttcacgggtttcacctccttcttgacgtcctctttcccttccgtataccatggggattcgcatttggaccaggaagcggacggcttcttcagcgccgccgccgccggcgacggattcttcgccgaggagcagagcgcaggcatcggcagctggtacggcggtgagggttggtagaacagcaacagctaagctgttggctgcctggaggctggagatcactcttggtatcgtatctaccattcttgtaaaatatggcgctgtacattatattatgcatgcatgggtccgggacgcggtaactatatactactatgtagagttaatttatatggagtagttaatttctgtatttttcactggcgggctgaaagcctgaaacacgggctacgagaggagataggccgggtaatacggttattgttctataaaaaaaaaaaaaaagggcggccgc

SEQ ID NO: 258694 - DNA, 1333 bp, Zea mays
gtcgacccacgcgtccgactagttctagatcgcgagcggcccccttttttttttttttttcccgatctctatccttgtcctccctgtcccgatctctatccttttctttatcctcagttttaacagccctcgtgcttggccttttgttgaagacaccggcaagaaatccatctatattttcacaatgctccaagaattcgttaaacccttccataagatctggataatgttggagtatatcattcaccaagttcttcagttcacttcttgtgataatctcttggctatagatgtgtagacatttcaaaaactcttggtaagcttcatgctccagcttttccttcaccttctcgcagaaatggaactcatgtgtgtatacactcttcagcgcatccttatcgtcatatgatgaagcagatacactgtggattccatgattctcactggggcctccttggtgtgtctcagcacctacattatcctcgatattccttgaaaaaggctttcgcttacgctgtcctagctccaggtctctgctgtcatgttcaccatccttgtcttctctctcataatcccttctgtccctttccaccttccgttctttgtctttatcaagacgtcttctctggcgatcatgctccacatcaggacggtcaacactaaaatcacggtcagcatgtgacaggtaaactctgtccctcttatcattgtgaaggatcttatttgcaggaggcactaaagagctcctgtcctcccgcttaaccaaaccaccctttgaggccactgcttgtggagccactgaagtatcaggcaggaagtgctggaactcttcaagcaaatctttatggtctttgaacagcatagcaacctcatggtaaacatcttggatagacttattatccttgcggtacatgttgaggatgtccaagaatgccttgtaaacttgttcatcatgctgaaaccgattctttatcttgttcacgaaattgatagcttccacaaaatcgacaggtttcttctcttcttgtagcttgatcgcatagcccttaggcaagaaggcgttgaacccaaggatcagttcagggtacccgttgaacagcgttttgacacggacaatcactccattggtgtcaatcctctcgctcttgaagtcgcgcatgacctcgaggaactcctcgtacttctcccgtttgtcctgaaacttatccttaactgccttaaggtagacgagcgcatcatttgtcgtcagcttctggttggtaaaggccgcaccggacggctgctgcggctgcgccggcggagcagcgccagcctgaggcggcggtgcggccgc

SEQ ID NO: 258695 - DNA, 1772 bp, Zea mays
gtcgacccacgcgtccgccacgcgtccgtgttctcgtgcatgattgctaaggccacagtcctagaggaggtgacatctggcattgcaggaagtaggaatggtgcgctgctgctgatgaaggctgagctacaggtgctctcacctctagtgcccatcagggaggtcacatttctcaggttttgcaagcagctggctgagggtgcatgggcagtagtggatgtgtccattgacggattggtgagagatcacaactctggaacagcatccaacgccggaaatatacggtgcaggaggttgccttctggctgtgtgatgcaggacactcccaatggctactgcaaggtcacatgggtagagtatacggaatacgacgaggcgtcagtacaccagctctatagaccactcatccggtccgggctggcctttggggccaggcggtggcttgcaatgctgcagcgccagtgcgaatgcctggccatactcatgtcccctgatacagtttcagctaatgactcgtcagtcataacacaggagggcaagcgaagcatgctgaagctggcacggcggatgacggagaacttctgcgccggggtcagcgcgtcatctgcacgtgaatggagtaagctggacggcgctgcaggcagcatcggggaggatgtgcgggtcatggcacggaaaagcgtggacgagcctggggagccgccgggcgtggtcctaagcgcagccacatcggtgtgggtgcccgtggctccggagaagctcttcaacttcctccgtgacgagcagctgcgtgcggagtgggacatcctcagcaacggaggcccgatgcaggagatggccaacatcgccaaggggcaggagcacgggaactcggtgtccctcctcagagccagtgccatgagtgccaaccagagcagcatgctgatcctccaggagacttgcactgatgcatcaggctcgatggtcgtgtatgctccagtggacatcccggcgatgcagctcgtcatgaacggcggggactccacctacgttgctctgctgccgtctgggttcgccatcctgcctgatggcccaagcagtgtcggcgccgagcacaagacaggcggctcgctgctcaccgtcgccttccagatcctcgtcaacagccagccgaccgccaaactcaccgtggagtcagtagagaccgtgaacaacctcatattctgcaccatcaagaagatcaagacagcgctgcagtgtgacgcttgactgtcgcgtgtcgccgcaggggggggtggtcggtgatgacgagcctgagtcaagaacgaacctcgtgcgggaaagaaacctttgctaggtgataaggatccagcttggacgggtctttagcacggagcaatggtggtggttcgggtattgactcggtctctgtcatctgcttcttctccatggaccatggcaacctgttgtctgatacgggatcttgaatagtgcgtggacaatgatgtggttagatggttaaaatcttttgtttcagtcccatcgtttcatcagggaatcaaactttgagttttggccgcctcgttgttagttgtaatatacagttcattttatattgtgaggtaagctatatgccatgtgtaaacatgagagctcaggaatgttgggtagcatcatgagtgtagctaggcatcgaactatcggccaataaaatgtctgatcgataaagtggtatagttgtttacctggaaatgcttatttagctaaaaaaaaaaaaaaaaaagggcggccgc

SEQ ID NO: 258696 - DNA, 1453 bp, Zea mays
gaattcggctcgaggctattccccatctccggaccagcgccgcctccagtcgctgtccacgggcaccccgggcgcgcctcctccgagcccagactcgagctccatcccgccgtggatcaccgcgtgaggtggggcgcaccgaccggaccccggagggccagatggtgtccggcgccggagggggcgagtagcgcggtcggcggccacgaacggattggcggcggcgcggcgaggcgtcggtcggagcgggggccaccatgtctgctgtagtgtgcggcaagaggtcctcctccatcttcggcgacgagcttgtaccttccccttcctcccctccgtccccttcccaccaccatcaccccgccaagagggcccgctgctccccgtcccgctggagggagggtctactccaccacctcctcaccctcttccccgacatggatccccagttacttgaaaaagctcttgaggcctctggagatgacttggactctgcaataaagagattaaacgagctgcgactggagtcagctggggctatcctatctgccactgtttgtgaatctgagaaggacatatcatcagctcataacttattggctgaaggtaccaccagtaatggccatttagacatagctactgaaaatccacctgcaattgataactctcagacaagtcatcatagctctgaatgggttgacctatttgtcaaagagatgatgagctcctctgacatagatgatgcgcgagctcgtgcatccagggctttggaggtgtttgaaaagtccatcatggatcgagttggacctgaagcagtgcagaatttgcatagggaaaatgtgatgctaaaggagcaacttgcaataattctccgagagaatgctgttctgaagcggggcgttgcgatacaacacgaacgccaaaaagagtttgatgtgaggactcaggaagtcgacagccttaaacagttggtactgcaatatcaggagcagataaaaactcttgagataaataattacgcacttagagtgcatttgaagcaggctcagcagggcaattctatgcatggacgtttcccgcctgacgtcttctaatgtctgccatggctcaacagaataattatgcatggacgttcgttaatatttgatgctgtacagttggattttgaactaagcagtgtcaaataaaaaaaatcgaggtagtacctattaagataagtagactcaggacctcaagttcgactcaaatgctgcatatacgatcgtaccccatcattggagtcgacaacactaaggtccaactacctggaagctgagatgaaatagcatgttagggttggcagtgcactggtccttgcatacttgttgtaataatggatcttgcaggggaagctcggatgaagtaatattggctgtatgaaaaaaaaaaaaaaagggcggccgctatcgtaagctta

SEQ ID NO: 258697 - DNA, 1634 bp, Zea mays
atccatccccacacggccctcgccaaatctactcctccagtcggcaggaaaggaacccctctctacctcggaggctcggacagagtgaacgcgccacccgccccggcgagcattgtccgctgccgcgcgccaccttccgctcacgggtgcatttgatccgtcccggccgcctacacgatgtccaagtcgggagcgctggatcttgcttctggcctcggagggaagatcaacaaggtggaagtcaagtcggccgtcgatgagtatgagaaatatcatggatactatggagggaaggaggaagcaaggaagtccaactatactgatatggttaataaatactatgatcttgccactagcttctatgagtatggttggggtgaatccttccactttgctcacagatggaatggagaatccttacgtgaaagcatcaagcgacatgagcattttcttgccctgcaacttggtttgaaaccaggaatgaaggttttagatgtgggctgtggaataggtggaccactgagagaaattgcaagatttagctcaacttcagttaccggattgaataacaacgaataccagataaccaggggaaaggagctcaaccgtttagcaggaattagtggaacatgtgattttgtcaaggcggacttcatgaagatgccgttcgatgacaacacttttgatgctgtttacgccattgaggcaacatgtcatgcacctgatccagttggttgctacaaggagatatatcgtgtgttgaagcctggccagtgctttgccgtgtacgagtggtgcattacggatcactatgatcctaacaatgcaacccacaaaaggatcaaggatgaaattgagcttggcaatggcctgccagatatcagaagcactcggcaatgtctccaggcagtaaaagacgccgggtttgaggttgtttgggataaggatcttgctgaagattctcccttgccttggtacttgcccttggatccaagccgattctccctgagtagcttccgtttgacctctgtgggacgcatgattacccgcacaatggtcaaggccctggagtacgttggtcttgctccgcagggcagtgagagggtctctaatttcctggagaaggctgcagaagggctggtagagggcggaaagaaggagatcttcacgccaatgtacttctttcttgttcggaagcctcttctggaatgagctcttggatcaccttttcagagagagaaggcaagtggtcatttcgaagaagccgaggagagggaacctggaatcaagaaaaccttcagctctcctgtgtaggaggaaagttaacgaacagtgtagtaactgttcagctttgtgtttattcagttgttttgctgcttgaggttattcgtttctaggtgggggttggaatccttttcgccataaacctctcagtggcataaataagatggtttgcataagagtacttcatggataccgtaagggctactactgaaagagaaatgtttaagcagcatggtatgtgagcaactagtgataattattccatccttttttttaatataaagcaggagttttgtcaaaaaaaaaaaaaaaaaaaaaaaaaaaaaaaaaaaaaaaaaaagggcggccgc

SEQ ID NO: 258698 - DNA, 514 bp, Zea mays
cccacgcgtccgctccttcctctcccattccactagattaccaccacctccacctcgtcgtctcccaccaccgccgagcgcgagccctagcccgatctagccggcggcaggcaccagatcccgccgcccgcggcgtcccgggacgcgccccgccgaatccgccgctcctcgcactgcaacacgcccggaccacggtgcatttgatccgtcccggccgcctacacgatgtccaagtcgggagcgctggatcttgcttctggcctcggagggaagatcaacaaggtggaagtcaagtcggccgtcgatgagtatgagaaatatcatggatactatggagggaaggaggaagcaaggaagtccaactatactgatatggttaataaatactatgatcttgccactagcttctatgagtatggttgggggtgaatccttccactttgctcacagatggaatggagaatccttacgtgaaagcatcaagcgacatgagcattttcttggcctgcacttg

SEQ ID NO: 258699 - DNA, 1143 bp, Zea mays
gtcaggtcatgtcaggccaggcatcttgggcaacagcaactggcaacagccgggccttttgagcgtgctctctctctctctctctctcccctatccatgctttgtgcctgtttggtgcgcgtccacctttcggggtcaccggcttctgctttcttgctacgccaccgcgcctctcgtctatttatggagtcccccgatccatgaagccggggcaggccgagagttgtcaacgacgacgtctgccggcagtgctcctgctcctcctcctcctttcccggccgccgcgcgagcttggtgggttagtgtctcttcttcgcggagacctgtgagaggagccatcatcatggccgctgttgagactgttgtcctcaaggttgctatgtcatgcgagggttgcgccggggcggtcagaagagtgctctccaagatggaaggagttgaaaccttcgacatagacctcaaggagcagaaggtgacagtcaaaggcaatgtcaagcctgaggacgtcttccagacggtttccaagtcggggaagaggacctcctactgggagggcgaagccacggccccggacgctgcggcggctccagaagccgaagcagctcccggcaccgcggcagaagcgcctcctgctgctgctccggcggcgccagagatcaccccagccaaagctgacgcctgatcgtcacgctattattcactcacatgtgatgctgcggctgcgactcctaaaccttaaatctagaaatagctggggattgggtttgcattgcatcgtgttcttgccggtctagcaagtgactataagaataatggaataaacgatgacccagtgtgtgtatgatttccgttctgaagaacaacacatcccttgcaggattgttgttcagtagattttacttgtaccgcggctttggagttccgcaaaggactttgttcaagaacttcttctctcacaggaaataacatgagtgcagtccgtgcttttatcaaaaaaaaaaaaaaaaaaaaaaaaaaaaaaaaaaaaaaaaaaaaaaaaaaaaaaaaaaaaaaaaaaaaaaaaaaaaaaaaaaaaaaaaaaaaaaaaaaaaaaaaaaaaaaaaaaaaaaaaaaaaaaaaaaaaaaaaaaaaaagggcggccgc

SEQ ID NO: 258700 - DNA, 1067 bp, Zea mays
gtcgacccacgcgtccggtttagttgcaccctggatggttgtgatatgaggttcagtatgaaggcagatatgcaacggcatgttaaggaaatccatgatagtaagaacccccatcaatttgtttgtaaggaggacggctgtaacaaggttttcaggtattcatcaaagctgaagaaacatgaggaatctcatgttaaattggactatgtggaggtagtgtgctgtgagccaggttgcatgaagatgttcagaaatgttgaatatctgagggctcataaccaatcttgccatcagtatgttcagtgtgagatatgtggagaaaagcacctgaagaagaacatcaagcggcatctgcaatcacatgacaaggtgccctctgatggaaggatgaaatgcacttttgatggttgtgaacacttcttttccaacaaatcaaatctgaccaagcatgtcaaggcatgccatgaccagctgaaacctttcaagtgcggaatcgttgggtgtggcaaggcgttcacctacaagcatgtcagggataaccatgagacatctggtgctcatgtatacatggaaggagactttgaagagttggatgagcagttgcgtgcccggccaagaggtggtcggaagaggaaagcattgacggtggaaacactgacacgcaagagggtgaccatctccggcgaggcttcatccttggatgatggagtggagtatcttcgctggttgctatctggtggggatgattcaatggattgtcagtagccggcgtccttttgctatcaccgctgctttgtacatgggttagattatgtaatgtaagttgtttggtagactacgatggtgttcatgacgcgtttgatatattgtcagcagtatggtagtgcagggctcttatagtaaagcttgccatttttgttgtatctttaacccacgtgggtccagatgatgtgtttattcctatgtatttacttatctaaaaaaaaaaaaaaaaaaaaaaaaaaaaaaaaaaaaaaaaaaaaaaaaaaaaaaaaaaaaaaaaaaaaaaaaaaaaaaagggcggccgc

SEQ ID NO: 258701 - DNA, 845 bp, Zea mays
gtcgacccacgcgtccggtgacggtggccggaggtggtgctcactgtgccgtgtgccaggaggcctttgagcctggcgccgccggacgggagatgccgtgcaagcacgtttaccaccaggactgcatccttccctggctctcactccgcaactcctgccccgtctgccgccaagagcttccggctgcagccaccccagatgcggaggcggatgctgggctcaccatgtggcgacttcctcgcggtggatttgccgtggggaggttcgccggcgggcctagagagcagctcccggtcgtctacactgagctggatggtggcttcagtaacggggttgggccgaggcgggtgacatggccagagggagatggccaagtggatggtggtgaaggtcggattcgccgcctacttagaaatctatttggttgttttggtcatggcagccgaccagcaagttcctcccagttcccgtagtggctgaccacagttttccttgtaccattttttcaaattgatagcactgaagaactagggctagtgtaagaatgaaacccagattataatttcttggggcttttgatgtaaatgaaggcctattgtctcattaagaattattaagagatggctatgagcaaacatcttggattgagttttgcaaccaaatttggtcaaacataagtgcaagccttcaagaaaggaatatcaatgaatgttttggggaaacaaatccttggcaataatgtaggtagaaagaacaattggtgtatttgcatccctacaccctactgtttgtgtacatactgaattggttgaacatgaatttccattctgttatatcttatattg

SEQ ID NO: 258702 - DNA, 1323 bp, Zea mays
catgataatgcaaaatagtcgacccacgcgtccgctcaaaaagagaaaaagaaaggaagcaagcgtcagcaaaatggaggacctcttgtccctgaaattgatgattttgatgaagatgaactaaaagaggctagctctatggttgaagaggagattcaataccttcgagtggccatgggtcatgaaaatgaatcttttgaggacttcgtgaaagcacatgatgcatgccaagacgaccttatgttttttcctaccagcaatagctatggtttagctagtgtggctggaaatgctgataagatttctgctttgcaaaatgagtttgaaactgtgaagaagcgaatggatgatgaagctaagaaggcttctcggcttgagcagaagattaagcttctgacacaaggatatcagatacgggctggaaaactgtggtcacaggtccaagatacattcaagcagatggacactgccgcaacagagctcgaatgcttccaagagctgcagaaacaggaacatctcgctgcttcatatcgaatccaaaatttgtctgaagaagtgagtaaacagaaggcactagaaaggaccctccagagccgctacggcgagctggtttctggtttccagaggatccaagaacaggtcgaggagcacaagaggcaactcaaggtacaagaggcggtagaagccgaaagtcacgctcaggaagaggaagctgcggcatcaaatcatgctgctgctgaggaagaggatgaaaggaaggaagatgatgaaaggaaggaagaggatggaaggaagtctctcagctctgaagagaaaccacagcagacaagtacggctaccgatgaagaacctgcaggaagcaaaggaaccaccgaggatcagatggacgtggacagcgggaatggagagggtggagttgtaggccctgtcccaccagcaccagacactgaagggggtaatgatgaagtatcagttcaagagatcagtgaagcccagcccttgccttgaagacggcgctcctttcccttcaagctccgctttcttctcccgcacctggcgatcttcacgatgttgttgttgcacagcaggtccggactgagtatttcctatttggttctatttttagtgcactataatatcgcaagcgaagctacaattggttgtgagctaaatttgcatatccttccctttgttgtattcccttgaacaatgaatcagaacaactgtttaccatttttctaaaggatcgacggcttatgtactcaaaaaaaaaaaaaaaaaaaaaaaaaaaaagggcggccgcccaagtaagcatgacatgct

SEQ ID NO: 258703 - DNA, 272 bp, Zea mays
aagagatcagtgaagcccagcccttgccttgaagacggcgctcctttcccccaccagcaccagacactgaagggggtaatgatgaagtatcagttcaagagatcagtgaagcccagcccttgccttgaagacggcgctcctttcccttcaagctccgctttcttctcccgcacctggcgatcttcacgatgttgttgttgcacagcaggtccggactgagtatttcctatttggttatatttttagtgcactataatatcgcaagcgaacta

SEQ ID NO: 258704 - DNA, 1363 bp, Zea mays
gtcgacccacgcgtccgggagaaaaagctctatgatgaagtgaaggctggtgagattatgaagcttgagtatcagaggaaggttgctttgttaaatagacaaaagaaacacaatgctgccattgaggttcttgagaaaacgaaagctgcggtaacccacttacatactagatacatagttgatatgcaatcaatggattcaactgtgtcagaaattcagtatctccgtgataaccaactgtacccaagactattggatcttactgaccggatggcaaaaatgtgggaggacatgaagatacatcacgcaaatcagctgaaaattgtcctaaatctgaagtctgttgatattcctgattccaatattgaaacaagtgattatcaccacagccacacacggcagctgcgtgatattgtagataagtggatcacaaattttactgacttcatgaactgtcaaaaggaatacataaatgctctctatggctggttgaagttgaaccttatacccatagagagcagcctgaaggagaaagtagcatcgccacctaggatgcagcaacctcctatcaaagcctttctttatgcctggcatgagcacctagccaagctgcctgatgatcttgccaagacagccattgtcacttttcgagcagtcttggataccatattgggtgttcaagatgaggagttgaaacagaaggagatctgtgagcagactcgtagggaatacatacgtaaggcccgggcttttgaggattggtgccacaagcatccacagcccagagcgatcgacgtcgatccagatagcggtgaggggacaggacataaggatgtagtcaccgagaagagattcgcagtggagagcttgaagagcaagcttgacgatgaaattgaatcccataataagctatcaaagcaggtcagggagaagtccctctcgatcctgaaggcacatctcccagagctgttccgtgctctgaccgacttctccgacgcctccttcgaaatgtactcgaagctgaggctgatgtcgttgatgcaggatcagggaaacaactagatggacagtatgttcagaagttaggatcagtaatatccctcccccaagtgttgtaatgcatgtgttctacccctttctgtggtatgtgtaaaaggctagtagctcattggatgaggattcttgtttaatttattggcttgatgaaaccatcgggtactttgtagtgtggacatatgctggatagttagcatgtgatgaactgattacaatctgtgggggtaaaagccgtcgtctatgtaaatgataaattttgttgagataaaaaaaaaaaaaaaaaaaaaaaaaaaaaaagggcggccgc

SEQ ID NO: 258705 - DNA, 1145 bp, Zea mays
cggccgccctttttttttttttttttttttttttttttttttttttttttacagaaacctttgcatggtagtgaaattctataattcagtatcagacagattagacagaaattggttgggtgtgtgtgtgtgtgtttttccgccacaaagtttactgggccttaattaaaagggaataagcagttcgacgaataatacaaggctcacgatacccccctgaagtgattgctgctgacacacaaatgtccggttcagcgacaaaaaagggagatgtccccatcctttgaggcatatgggatcggggacagatcaggtggataggtatccaatcaatcgtctgtcgagatcaaaatgctggcaaagaagtttctttgtaacttttggcacaaatacttttgattcacttgtgatttttggaaaccgagaaacttcagtcaccttgtcaaacaatatgtaagtggggagatgatcccacatggatatcccaaactttgctgcagcatttgggaaatgcccaaggtcaattgttccaaaagagatgttcttgttggagtacgcgatagaaagttcaggcagaatgctgcttgcttgtacacattttgctgaaaatgaagttcggaattctaccagccaaaatcgtgatgttggctctccagttagcagactttcaagttgcaatggggtcaagtgatttgaatggcctaggccatcataaggtggctgttgagctacagcatatataacaagaaatcccagaaagtaggcaaaggccagccaccaatcaataaccaaagtaactgccagcaataaacccttcgcataaagcaacgagtcagcaattactgcttcccaggtttcctctttcacaatcttcactacgaagagcaccaggaacacgagcactgcctggatctccctacggaggaggcggtcgtggagctcccctccgtcgtcggcggagagcgccgcgctgcgggccgcaaagtaagagaagaaggcgaggaggtgcaggaagtagtagggctcagagatggcagcgtctagccacgggaacgggtggctctgccccgccgcgccgccgcttgccgccggcgcagacgcctccgtcgccgtcgcgacctccattttacgagcgacaaggagcc

SEQ ID NO: 258706 - DNA, 1913 bp, Zea mays
catcttttgctccacattgtgtccagggacgagctccaccgagtggcgcagtagcacagcgaaagcgatagacttcatctgcaggtacgccaggtccttgcccaggcacgtccgcggcccgccgttgaacgccacgaagcggtacgcgtccttggccggctcgaaccgggtcccgtcagccgagagccaccgctcaggccggaactcagcgcagtccttcccccagatgctctccattcgtccaaccgagtagatggagtaggtgatcgctgagccggccggcaccacggtgccatcgggcagcacgtcgtcctccaccacgtacttggagtcctgcggcacggacgggtacagccgcagcgtctccgccaatgccgccttcaggtacacgaggcgatccagctcgtcgaagtccagcggctcctcggtccacctcccggtgtcgtcgccccgcgtctccctgagcacggaggcgatctccaggaccaccttccgctcgacgtcgcgccgcagcatgagcatccagaagaaccagctgagcgcgacggacgacgtgtcgcgcccggcgagcacgaagttgagcgcgatccactggagcacgtcctctgggaacgccctgccgttgccgtcgcgcttcttcatgaacctggacagcaggtcgtccgacggcgtcgccttgcgcgccgcgatggcctctgtcatgtactggtccacgatcgcgaggctctcgcggaggttccgctcgctgccgacgccgagcgccttcttgatgcgccacaagaagctggggaacaggaacctctgcatcgtcgcctcggtagcggagtcgaaggcattggcgaaggggttctcctgcaaccccggcgacaatgtctcggggtccttgccgaatgtgaggccgcagatgttgtcgaaggtgagccgcaagagcaggtcctggaggtcgacgctcgccgcggcttcgcagtggtcggcgaggatactccagaggcggtacttgataatgcggttggcccagcgtgccatcgcctggcgcaaggtccgcgtggtgaactcgagcgccgccgtcttgcgctggagcagccacgtctcgccgtcggagttgaagatgccctggccaaggagatcgtggaacgccgcctgccacatggggcccttggggtagttgtcgaaacgcgcgcgcaggatgtgctccaggttccgcgggttgcacgtgacggtcaccagcccctggcgctgcgcgaggaacggcagcggcaggatgcacgtctggtacgtggccgattcccccgtggagcgcaggttgtcgacaatccagtcgtggacgcgcgcccggttcaggacgacgccgggcaggctgccgacgaggggccacatccgcggcccggacagccgccgcgtcagcgcccagaaccacaccatgtacgccgagaccaatgccgctgccgccgcggcgacggcgtaggggtgcgagtgcagcacaccggcatccagtaccgtggccatgccggtgcgttttaagcttgtaatcgcaactggttgtaacagcactgtggcgatataattaggagggctgggtttaggcgctgcgattaagaaatggcgctgttcttggtgagttgggaaatgtgtttggcgccctcgtgtatatatatgtcctctgcacacgagccgtgtggagtggctttcctctgcgcccatgtttaagtgtgggtttagtctcgcaggattttgaattcatcaaggacaaatagaattcgttgctcttgtccatacttcttgccttcttgcccattctgcctaacaagaataggtaatgttcctcacttcagtgaacgtgctggtagtgactaatctaactgggttggtgccatttgtttcaagagtgtaacagaaagcaaggagcgctgcag

SEQ ID NO: 258707 - DNA, 1335 bp, Zea mays
ggaaagggcattggggggggccttttttctattttcccaccttgcaaaaaggggatttttttcaaagctattaaatttggtaacccccgggtttttcccattcccccgttgttaaaacccggccaatgaatttaattttgggggccccaaaaaaaaagtttttccttgcaagcccccggaagtaaacttgggtcccttaaaagggcccccccctttttttttttttttttttttttttttttttttttttattttttttttttttttttttttttttttttttttttttttttttttttttttttttttttttttttttttttatgccgcggccgcccttttttttttttttttaacaaataacctcgcaataacacatagcagatgtcatcaattgttacatggacaacagtcatttttttctaaacagatataaacaatacaatacacatagagaagtaaatgcagcggtctagcagacaaatgcccctggggcaccaatgacctaatttgataacttaaaccccattgtgatggcagcaaccatgaaaaggggaaacaatggatgtgataacacatacatgatgatgactacaggtggacgcagatgccgtgccactacaaaactgaccaactgatgatgactacaagtggacgcagatgccgtgccgctacaaaactgaccaactcaggaggagctctggcgaccacagccgctagccttggtcccacttctcatgttctgcctggcagcacctgaaggccaactcacggtgaaatgttcgggttagagcaccaaaccctctgaggctggctagatgtcctgccttgaccttcttcccctgcacttctgcatcaagtttcgcgttcatacagtatcagaacgttcacctcatgtcgtaacatgtgggcaaggagcacagtgagttgtaaatttgcacagctttgggccgcctggatgcatgtcctctggtacactggtagaagagatctatcaggtgtctcaatttatctgcatgagcatcagatgtgatccctaacttgagtctcgtagctggctcatccattgtccagaatgcttctagttcctgagttagccttggcctctgtttcttcctcagtatcagatcatatatttcagtgtcagaaagtccctggtaaggcatctgaagcgtaagcatctccaataaaaaacatccaaatgaccagatatctatttccagtccatagtggtgtttttcatgcatggccttaacaacctctggagccatccaacaaggtgttccaacacaaacatcaggtgggtgtgtaccaagctgagctcgagccgaattc

SEQ ID NO: 258708 - DNA, 2070 bp, Zea mays
cggacgcgtgggcggacgcgtgggccgccgccggggagcgagcacccggcgtcgggcgacggtggcgccatgggtggctgccactccgccatcgcggccaccaagctgaagattctgcgccgcggaggccggggtgccgctgccgtcctccccgtcaccaaccacgacggcccgtgctgctcctccgaccacggcagcaaggagaagaagaagaaaaagaagggcgccaggaagggcaggaaacgcgcctccatcctgggcgacgccggcaccttcgacccggacttctcgcggcggtaccggctcggcgcggagctcgggcgcggcgagttcggcgtcacgaggcggtgcgaggacgccgccacgggggaggccctggcgtgcaagacgatccggcggaagcggctgctcctgcgcctcgccgggcccgacgcgaccgacgtgcagcgcgaggtggagatcacgcggcgcatgtcggaggtgagcgggggcagggtcgcgtgcctgcgcgaggcgtgcgaggacgacgacggtgtgcacctcgtcatggagctctgcgagggcggcgagctcttcgaccgcatcttcgagcggaagcactactccgagcgcgccgccgccaagctcgcccgcaccatcgtcgaggtcgtgcagctgtgccacgagaacggagtgatgcacagggacctgaagccggagaacttcctgttcgtgaacaagtcggaggagtcacctcttcaagccatcgacttcggcctctccgtgttcttcaagcctggagatcggttcaccgaagtggttggcagcgggtgttacatggctccagaggttctcaagagaagctatgggccagagatagacgtgtggagcgctggtgtcatcctgcacatccttctctgcgggttccctccgttttggggaggctccgatgagaaaattgcacagtcgatactccgtggggtaattaacttacagaaggatccatggcccaaggtctcccagagcgcaaaggatcttgtcacgaggatgcttgacccagatccttgtacacggttgacggcaaagcaagtccttgagcacccttggctcaagaatgctgataaggcttcaaatgtgtcactcggagaggttgttcggtcgaggctgaagcagttgtcgtctatgaacaagcttaagaagaaggcacttggagtcgtcgccatgaatttaccgatggaagagattggcaaattcaaagagatgttccatacaatggacaaaaacaaggacggtagtttgtcacttgaagagctgaaggagggtttccggataaacgatcatcctgttccagaggaagagataaagatgttgttacaagcgggcgatatacatggaactgacacattagattgtgaggaatttgtgacagtcttgcttcacattaaaaagatgagtaatgacgagtatctacctaaagctttcgagttcttcgacaaagacgggaatggttttattgaaatgtccgagttaatggagactctaagtgatggtgaactaaagcctgatgagcaattggttaacgacattattcaagaggttgacaaggataaggatggtcgcatcagttacccagagtttgaattgatgatgaaaagtggatcggactggaggaacgcctctagacgttactcaacagagaatttcagcagcctcagtcaaaaactgtgcaaagatactttatgaaacaagaaagtagtttccaagcagcaattactgactgaagtaccacaccctcaacctcaactaaacagcatcaaagacaacgcaaaagcaggattactggatctggtggaaataagggttgaaggagatcacatataccagttgcatgcttgacaaacttcgtcaactagcaagccctctggcattgtcctttgctctggaagtaaaatttactattccaatagaatacatgacttagacatagacagatgtaaaggatgccccagcatccatgcaatccactaaccaaaatttggcattttactactgtcaaatataaaaaaaaaaaaaaaaaaaagggcggccgcc

SEQ ID NO: 258709 - DNA, 1450 bp, Zea mays
tacaaccatctacactgacgtcctaatataacttacagaaggatccatggcccaaggtctcccagagcgcaaaggatcttgtcacgaggatgcttgacccagatccttgtacacggttgacggcaaagcaagtccttggttagtagccttaagttcaatcttataagtttactgaaaaccaaatagaacgggcaggctgcatccgttcctagaaaaaaaaacaaggtttttcttgaagagcctgttattgccatcattgaagaaaaaaaaccgaaatggtttaatcatgctgcgtatttaaccataagcactttatcgtggaaaaaaacagagcacccttggctcaagaatgctgataaggcttcaaatgtgtcactcggagaggttgttcggtcgaggctgaagcagttgtcgtctatgaacaagcttaagaagaaggcacttggagtaagttgcagataactcgctgttactacccttaattccttcaagcgacaggccgactgatctctctcttttttttttgccaatgattaatgcaggtcgtcgccatgaatttaccgatggaagagattggcaaattcaaagagatgttccatacaatggacaaaaacaaggacggtagtttgtcacttgaagagctgaaggagggtttccggataaacgatcatcctgaaaatctgcgtttgatggaaaaagggggggtagctcacttttcaggatttcccaagaatcatatcagtgaccatttcagcagtgcctagtgccaaagtaagtccacttccttcgtgtccagttgcaatcaaaatatttgagagattaggaataaagtcaataactggctttccatcaggcatgtatggacgatgccctattctgatttgagtattctgatcaatatcaaaagaaacattcttcattgcaggaaaaaactctcctgcacgttcccatatacactgaacaacggatctatcaacctccctcgaaaaacctttgaactcccggctgcttcctagaactaaatttccctttgtatctaaggttgcagtcattgatactgataaagcaccaagctcatcttcactagattctgaagctatgtgtgtgctatttgactttgtaatctgatggtcaacatatccaacctccattagggcatgatttaacttaaccttgtcgaatttctccaacacaagaagatgaccctttcgtggcttgacaggaatatccaacgtcaaagctggttctacgaaactatgcaataaggatcgagtccaggcaccagaagcaattacaaaagcttttctgccatacaatatgtttctggaagtttggacagcttcaacttttccagtaacgtccgatcttattaatgacatggcaggatcattatagaactccctataccttccttctgaggaatacgagttattggtcttctcaatcaaaa

SEQ ID NO: 258710 - DNA, 571 bp, Zea mays
gcggccgccctttttttttttttttttcactgcaaaaccaatacaggcttcattcatttttaataatattacaaaatttgcattacaaaattaacattcaacgaatcagattctgtacatttgaaagtaaacattacccaagccgttttttttgcagcttcggtagatctctatcatacaacattataatcttcttcaagggatttgtaacaaagattcaactatcatgcatatgctgttgaatttcatatgctttcttttaaaaacctttaaaacaaaaatataaaaatgtaccactagacaattaattcacctgggtcctgagagctccatggcttggactaacaacaaagagtcatcagtgagatcagaatacctatctgatgaagaggactcttgtggtttgcactttgttgtgtcaactctttgagaagcttcccatctttctgctagtccatcaccttcaagcatgcgtaccacttccgacattttaggcctatgaccgggaagatattgagtacacaatagagccacttgaaccatttcctcaagctcaattctgtcatagttg

SEQ ID NO: 258711 - DNA, 1436 bp, Zea mays
gccgcggctgctcttagtcgtcgtcgcgatcttcgtgtcgatatctgccgtcgcggcagccgtcataaacgtcaagaactacggggcccatggcaatggtgtcaatgacgacaccaagccactgatggcggcgtggaaggcagcgtgcggatcagccggcgcggcgacgatggtggtgccgccggggacgtactacatcggcccagtgcagttccacggcccctgcaaggcctccaccttgaccttccagctgcaggggacgctcaaggccgccacggacctgaaacggttcggcaacgactggattgagttcgggtgggtgaacgggctcaccgtcgccggtggcgtcattgacggccagggcgccgcctcgtggcctttcaacaagtgtcccattcgcaaggactgcaaagtgctgccaacaagcgtgttgttcgtgaacaaccagaacacggtggtgcgcgacgtcacgtccgtgaaccccaagttcttccacatggcgctgctgtcggtgaagaacatccggatgagcgggctcaagatcagcgcgccctccaacagccccaacacggatggcatccacatcgagcgcagcagcgggatatccatcatggacacgcacatcagcacgggcgacgactgcatctccatcggccagggcaacgacaacgtggacgtggcccgcgtgcagtgcggcccaggccacggcatgagcgtcggcagcttgggtcgctactccggcgagggagacgtcacacgggtgcacgtccgcgacatgaccttcacgggcaccatgaacggcgttcgcatcaagacatgggagaactccccttccaagagcaacgccgcgcacatggtcttcgagaacatggtcatgagggacgtcagaaccccatcatcatcgatcagaagtactgcccctactacaactgcgagcacaagtacgtgtccggggtgactctcaatgacattcacttcaagaacatcaagggcacggcgacgacgccggtggcggtgttgctccggtgcggtgtgccgtgcaggggtctggtgctgcaggacgtggaccttaggtacaaggggcagggtggtacatcggccaagtgcgagaacgccaaggccaagtaccttggctaccagtttcccaaaccctgcccctaggtgccggtgcttgtccggccgtattttagctcatctctgtccactctctggtgtccggtgaagtgggctttgattcttcggtcgtgttctctagacgttttttcttcttctcttctgggttttcctgtttgctttcttgattagctgaatttcgcggtataatgtcagttgcttgtatcagtgaatttgtgaataccagtcattgttgaatatatatatggggaataatgccttgataaaaaaaaaaaaaaaaaaataaaatataaattttaaaa

SEQ ID NO: 258712 - DNA, 1037 bp, Zea mays
ttttgaatcggtaatgagagggcttccttacctagcctagccggtggatcgcacaacagttattggtgctatctgtaaccagagtgccgtgccgcctagcatagcttgcttgagttcaattcaaagcatatattctggtgctgattcatggaggccgggtacatttcagctagtgctggatcaatggcagtcactagaggtataggcaggtagcacacatctgaggctagcttattggcgcttactgtacagtagtacgatacaacaacaggagaaaacgtctagttgtgtggaatatttatattgtaataacgacgacgttctgtgcttgcatgctgcgtgcagttcgctcagcttgtgccagtgccagcctcgcccttgagcaagcgcgagaaccacagcgccgatgctttcgggtgcctggacagcccgttcttgtagtccacgtagactatgccgaacctcttggtgtagcccattgcccactcgaagttgtccaggaacgaccacgcaaagtacccgcggacatcagctccgtccttgatcgcttgcgcaactgaattgaggtaccctttgaagtaaccgaccctcgtcgtgtcgtttaggacctggtcaagcgttgcggattgatcgtcctcttcatccatgccattctcagtaacataaattgctggattattgtacttcttcgctatataagtaagtgacttatgaaggccccaaggaagtctgaaaagccattcagatgcagccctttcaccaattttttcaccaatactccattcatctattcgctccatctgctgcacttggtagaaataaacatcgtctggattctagagatgtgcaatgagtcttgaagtctaatgatttactccaacaaaatcaattgtgttcctcatgaactctttatccttctctgagaaggttggaacatcaatgcccaatcgttgacgcatgctttctgggtaatcaccaacatatagtggatctaggtgccatccaagctgaaagtcaagcctccgctgtgcttcact

SEQ ID NO: 258713 - DNA, 538 bp, Zea mays
acagacaggaagaaatgtgtgtatgtaatgttctgtacttgccgcggactgttccctcagtctatgtgccagctctagctatagctgttttcggcagcctcgcccttgaggaggcgcgagaaccagagggccgatgccttggggtgcctggagagcccgtccttgtaatcgacgtagactatgccgaacctcttggtgtagcccatagcccactcgaagttgtccaggaatcgaccacgcgaagtacccacggacatcagccccgtccctgctcgcctctgcaaccgaattgaggtatcctttgaagtagccgactctcttcgtgtcgtttaggacctggtcaatcgtcgcggactgatcgtcttcatcatccatgccattctcagtaacataaattactggattgttgtatttcttcactatatagttaagtaatttgtgaaggccccaaggaactatgacaagccattcagatgcagccctttcaccaatgctttcaccactactccattttcggacgcgtgggcggacgcgtgat

SEQ ID NO: 258714 - DNA, 779 bp, Zea mays
gaattcggctcgagaactgagtgcagtgttgagcactctgtcattggtatccgctcaaggttagaaccgggagtgcagctcaaggacaccatgatgatgggggcagattactaccagactgaagctgagagattatctgagctgtctgttggaaaagtcccagtcggtgttggagagaacactaaaataaggaactgtatcattgataaaaatgctcgaattggaaagaatgtagtcattatgaactctgagaatgtgcaagaagcagacaggccagctgaaggatattacattcgttctgggataactgtggtgctcaagaatgcagtaattctgaatggtacaaaaatttagaagattatagaattatctgcagaataccaatccctcagtgaagagcacagcattgaagcccacagcagagttctacgacgcagatgcagtcaataaaaaccccaatagcacaaaagattaggagactgtcgatgcagctaaagaagtgtggatataggcatggagcacctgcacctgcaacacgccaacggtacggacaaaccatgagcttgaggccatttcacgtcctttcataagcctcggctagtgccggcgcgcgcagggtatcttttgttccttttttctagcagtaatttacgtgaagtgtctgtacatgtagagggagagatagggtagtacgagagagcatgttatagtacctactcttattatttgtttatttatcgttgtgccgaagaaaaaaaaaaaaaaaaaagggcggccgc

SEQ ID NO: 258715 - DNA, 600 bp, Zea mays
gcggccgcccttttttttttttttttttcaaacgaagctttaacttcatttatatttctcgaatcttttagagagcgagcattacatggagtacgtacataatactactgtgaaggatgtcaccatcacccataggcatgacaaggtacgaagcatgaacgaatacaaaagtaagtgatagaaccataggagacgtatgctgcatgctgacgtatcaatggtgatcaccgatgccgccgccgcccccaccgccgccaccaccaccgaacccgctgcctttgccaaacccaaagccaaatcctttgccaaacccaccgccgccgccgccaccacctccgccgccgccgccaccaagaccaccacccttgccgaatccggcacccatgccatgcccacttccaccgccaaggccatcgccgccgccaagaccaccacccttgccgaatccggcacccatgccatgtccacttccaccaccaaggcccccgccgccaccagcaccgtagccactaccgccgccaagaccaccaccgcctttgccgaatccaccacccatgtcatgcccaattccaccacctttgccatgctcgagccgaattc

SEQ ID NO: 258716 - DNA, 747 bp, Zea mays
cccacgcgtccgacaacctcttgaagctcgcggactttggactggcgagggcgttcggcgtccctgtccggacgttcactcatgaggtggtgacgctttggtatagagcgcccgaaatccttctcggtgcaaggcattattccacccctgttgatgtgtggtcagttggttgcattttcgctgaaatggtgaaccagaaggcgctttttcctggcgactctgagatcgatgagctgtttaagattttcagaattttgggcactccaactaaagaaacatggccaggcgttgcttcgttgcccgattacaagtcaactttcccaaagtggccacctgtggatcttgcaacggtggtcccgacactcgaaccgtcgggaatcgatctcctatctaagatgctgcgtctagatcccagcaagaggatcaccgcccgcgccgccctcgagcacgactacttcagggacctcgagcacgcctagcaggatatggatggatggatgaaccgtttcccctcccctgctccctctgtaaattacggtagcagccgcgatgcttggggccggcgagtacccccgtctgggcggccgttgagttatgtgtgttactctatagtatgactaagctggagtgcctcatgtccaccatgcagtgcagcttttttctccgacttttttttgctgcgtagagaaatgagatgagaaatgtgatccagagatcctaaaaaaaaaaaaaaaagggcggccgccg

SEQ ID NO: 258717 - DNA, 1888 bp, Zea mays
ggaggagaattcggctcgaggtgctgtcatccaaggtgtacgacgtggcaatcgagtcaccgctgcagctcgcctccaagctctcccaccgcctcggggtcaacctctggatcaagcgcgaggacctgcagccggtgttctcattcaaattgcggggagcatacaacatgatggcaaagctctcccgtgagcagttagagaggggcgtcatctgctcctctgctggaaaccatgcccagggcgttgctctttctgctcagagactgggttgtgatgctgtcatcgtcatgcccgtgacgacaccagaaatcaagtggaaatcagtggagcggttgggcgcaacggtggtccttgagggggactcatatgatgaagctcagtcatacgcaaaattacgatgtcagcaagaagaccgcacattcatacctccctttgaccatcctgatgtcatcactgggcaaggaactgtcggcatggaaattgttcggcaactgcaaggtccactgcatgcaatatttgtacctgttggaggcggtggattaattgctggaattgctgcctatgtaaaacgggttcgcccagaggtgaaaataattggagtggaaccctccgatgcaaatgcaatggcattatccttgtatcatggtaagagggtcatgttggagcatgttggtgggtttgctgatggtgttgctgtcaaagctgtaggggaggaaacatttcgcctgtgcagagagcttgtagatggcattgttatggtcagtcgagacgctatttgtgcttcgataaaggatatgtttgaggagaaaagaagtatccttgaacctgccggtgcccttgcattggctggggctgaagcctactgcaaatactataacttgaaaggagatactgtggttgcaataactagtggggcaaatatgaactttgaccgacttagacttgtaactgagctagcagatgttggccgaaaacgggaagcagtgttagctacatttctgcccgaggagcacggaagcttcaaaaaattcacagaattggttggcaggatgaatattactgaatttaaatacagatatgattttaatgcaaaggatgcccttgttctttacagtgttggcatttacactgacaatgagcttggagcaatggtggatcgcatggaatcggcgaaactgaagactgttaatcttactgataatgatttagcaaaggaccaccttagatactttattggaggtagatcagaaataaaagatgaacttgtttaccggttcatttttccagaaaggcctggtgcccttatgaaatttttggatgcattcagccctcgttggaacatcagtcttttccattaccgtgcacagggtgaaactggagcaaatgtattagttggtatacaagtgccgccagtggacttcgatgaattcaagagtcatgctgataatctcgggtacgagtacatgtcagagaacaacaatgagatatacaggttgctgttgcgtgacccagaggtctagtataataggtgccgatgggttcctttgctcctatagtttggtgtcacttttgaagtataaggttccactccaaggtagaaggtgcaagtttcttcttcagttggaatgcagtcattgccaaatataccttcaatgtgccatctcaccatctgtttactcagttagatcatgtagtgtatcagtcgtgtatttttattgttgtgcttcgtgaactcacttatccgtttgcggcacctagagtgtgtcaaataatgataactaatatgatatctaaatgtctgataatatatatgtatttatgatttgggcagcaaaaaaaaaaaaaaaaaaaaaaaaaaaaaagggcggccgtattgagttcttttaac

SEQ ID NO: 258718 - DNA, 468 bp, Zea mays
atttgatgaattcaagagtcatgccaacaatcttgggtacgagtacatgtcagagcacaacaatgagatataccggttgctgttgcgtgacccaaaggtctaatgtatatgcctttgctcccataataagttggtgacacttttcaaggaagattttgctccaaggtagaagttgcgagtttcttcaagttgaaatgaagccatcaccaaatgtagcttcggtgtgccatctgtttactcagttagatcatgtagtgtatcagttgtgtatctttgttgttgtgcttcgtgatctcaatttattgctttgtgcacctagaggttgtcaaataatgataaccgatatgttatctaaatatctaataatgattatgtgattgtgatttgggccgcatcactgctgtaaagtgtaaacccttgtctctgcaacatgagttatcaacaaatttaagatttgaatgttctttc

SEQ ID NO: 258719 - DNA, 448 bp, Zea mays
gttgcgtgacccaaaggtctagtataataggtgccgatgggttcctttgctcctataatttggtgtcacttttgaagtataaggttccactccaaggtagaaggtgcaagtttcttcttcagttggaatgcagtcattgccaaatataccttcaatgtgccatctcaccatctgtttactcagttagatcatgtagcgtatcagtcgtgtatttttgttgttgtgcttcgtgaactcacttatccgtttgcggcacctagagtgtgtcaaataatgataactaatatgatatcgaaatgtctgataatatatatgtatttatgatttgggcagcatcgttgttgtaaagtgtaaacccttgtccctttgcaatattgagttcttttaacaagtttgcgatatttggattgaaaaaaacaagaaagggaggccgctagcgatctagaac

SEQ ID NO: 258720 - DNA, 909 bp, Zea mays
ggctgcggggcaggggtgaaagaggcgaggcttctccagcttctcgaggccggagaccgtttgctcaagggccgcgttcttgacggcctcctccggcagcgtggacgcgtgggtctcaaccatggccttggtcacgcaggaagcagagcctggtgctagagaagctcccagtgccccatgtgttggcagcatatcagcatgaaagatcctatgagccaagagctactagaggctgttgaacaagagaggaacatccgatctaatccttcacgtaatactgctgttttccaccatccaatgctgggtgattttgaggttaagaaactccatcaagaaaagcagctacctttgtttggtggacaaaggcctggtagcaactaggacagggttgagtcagtaccacctgtctcactggcctagaatgtttgaggtgatcaggatgctggaaggagacatgctcacagagagatgggaggtgtcgcagaacgtggacatgccagagttcgtctcatcggagctcctacttcaaaagtacatggattttgcagcggacgaatgctcgcttggtgtagaagccatggagctctctggactaaggtgaccatctgatcgatcgaatcggccatcacacaggtcgcataggtgtcttgccatatcaagcctatattattgttgtattacattggacacatagggaagggaaaaaatccggtgaattatagggtgtgatctgtctgcctatacttgtggtggcattcatttgtgcaaatgattttgatatattgatgtagagaatatatatgttgtttatttctatgtaatcgttgcacactataattttatcaaacaacttttgtattgttgcaaggggcgacaaaaatccagtggattgtagtgtgtgatttgtct

SEQ ID NO: 258721 - DNA, 599 bp, Zea mays
gcggccgccctttttttttttttttcaagacaactgctacgtacattacagaggcacaaaggccaacttttacagtatacagtacttcacagataagactatacacatccatatccccggaacctttcagaagatcaagcgctgtagccctgagccaacgggctccatctcgccgagttgtagccgccacaagcacccatgctcgctcgcttcatcgaagcgccaggcgtgccactgttgcatatatttgcgaacgccctcatatgcctcataccgtactgagtgagcgatccgcaatgggattcgaagatccgtaccatttgcttcaagcagtcccaatcatcgacgagtggctggccgggaggtctgacggcctcaagtgtggaaggccctttctcagccccgaagagaagctttccgatgaagttgatgctgttgtccagatgcttcctatgccttactgttccggtgatctccctcagaacttcctgcttctcttcagacttctcatgtaagagctcatacctcttccataggaagagaacctctgcatccctttggttgaccacagcctcttggcctgaccaaagcagcttatt

SEQ ID NO: 258722 - DNA, 1193 bp, Zea mays
atcctgcgctgacccttgagattttaaataagctcggggttgcagctgacatttttaaccattggtttgctatgctacgacaagttaaaaaaagtggggcacgtgttaatttcaagagggagcatgataagaaagtttgctgcttgggcctgacctcccttatcgcgcttccagctgctaagattccagcagatgctttcggctcgatcttcaaagcaacacttgagctgcttgttgcttacaaggaccaagttgcagaagctaagaagcaaaatgaagaggctgctgatgatatggatggttttgatgctgatgaagaagatgatgacgaagttgactctgataaggagatgggtcttgatgatgaagacggggatgaagtaagcagtcttcagctgcagaaattagccgcagaggctagaggcttccaaccagccgatgacgatgactcagatgatgatttcagcgacgatgagctacactcaccaatagacgaggtggatcctttcattttctttgtagaaactgtccaaggtttgcaggcatctgatcctgccaggttccagaaccttatgcatacattggatttttcttatcaagcgcttgctagtggcattgcacaacatgccgagcaaagaaaaaatgaaattgagaaggagaaatctgagaaggcaaatgcacagtgacgtcataaagcatttctggttcccttcgattgttttgccattttgccggtatagcattggtggacggttaatttcctgcgatttgcaggccgcaggtaagagtttttgcagccttagccaaagtgtaggacaaattcaatcttgtgagatagcatcttggataacctgtcacctcgaccatgttcgtcgtggccagttgtagacgtcttggttgtgcaagaaagtttctctcgaggacagttgctcgttttgttagggccatcaatttttttgggcggcttgtaagttatttgagaatcccacctcaggttgaggggttgtattctcgagtcgtcaaagtttagtaccggtgcggtgtagattgtatatggtttcagttgtctagaacgttgtggcttcatggacgggctgtggtataagtttttattattttttaatttttttgtcaaaaaaaaaaaaaaaaagggcggccgctgtttggtaagagcaaaaaaggtcggcactgtt

SEQ ID NO: 258723 - DNA, 431 bp, Zea mays
caaagtgtagacaaattcaatcttgtagatagcatcttggataacctgtcacctcgaccatgttcgtcgtggccagttgtagacgtcttggttgtgcaagaaagtttctctcgaggacagttgctcgttttgttagggccatcaatttttttgggcggcttgtaagttatttgagaatccccccccaggttgaggggttgtattctccagtcgtcaaagtttagtaccggtgcggtgtagattgtatatggtttcagttgtctagaacgttgtggcttcatggacgggctgtggtataagtttttattattttttaatttttttgccaccaagacattggaattggggtttgtttgtttggtaagacccacaaaggtcggccctgtttctcccaaaaaaaaaaaaaaaaaaaaaaaaaaaaaaaaaaaaaa

SEQ ID NO: 258724 - DNA, 540 bp, Zea mays
gcggccgccctttttttttttttttgtttatgttaattttagatggtttttactgaaacgattctcataaaaagtgattgaaaagctaggacgattgacgatacgcatcagcttttagtggtcagaagctagaaaaagaccaaaggccctaagcatctagttgcgagatggaaagctgcttccgttaagctgcttgataatttcccctgcggaaggcctttctcttggtttttcgctcacacaatttaacccagcatcaatgcatcttttaacttgttggaggttgcttgcttccaacgtcgggtacttagaagctatctgtggcatttttgtccaaatcctttgtacattgtcgataaggttcttagacgataagtctacagtgttagaatcgacttttaaccctgttactatctcgattataaggatgcccagactgtatatatctgatttggttgagacttcacctctgtagtaatattctggagccatgtaccctcttgatctcacttcaaatgttgtgggctcgagccgaattcc

SEQ ID NO: 258725 - DNA, 757 bp, Zea mays
gcggccgcctgtaggcagaagagggccaccatgatgtacctgatggcttcttcctcagggcagtctacaagggctggatccaccagttccttgagcctcttcgcttcgtacagctcccatgccttctctaggagaatcttgtcatccatgagtatgctcctggagctactagtgccgctcactatctccaggacaaggacaccaaagctgtagatgtccgctttcttggtgagctggccatgccaggcgtactcaggcgcaaggtagcctgttgttcccgcgacgcgggtgctgatgtgggtgacattgtcaggaaacagcttggccagaccgaaatccccgatcttggggacgtagttcctgtcgagcagtatgttgctggccttgatgtctctgtgcacgatcggcgccgcgatctcctcgtgcaggtacgcaaggccccgagcgactccgaggcatatagcagacctgacgctccaggtgaagtcggcaggctcactgttagaagccagcagcgcacggtcaaggctgctgttcttgaggtactcatacaccagaatccggttgcttccctcgacgcagcagccgatgagttcgacgaggttggggtgcttgacgttgctgatgacgtcgatctccgtcaggaactccctgatgccctgcctggactcggcggagaggaccttcaccgcgacctctcgcccgcttcggatggttcccttatagactgtcccgaatccgccctcgagccgaattc

SEQ ID NO: 258726 - DNA, 2102 bp, Zea mays
gtagttttgattttgcaacagtagagaatgttgttatctgtggaagtatggagtctgccttagaactgctagcatcaactccatattgcttatcaattgagaaagtgtttgttataggaggcgggcaggtactgagagaatatcttaaaggacctgcatgtgaggctatccatctaactgacattcagtcgagcattgagtgtgacactttcatccctccggttgacttctcagtgttccagccatggtattcatctttcccggtgatagagagcaacattaggcattcgtttgtgtcttttgttcgtgttagaaagtcagtggcagaaactcatgagtcaaatggcaaggactcaaccgaggttgataccaagaatgacaaatttgaaacagagaatttctcttttctccccaagatggtatatgaccgccatgaggagtaccaatatctcaatcttgttgaagatattataaggtctggtgctcagaaaaacgacaggacaggaactggaacattgtcaaaatttgggtgtcagatgcggttcaacttaaggaaaaattttcctctgctgacaacaaagagggtattttggcgtggtgttgtcgaagaactcctttggttcatcagtggctcaacaaatgcaaaggttttgcaagagaagggtattcatatctgggatggcaatgcttcaagagagtatctcaacagtgttggcttggcacacagagaggaaggtgatttaggtccaatttatggatttcagtggcgtcactttggtgctgaatacactgacatgcatgctgactatacgggaaaaggttttgatcagctaatggatgtgattgacaagattaagaacgatcctgacgaccgtcgaataattttgtcggcgtggaatccttcagatctcaagaagatggctcttcctccttgccacatgtttgcacaattctatgtggaaaatggggagctatcttgccagatgtatcaacgctctgcagacatggggcttggtgttccattcaacatcgcatcatattctctcctgacatacatgattgctcaagtttgtgatctttctcctggagattttgtccatgttataggggatgcccatgtctatagaaaccatgttcgagcactggaggagcaaattcagaagatgcctaaaccatttccaattttgaagataaatccttcaaaaaaggatatagattcttttatggcatcagacttcaagctggttggctatgatccccaccagaagatagagatgaaaatggcagtgtaatggtggcttggctggagcccccatcctatggactcggtggatgtaatcagtaggactggtactacataaaaattaaccggacaccgcactagcttgtttttggtgatggtgctgaatgttcagtgggagacgttttctctgatttatcagttgcgatttgcgtactatggtcgcttaagtcaactctacaaaatcggctcccttttatctggagccagttgattactcgattgcgagtgtgagggatgatctaggcataccctgttgcaagggcctactgggtgtgtgccggcccccatgaggctgtgacgattgcgccagtccagtacctcgtgagaattatgtaaccgaagttgccgtgtacctgggagaactcccgtactgtttggtgtttgattgcctatttcactttgcagtttggtcacaagataaaaaaaaaaaaaaaagggcggccgaacacattctgttgcgtttttcttgtgctttctggggggcagaaagcctagcgccgtgcttgccgaagtcgggctagcgcttgcacttgcagcggcggtgtacgatttggttggagccggagcgtgaagtctcaagtgatcctgcaactgtcctgtcagttaaactcaaagatgttggaaattgtagtacgatgcggcccctgcgagttttgtagagttgaccctctttcattgtttttttttaaattcaaatcaagtttcattaaaaaatagaactgtaaaaactttacaaagccaataaatgattaaagattaaaaatctgttacagatagttgaagagcaataattctgtac

SEQ ID NO: 258727 - DNA, 637 bp, Zea mays
ggagattttgtccatgttataggggatgctcatgtctatagaaatcacgttcgagctgtggaggaacagattcagaagatgcctaaaccatttccaattttaaagataaatccttcgaaaaaggatatagattctttcatggcgtcagacttcaagctggttggctatgatcctcaccagaagctagagatgaaaatggcagtgtaacggtggcttagctctggagcccccagccttggaacctcggtgggtgaaatcagtcgaacgaactggtactacataaaaaatgaaccggacatcgcactagcttgtttttggtgatggtgctgaatgttgtgcgggaggcgttttcccccgttattagtagcgatctgcgtgctatatatggtcgctgaagtcaaaattggctctcttttattttttatctactactactactcatttgcgagtgagagatggtctgggcacaccattcaattgcaacggcctactggtgtgttgccccccaatgagggctgtgacgattgcgccactacctcgtgagaaacatgatgtgaccgaaattgctgtgtacctgcatggtagaacaacgcactctttggtatctggttgccttaatacgtgacctggttaattc

SEQ ID NO: 258728 - DNA, 916 bp, Zea mays
cgatcaggtgctgacgcttgctactcttgaattcggctcgagagcagaaatagatggaaccttcacaactatttactggtggtacaggaccgcgagccacgccgcagagctcacagcggggttctacaacactacgaacagagacggatactctccagttttcagaatgctcaagaagcactctgtgatccttaagctcgtctgctacggacccgagtacacagttcatgagatggacgacgacgaagcgtttgcggatccggaaggtctaacctggcaggtcatcaacgcggcgtgggatcagggactaccgctctgtatcgagagcgctcttccgtgccgtaatggtgaggcgtattcccgcatcctcgacacggcgaagcctagggacgatcctgatcgtcaccatgccgcgttctttgcgtaccgtcagcagcagcagcccccgctccgagaagcttgcctttcggagctctgcaccttcgtaaagtgcatgcacggggaggctccccagaatggggaaggttgaatctggttagcaactgatgcgctggctcgacaatacggaagaaaccaagtaggtgggtttcggatttgagccgcctttgaaggcgtccggcggcgagcgaacattctgatactgctaggtcctattcagttggttccttctcgtcgtcagccgtctgccctgttactcgtcggctggactgagcaggtgcgtttgcagttgcagccttaccatatagcttataactttgtggtaagttagcatacctgcatgctgtaacagacatggaggatatagtggagctctgcaggataatagagtggcaatgcccactcaggtgacctaaaaagaagctggttaacccagttggtatttaaacgagaaaaaaaaaaaaaaaagggcggccgc

SEQ ID NO: 258729 - DNA, 623 bp, Zea mays
cagaaacaatgggctggaaatatcctggtattggtgagtttcagtgttatgacaggtacatgcagaagaatctacggcaatcagcattgtcccggggtcatttgttttgggcacgtggacctgataacgctggctattataattcaagaccacatgaaactggctttttttgtgatggaggcgactatgacagctactatggacgttttttccttaactggtactctggagtcctcatggatcatgtcgatcaggtgctgtcgcttgctactcttgcatttgatggtgcagaaatagttgtgaaggttccatctatctactggtggtacaggactgcgagccacgccgcagagctcacagcggggttctacaacactacgaacagagacggatactctccagttttcagaatgctcaagaagcactctgtgatccttaagctcgtctgctacggacccgagtacacagttcacgagaaggacgacgacgaagcgtttgcggatccggaaggtctaacctggcaggtcatcaacgcggcgtgggatcagggactaccgctctgtatcgagagcgctcttccgtgccgtaatggtgaggcgtattcccgcatcctcgacacggcg

SEQ ID NO: 258730 - DNA, 1086 bp, Zea mays
gctggctgcacgcccggacggtgctgcacctcgccgtgttcgtgctgtcagacttcggggggtaccctccgagggtagctagcttggagaaggatgtcattgcgccctacaagcacatggctaagacgtacgccaatgactcggccgggttcgatgaccggccgaccctgttatacttccggggagcaatttacaggaaggagggagggagcattcgacaggagctatattatatgctcaaagaagaaaaggatgtttacttttcctttggaagtgtccaggaccatggggccagcaaagctagccaaggaatgcactcatcaaaattttgcctaaatattgctggggacaccccttcttccaatcgtctgtttgatgcgatagttacccactgtgtccctgttatcatcagtgacgacattgagctaccttatgaggatgtgttggattattcaaaattctccatctttgtccgttcgtctgatgctgttaagaaaggttacctgatgagactgctcagcggtgtaagcaagcaacaatggacaaagatgtgggataggctcaaagaggtggataaacattttgagtatcagtatccatcacagaaggatgatgcagtccagatgatctggcaagcattgtctagaaaggtgccatcaattaagctgaaggttcacagatctaatagattttcaagatctaacagaggaaaataaacagaaaggggtgtgtctatcttgtctctgttggctaatctaatgtaacacatttcactgacacaggctctcagcctttcgcagttgcacaaaatagatagattgtaatactcaggttatctttaggaaaggtttgtaccttgagatttgttggttcagttgaagcatatactgtcaagtcaaaggtttgttgttttgtaaggtatgttaaatgaaatcatgaaagaaagacttggttttgctctttctggaacattgtgggatgaacccatattcttttgtggggtagcagttttttaaaaaaaaaaaaaaaaaaaaaaaaaaaaaaaaaaaaaaaaaaaaaaaaaaaaaagggcggccgctcgcgatc

SEQ ID NO: 258731 - DNA, 1223 bp, Zea mays
gaattcggctcgagtgtagatatacctcttgataaagaggccttggactggaacaccaggatgaaaattgcagcaggtgctgccaaaggactggagtacctacacgacaaagctaatccaccagttatttatagggatttcaagtcgtcgaacattctgttggatgaaagtttccacccgaagctgtctgactttggacttgccaagttgggtccagttggcgacaaatcacacgtctcaacacgtgtaatgggtacatatggttattgtgccccagaatatgctatgacagggcagctgacagtgaagtccgatgtgtatagctttggggtcgtcttgctagagttgataactggtcgtagggccatcgacagcaccagaccacatggagaacaaaatcttgtctcatgggcacgtcctcttttcaacgacagaaggaagctccccaagatggccgacccaaggctggaagggcggtaccccatgcgcgggctgtaccaagccctggcggtggcttccatgtgcactcagtcggaggccgcttcgcggccactgatcgcggacgtcgtgaccgctctgtcctacctggcgtcccagccgtatgaccccagcacagctttcgcttcaaggaggcttggtggaagcaagcctggcgagaacggcggcagggtggtttccaggaacgacgagaccggaacctcaaggtcgccggggaaggaccgggaggactcgcccagggacctcccggctatcctcctgaacaaggacctcgaacgcgagcgcatggtggcggaggccaagatgtggggcgacagggagcgcatggtggcagaggccaagatgtggggcgaccgggagcgcatggtggccgaggccaagatgtggggcgagaattggcgcgacaagcggcgcgctgagaatgggcagggcagcctggactcgccgcctactaggaacagctaggggactggggagagcctttcacacattccatccatgcttatcggttgtttatttccaggtcgattttcgttgccgcggcggcgacgggcagggccaggggcagggtcagggagggttagatgtacatttctagggcagcgtcgtactggatagtgaatgcatttggttgtacttgtaaattctcagaaaatttttgtgagaatgaaaggacgcattttgagttccactcgtaaaaaaaaaaaaaaaaaaaagggcggccg

SEQ ID NO: 258732 - DNA, 1260 bp, Zea mays
cacaccagccccatcgcaatagtcccctccacgaacccgtcgaccggcatcaacaccgggccggaattcggctcgagcatcaccatcccttccttgaaccctctgcccacacccatcacagccccctcaacaaacatcccttctccttccaccatgctgccgccggttccggtcatatatccgctgccaacgccgtcaacatcctccccaccagctgtgccggtcaccaatcctgctgtcaccacgccttccacgtcccctccgtcgacaccaacaccattcaacaacccaccattgttgaacccaacgccgacccctgctcctacagtcacggccccagctgcttcaggccgggaggtctggtgcgtggccaaggctgctggctcaagtgaagccgcgcttcagaacgcgttggactacgcgtgcggcattggaggagtagattgttcggcgattcagccgtcagggagctgctactatccgaataccatccaagcccatgcatcctacgcgttcaacacttattaccagagaaaccctgtttcttccagctgcgactttggggggacggcaatgctcgtcactgctaatccaagctctgggagctgtgtctttgcatcatcattgccatcgtcgtcaagctctactgttggatatgatcccgcgtccacggctactccatcgtcaccgtcgtctggttccgactcgggagcacccgtgctgaatgccagtggggcaggttcttctgaatcatcagattttggctttgacatcccaggagctgtcaatttgggcagcggttggaggtcagtctcaccacccaactggccctgggcagccctggtctggattctagtagcattgtgtgtgcacaaagaagggatggtctgaaaacctgtgagagcatctgcagtattttggagacagattgcaaagtagccaggtggtgtagagaccagtagagagctacaaagctagagaatcggaccttagcatggctaagtttatcgatgtatgtatgaagtatggtgctccagttcgtagtagcaactgggaactgatgtagtcctgatggatggacttggactcaccctgatcggtcactcaggcactctgtagtgtagatgtaggcatgtagctgctgctagtagtagtagtaatgcaagtactgctttgcatcgtatgggtgagagagttgaacaactaatggaatgcaaatgtgccgttttgttttaaaaaaaaaaaaaaaaagggcggccg

SEQ ID NO: 258733 - DNA, 828 bp, Zea mays
gaattcggctcgagcccatttgtgttaatctgaaaaatgtcaatcccaagagttgcacaaggcgcttctcaagaggcagcgtggagagcaatcatgtcttgagagaaatagcttcacctgaactcaacatactcgaggacaaggtccatgatgatagtgaagatagtccaagcttgagcttttcggaaatacagaggaagtggaaggaagagttggaccaggaacttaaaagagagcgagaaatgaggtcgggtggctatggtaaagcaccatcaccgtcctcaacgagccggagattgactggaaaacgagatcgcagtcctgtgtattgagtagagaatcagaatacaacacagcaggactcgtatatttgactaaccgcacagtgtcatcgattggtggccattgctagtacagtgcagtgccaaccttcgtatgacctgacagaacctgcttgacgaccaaatccttttggtccttgtaaggtaaattaggttgagcgagccacttgtaagcgcactgtgcatcggaggctatcatgatctgcgatgcctgccttcgcagccctttattgccagcatgaaatcattggggtggcgatttttatgcaatgttcaagcttcatgcaattttggatgacaataggtgcatgttgtacaattgtcttctctttatttttcaaatgtttgtaagtttacctgatgaccgagaatccataattcgttgaaccaaaagtatggaagtgttcgtctcgaaaaaaaaaaaaaaaaaaaaaaaaaaaaaaaaaaaagggcggccgccgaaaaaaaaaaaaaaaagggcggccgc

SEQ ID NO: 258734 - DNA, 1434 bp, Zea mays
gcgggtgatacatcttttggtggtgttcttattggaagagcaatcaacagaaagtgcaccgcaaaacaaagtagttaatgtgtctgaacaaagctcaacagtgagccggatcagcccggcagctaaattactgatcaaggaacatggactggatacatcatcactgagagcatcaggcccccgtggcacccttctgaaaggggatgttctggcagcattgaagtcaggtatcaattcaagttcaaccaaagaaaagaagtctccagctcaaccttcgtctcagccaactcgatctgcccaatctcaagcatcctctatttcacaaaaggatgatacatatgaagatattccgaatagtcagatacgcaaggtcattgccaaaaggttgctcgaatcaaaacagacgactccacatttgtatctatccaaagatgttgtgctggatcccttgctcgctttcaggaatgaactaaaagagctacatggcattaaagtttcagtaaatgacatcatcataaaggctgtggcaattgcgttgcggaacgtccctgaagcaaatgcttactggaacaatgataaggaagaaactcaaaagtgcgattcagttgatatatctattgctgttgctacagagaagggcctgatgaccccaataataaggaatgcggatcaaaagactatatctgcaatatccgcagaggttaagcagctggctgaaaaggcaagagctgggaagcttgcacctaacgaatttcaagggggaactttcagtatctcgaatcttgggatgtaccctgtggaccatttctgtgcaatcattaaccctccacagtctggcattctcgcagtgggtagaggaaacaaggttgttgaacctgttgtggacagcgatggaaccgagaaggctgctgcagttacaaagatgagcctgacactatctgctgaccatcgtgtatttgatgggcaagtaggaggcaagtttttcacggagctggcgctgaatttcagcgacatcaggaggctgctattgtaaatgaaaggaggcaattaccgtgttttgacgtattctttgggagcgaaaaccgctcaggaaaagagaacatttggatgcaacccgtggtctgctgcttgatcggcatcccgtacaaaagtaaccaattttgtaataaatttataataagaatgcactggcaccttcacggttttttaacccgttttccattagttgggaggaggcatgtcctgagaatttagcaggtacggtgccattcaacttcgtggttccgcaacaatgaccacccttagattatgcaatctgagcggttctggatggacgcccattttgttgatgaccttgtgatacatggaagtaataacagaatgcttttgttacaaaaaaaaaaaaaaaagctagttctagatcgcgagcggccg

SEQ ID NO: 258735 - DNA, 1348 bp, Zea mays
gggaagaacaatcgagctactaataaggtcgtatacatatcttctatatactcctctgaaagttgtgaactccggtcgagcttaaaaacagcagcaatggcgaacttctggacattgctgctggctgcagtggtggtcctctcactcctagtgagccccattgcttgcacccgaaagctcaacaaacccaagccgaagccgggcagctacaggcggccggtcaagccgaagccaaaaccggtcacgggcagctacaagccggcgcctgtggccgccagaagaaaccacacagctacacccacgccatcgccgactgtctacggccccggtggctggctgtcaggcgccggcgccacgtactacggcgcgaccaacggcgacgggagcgacggcggcgcgtgcggctaccagacggccgtcggaaagaagccattcgactcgatgatcgccgccgggagcacgccactgtacaggggaggcgagggctgcggcgcctgctacgaggtgaaatgcacgaccaacgccgcgtgctccggccagcccgtgaccatcgtaatcaccgaccagtcccctggcgggctgttccccggcgaggtcgagcactttgacatgagcggcaccgccatgggcgccatggcccggcccggcatggccgacaagctccgcgctggcggcgtgctcaggatcctgtacaggagggtgccgtgcaagtacaccggcgtcaacatcgcgttcaaggtggatcagggcgcgaacccgtactacttcgacgtgctcatcgagttcgaggacgacgacggcgacctcagcgccgtggacctcatggaggccggcagcggcgtctggactcctatggcgcacaactggggcgccacgtggcgcctcaacaacggcaggaagctcaaagcgccgttcgggctccggctcacctccgactcccgcagggtgctcgtcgccaacaacgccatcccggccgcgtggaagcccggcaagacctaccgctccttggtcaactacccctgaaaagagaaataccgacaagtggatggcgtgtattgtgcgtccgggtgttgcgagtggcggcggtgtactactggtgtcggaaaacagaagagaatgaaagaggaggttgaagaagagaataatgtccttcttccctccctggacggtctctgcagtccccaaaagtgatgtgtgacggtgttagtcaaatcatgccggtaatttgatacttcatctcgatttgagttttactgctatactactgtgattgaggtaagacagaatcttatttcttgaaaaaaaaataaaaaaaaaaaaaaaaaaaaaaaaaaaagggcggccgccg

SEQ ID NO: 258736 - DNA, 917 bp, Zea mays
caccaaatggcgctagaccacggcgccgagcatatcttcctctttccctaccgacgaattcggctcgaggcggtggcgtgcggagggtcctggaggcgtggaggctcggcgtggtgaagtacggcgaagcgctccagttgcaggagcgtctcgtcgcggaccgcaaggccggccgcgtcggcgacctcgttctgtcgctgcagcacccgccgacctacaccctgggcaagcggcgcgagaaggcggagcggaacctgctcgcgccggaggccgacctgcgcgccctgggcgccgagatccaccgcacggagcgcggcggcgacgtcacgttccacggcccccggcaagccgtgctgtacccgctcctctcgctccgcaccttggggcttggcgcgcggaggtacgtcgaggggctcgagtccgcgatgatccaggtcgcggcgctgcacggcgtctccgcgaggcccggggaccccggcgagaccggggtgtgggtcggggaccgcaaaatcggcgccatcggggtcaggatctcctccgggttcacgtggcacggtctggcatttaacattgaccccgacctggagtacttcgagcacataatgccatgcggcatcgccggcaagggggtgacgtcgctgcggcgggaggtgggggacggagcggagctcccggccgacggggtcatccacgaccagctcgtggggtgcttggcgacaactttgggttttactgatgtggaattcaaggacgattctgagcgtggagacctgatcggagttacagcttcacagtattgacgcctgattcagttttgcgttagaacgtcctgtaatcaaatttcggaatgttttttttatcttcatcagatacgtcctgtgatccatttttgaaaaaaaaaaaaaaaagggcggccg

SEQ ID NO: 258737 - DNA, 1846 bp, Zea mays
aaacagacgttctggcattccggaattcggctcgagccacctcgccgcgaccacacctcctctcctcccctccggctcctcctcctcgcatggcgacagcctctcgtccctagccccccagatccagcggcgcgcacctacacacgcgcaaggaaccgtagacgcgcccccgcgcctcccctctctcccgtcctccgccacccatggacgcggggaatggctgcagcgcgcgggcgctggcggcgtgcgtcgtcggcggcatcgtgctgggcgcgtcggtgctcgcgctccacctcgcgggcgggcccgccgccatcccgcccctgcccctgccgccgcccatcggcgcgcttctccgtcgccgccgccgccgccgccccgtgcgcgtctacatggacggctgcttcgacatgatgcactacggccactgcaacgcgctgcgccaggcgcgcgcgctcggggacgagctcgtcgtcggcgtcatcagcgacgacgagatcaaggccaacaagggaccccccgtcacgccgctccacgagagaatggtaatggtccgtgctgtgaaatgggtggatgatatcattccagatgcaccttatgccataactgaagaattcatgaacaagctattcaatgagtacaacatagactacattatccatggagacgatccttgtttgctacctgatggtactgatgcctatgctcttgccaaaaaggctggtcgatacaagcagattaagagaaccgagggagtgtcgacaacagacattgttggacggatgcttctttgtgttagagagagatcatctgatgcacataaccactcgtcactacaaaggcagttcagtagtggacatggtcagaaagttgatgatactggatctggaactggaacaagagtatctcattttcttcccacatctaggcgaatagttcaattctcaaatagcaagggtccaggtccagattctcggatagtttacatagatggtgcttttgatctgttccatgctggacatgtcgagatcttacgacttgctcgagaacttggagattttttgcttgtggggattcacacagatcagaccataagtgcaacacgaggacggcatcgcccaatcatgaatctccatgagcgaagtttgagtgttttggcttgtcgttatgttgatgaggtgatcattggtgctccatgggatgtttcaaaagacatgattaccacgttcaatatctctttagtcgttcatggaacaattgctgagaacatggacttcacagaggacgatttacacccatatgctgttccaatggctatgggcatctaccgccgactggagagccccctggatatcacaacaagtacaatcatcaggaggatcgttgctaaccatgaagcttaccagaagcggaatgagaagaaggaagccagcgagaagaagtactacgagggtaaaagctttgtgaacggggagtgaaggtcggagtagcagcaggactcgcgtggagattgctgcctcgttcattttaggtctcccagccttttagcagaggcaacagttggtcgatctacagttgtaccctttcttttttctttttcatcttcttcagtaatctttgatgatcttgctgacatagcttaggaagcataggagcatttctccccggtgtctgcagccaattttcctcactgtgttgtatatgcgccttccagctgctgagctgcatttgagatctataggcttttccacacagagacacatacagattttgaaattgtgcgctgcagtatgaagaagatcatgaatgttagcgtgattaaaaaaaaaaaaaaaaagggcggccg

SEQ ID NO: 258738 - DNA, 341 bp, Zea mays
ttcctctatgttgtttaacaagtttctgatgatttttacgccgctccacgagagaatgataatggtccgtgctgtgaaatgggtagatgacatcattccagatgcaccttatgccataactgaagaattcatgaacaagctgttcaatgagtataacatagattacatcatccatggagacgatccttgtttgctaccagacggtactgatgcatatgctcttgccaaaaaggctggtcgatacaagcagattaagagaaccgagggagtgtcaacgacagacattgttggacggatgcttctttgtgttagagagagatcatctgatgcacataatcact

SEQ ID NO: 258739 - DNA, 1080 bp, Zea mays
gtaaaaagtacgaaaagcatgagggaaagcagttttcaatttttggaattcggctcgaggtatggagaatggaacacaacaagcttgtacagaaaagctttgctcgtttgtactacaatgatttcttgagaaactgcagcacggttgatgaagagtcgagggaaaagttggcaccgtatgcaggcttgtcatctgaagaaagctaccagagtcgctaccttgaaaaggcatctcagcaagttgcaaagaacctgtacgagtccaaggttcagccaacaacattgatcccaaagcaagttgggaatatgtatacagcatcactctatgctgctcttgcatcggttatacataatagacatgaaactctggcaggccagaggattgttatgttttcgtatggcagtgggttgacatcaacaatgttctctttcaagattaatgaaggccatcaccctttcagcttgctaaacattgcaaacataatggatgtttccaagaaattgaaggcaagacatgtggtcccgccaaagatatttattgaggtactgaaactgatggagcaccggtatggggcgaaagatttcgtgaccagtcaagacacaagtttgctatctgtaggcacatattatctcacgcacgttgactccaagtaccgaaggttctatgacgtgaaaggtgacggtgtcaccactactgcaatgtccaacggccactgatctgtcttctgcccggagctgcaacaagtcaaataacagaggcaggtgttcctaagcattctgactcttcttagattatctattaggaggggacgctggagcttagattaatctctgccaagttgtaaggttgtaaagttagttagagctgcgtcattgctgtaatgcttgcttggtaaaagttctggcgctcttcagttcttcagtgcttgcaaaattcaaatcaagctcactgttggttgtaagaattctgaataatctgcagaatcactggttacatccaagttacgctgttgaatgcatgatttcatgtttaacacgattaatgcatctggattcaaaaaaaaaaaaaaagggcggccgc

SEQ ID NO: 258740 - DNA, 602 bp, Zea mays
gccatcaccctttcagtctgctaaacatttcatacatactggatatttccaagaaactgaaggcaaggcacgtggttcccccagagaaatttgtggaggcactgaaactgatggagcaccgctatggggcaagagatttcgtgacgagtcaagatacaagtctgctatccgcaggcacatactatctcacgcacgttgactccaagtacagaaggttctacgacgtgaaaggtgacggtgtcgccactgcaatgtccaacggccactgatctttcttctgcccgaagctgcaacaagtcaaataacagaggcaagtgtcctaagcatccttagataatattatatctattaagaggggaagctcgagttatagattaatctatgcccagctgtaaggttgtaaagttagttagagctgcgcatgcttgtttagtaaaagctctgctgctcttcagttatttagcgaatcaagcacgctgctgggctaataagaattgtaaacaataatctgcagaatcactggctacatccaggttatgctgatgaatgcacgatttcatgtttaacacgatcaatgcatctggttccccccaggttatgct

SEQ ID NO: 258741 - DNA, 1156 bp, Zea mays
  unsure (1)..(1156): unsure at all n locations
tcgggtatatatatacggcgccggcgccgaggagagaggaccccggccgatcccgcacccctgactgtcagccgcgatccgctcttttttgcgtgcagcggcggagcaggagagatggcgtcggaggccaaggacgtgggcatcctcgccatggacatctacttcccgcccaactgcgtgctccaggaagagttggaaacacatgatggcgtgagcaaagggaagtataccattgggcttgggcaggaaagtatggcattttgcactgaagttgaggatgttatttcgatgagcttgacagtggtgaagtccctcctgaaaaattataacattgacccaaagtgcattggacgtttggaagttggcagtgaaaccgtaatagacaagagcaagtctataaagacatggctgatgcagatatttgaggaatctggcaatactgatattgaaggagttgactcctcgaatgcatgctatggtggaacagctgcattgtttaattgtgttaactgggttgaaagcaactcatgggatgggcgttatggacttgttgtttgcacagacagtgcggtttacgctgaaggtccggctcgccctactggtggtgcggctgctattgcaatgctgattggaccaaatgctcctatttcttttgaaagcaaatataggggatctcatatggcccatgtatacgacttttacaagcccgatctcgcgagtgaatatccggtggttgatgggaagctatcacaaacatgctacctcatggcattggactcctgctacaatgtattttgcaaaaagtatgaaaaacatgaggggaagcagttttcaatttctgatgcagattatgttgtgttccattctccatacaacaagcttgtacagaaaagcttcggtcgtttgtactacaatgatttcttgagaaactgcagcacggttgatggagagtcgagggaaaagttggcaccctatgcaggcttgtcatctgaagaaagctaccagagtcgcgaccttgaaaaggcatctcagcaagtcgcaaagaatctgtacgagtccaaggttcagccaacaacattgatcccaaaacaagttgggaatatgtatacagcgtcactctacgcagctcttgcatcggntgtccacagtagacatg

SEQ ID NO: 258742 - DNA, 435 bp, Zea mays
cttcagcgccttcaaggaggagatggaggtcaagcggcaactcgagcaggtgcaggtggcgctcgagggcgccactgaagacatgaacctcatgggccggctcctcgatctgcacgttactggggtgttgaagtgtataggtggatcgtctatcttctcctaatagcttacacgtttaggttgaactggttattgcgttcgctcaaacaagttggtcgtcatcttattagtatctgcgtcattctgtttggccggtggtgtgctgcactaaaaatttacatgatattggttataggaagagttggaaacacatgatggcgtgagcaaagggaagtataccattgggcttgggcaggaaaagtatggcatttccgcacttgaagttgagggatgttaatttcgatgagccttgacagtgggtgaagtccccttctg

SEQ ID NO: 258743 - DNA, 1455 bp, Zea mays; identical to SEQ ID NO: 223

SEQ ID NO: 258744 - DNA, 622 bp, Zea mays
gaattcggctcgaggtttttttgttgtgctaaatactgaacataatttgggtgtgttaatattttatttattgtctgcacatggtttgcgttcttctgatgatggctcatggatcctgtaaaatatgtgttaggatttggatatccatgcgggcactaccacagtccacagggtgctcatctcttgtgttcttggctcttgcaagcattaggtcgtttctaaaaccacattggcaaaatgaactctatggtgtttgaggttgctgaattggatggagcaacaatgatttgtcgcactaacaataaaagaaaaggttacttgttggttttaaatgttagtaattactacgaagtacaataatttgtatggagcgcatccagtttagcaactattccatattttaatctatcttttttataagtttgagttcatgtgacttaatttagaaacttgaactcacaaacttcctcttatttggtctctatatggtggaattatgtcattctataatctctgttcatttaaaaaatcgttgtgaacactcttctaattgctccctgtcatggttgtgctgtactaatacatattggatgaagtaaacagccatatcagttaagtcaat

SEQ ID NO: 258745 - DNA, 1030 bp, Zea mays
ggcctccctagtggacacggtgaaggtaattgacggccaccagcttgtatgcaagcttggctgagacgggaagaaggagaagcaggggcaatcacagcaacctggacctggcaatcaccaccagcagcagatactgccgggtggtccgcaggacattcagggagggcttgggcttgggtcacaaatgggagcacagtatggtgtccctgggactggtatgccttcatttggttttggtggtgttggcggcgggtttgggggtccaaatccttatggtaacatgccatcttccatgggtggaggaggcgcaggtgggttagggtcggtgggaggccaggtgcccactgggttggctggtgctggtggatttgggcctgggggattgggtggtggctcatttgggggatcatctcagtttggtgctgctgggatgggggcatatggtggccttggaatgggtggaggctccatgtaccgcatgcaacagggagcaggtgggctgcctgcaggcgcatttggtgaaggaggaaactaccctcttccaggttctggtttccgaggccacgaccctcaaggtggaatgtctcctcctgggccaggtggcagggctcctcctatgtatcccaacgtgccaccttatttctaaggtgtgtgacaactcttgggagcatatcctttgaaatggttgtgctgaattcagaagtgttgtctgcttacatggatgccttgcatattctggctacttctgatctggaatggaatgtggaatgagtttgcactcgcagtttcccttattaagggatacatgaagctaggtagttgtgataatgcttagccgtgataatgcttcacatgtactttcttatgagtcatgactgctttgcagtttcattttctatatagataagtgaagttgcattaagtgtgtgttgtgttgattattgtcgtattatcctatgaaacccctttattttcatggtatgatgatgtgtttaatcttaaaaaaaaaaaaaaaagggcggccgccgac

SEQ ID NO: 258746 - DNA, 795 bp, Zea mays
  unsure (1)..(795): unsure at all n locations
cccgggtcgacccacgcctnccggccgtgggccggcccgcccgacccggggccctatatatgagggagaggacccctcactggtggagccaccggcggcgccgacaaaaccagaccaccaaacaagtgccagcgccctctcgcagtcgccgcaatggagagcaccttcatcatgatcaagcctgacggcgtccagaggggcctcattggtgagatcatcagccgttttgagaagaagggcttctacctcaaggccttgaagcttgtgaacgtggagaggtcgtttgctgagaagcactacgccgatctcgcctccaagcccttcttccagggcctcgtggactacatcatctctggccctgtggtggccatggtctgggagggcaagagcgtcgtcacaactggccgcaagatcattggcgccaccaaccccctggcttctgagcccggcaccatccgtggcgactttgctgtcgacattggcaggaatgtcattcatggaagtgacagcattgagagtgctaataaggagattgccctgtggttccccgagggccctgctgattggcagagcagccagcacccctggatctacgagaagtaaacatggaaagtttcacatcaaaccttgagagccagaggaagcatgtcaccatttgtgctttagcaatgttttcgaaaagattatgatctgtatcttggaaccttatttcaatggaccaaatttctttctttgccaaaaaaaaaaaaaaaaaaaaaaaaaaaaaaaaagcagcgggccgggaattaggacggt

SEQ ID NO: 258747 - DNA, 1660 bp, Zea mays
ctgaggggaaattaagcacgtcatgtagtgaaccaaatatagcaaatgccttttggaggcgcagccaaaggagagttgccgaggaaccccgtggtgctagttccagccctgagcatccattaatgagagcaaggggaagatctatacttggtggtgagaagcaatcatttcaagaatacacagaatctggagctgcttcaagatcagatggtcttgggggcacttcaacctctaatgctcgaagaataaggcgtagaagcattagcatcacccctgagattggagatgacattgtgagggcagttcgggctatgaacgaaacactaaagcaaaatcgccttcaaagggatcatgtcgaaggttcatgctcatatgttacggaagaccaaagcaacgccaatgactgcccaaataaagatgatgcatctcggataattggtgctactgacagtgactcaagaaaccgaactggtcctactcaaaaggccatgtcattgccttcttcgcctcatgaatataggggtcaagatacccaaaaaggtgatgattttataagtaaagagaagatggcattggcatggaacaaagtttgccagagctccccatttcttaacaagcccttgctgccccttgaggaatggaacatagatttctctgagataaccattggcaccccggttggaataggattcttcggagaagttttccgtggtatatggaatggaaccgatgttgccatcaaagtatttctagaacaggacttgacaactgaaaacatggaagatttttgcaacgagatatacatcctgagccggttgcgacatccaaacgttatattgtttcttggtgcatgcattacacctccacacttgtcaatggttactgaatatatggaaatgggatcactgtattatctcatccatatgagtggtcagaaaaagaaacttagttggcgtaggaggttgaaaattattcgtgatatatgcagggggttgatgtgcatacaccgcatgaagatagttcacagggatctcaaaagtgcaaactgcctggtgaacaagcattggactgtcaagatatgtgactttggtctatctcgactgatgattgatagtcctatgaccgataattcctctgctggcaccccggaatggatggcccctgagcttatacggaatgaaccttttacagagaaatgtgatatattcagccttggtgttatcatgtgggagctgtgcacattgagtcgcccatgggaaggcatctccccagttcaagtggtgtacgcagttgctaatgaaggttcacggcttgagattcctgaaggacctctcggcaggttaattgcagattgctgggcagagcctgagaatcggccgagctgccaggagatcctaacccgtttgctggactgcgaatacactgtcagctgaaatggaagctgctcgctcgtccactcaattcctgcacaggtggaaacatttcttgtataaaacctgtaaaaaaaggctgccgattctgcggacttgaggtcacatatcgaagcgctgtgttttttttaaacaatggcgaccctttctccaaaaaaaaatgtaaaaatgattccctggttatagaagaacatgtctgattcgataaaaaaaaaaaaaaagggcggccg

SEQ ID NO: 258748 - DNA, 747 bp, Zea mays
cggcggccgccctttttttttttttttattcttaaacagtaactatggtttcaggtagataaagttttggaatacaggttacaagaaatgtgcatcctgtgagctcaagtaccatattattgccaccatcatcttttacaaccagaaaacttgcagaaaaaggagatatttgaaagctgaaacgaaatttgtgcagctgctcatggagtccaagcacaacaaggatgcctggcaaattaaccagcatcaaatcagtaagctttcctggatcatttctggtagccaccgccgaccgtgttgtcgtcctcctcgacagtggtgttgacgtatggcacggggaagtccttggtggggtcaaactgcttggtgaccatgtagcgctcgaggtcgggcttgcggagcagggtgcggcgcacgggcggacggttccggcggcgatcgcgggtgaagtacttgatgtcgtagactgtctccggatcggatgtgggcacgatggccttgtcgcggtcgtcgcgcacggtggccgggcacttgacgcggtactcgagcgcgccaggcagcgcgctgcggtactcgggcgaggcgcaggggcccgtgatctcccacggctttttgaggaacctgcggaacccctggaacagcgatttgccagcggcggcggccgatgaggcggcggaggccatcggggtcggcgcggtggtgagatcgacgaagaggggaaagggatgggagaccgaacgatacagc

SEQ ID NO: 258749 - DNA, 693 bp, Zea mays
gtcaaaacatcataactggtaagttggagatgatgtgcacattagaaaaccttggttattcttaaacagtaactatgggttcaggtagataaagttttgggatacaggttacaagaaatgtgcatcctgtgagctcaagtaccatattattgccaccatcatcttttacaaccagaaaacttgcagaaaaaggagatatttgaaagctgaaacgaaatttgtgcagctgctcatggagtccaagcacaacaaggatgcctggatcatttctggtagccaccgccgaccgtgttgtcgtcctcctcgacagtggtgttgacgtatggcacggggaagtccttggtggggtcaaactgcttggtgaccatgtagcgctcgaggtcgggcttgcggagcagggtgcggcgcacgggcggacggttccggcggcggtcgcgggtgaagtacttgatgtcgtagactgtctccggatcggatgtgggcacgatggccttgtcgcggtcgtcgcgcacggtggccgggcacttgacgcggtactcgagcgcgccaggcagcgcgctgcggtactcgggcgaggcgcaggggcccgtgatctcccacggctttttgaggaacctgcggaacccctggaacagcgatttgccagcggcggcggccgatgaggcggcggaggccatcggggtcggcgcggtg

SEQ ID NO: 258750 - DNA, 2284 bp, Zea mays
acgcccacgcgtacgcggcggtcggcgcgctgcgtcgccgcttgcttcctcctctacttgagtgccgagtcgcctccgcgctctgaattcggctcgagcggagccaaagccaacaaacagccgctccgccttcttccgcggctgcagccagcgcgaggtacctggctggcattttgcatttgaggtcatcattgaatggctgcaacgatgggttcaatatctgccaatggttcttaccaaacaaataggcccagtgcactaaagcaggcacctcacatgcaattccaacaatgttgcaacggtggacttaggttcttaagcaagcattcccaatccacgcgaagtaagatacaggtggctaaaagaagagctacagataatggaattcatccaaagactacgggacatcgggcacctattgtatgttctgctgggatgactattgtatttgttgcaactgaagtgcacccatggtgcaaaactggtggcctcggtgatgttgtaggaggactgcccccagctttggctgctatgggacaccgtgtcatgacaatagctcctcgttatgatcaatacaaggatgcatgggatacaagtgtccttgttgaggtaaatattggtgacacggtagaaactgttcgcttcttccactgctacaaaagaggagttgatcgtgtttttgttgatcatcctatgtttcttgaaaaggtatggggcaagactggagcaaaattgtatggtcctactactggaactgactatcgagataaccagttgaggttctgccttttgtgccttgctgctttggaggctccaagagttctcaatttcaacaattctgaatatttctctggaccatatggggaagatgttgtcttcgtagccaatgattggcacactgctattttgccatgttatttgaagagcatgtataagccaaatggaatttataaaaatgctaaggttgctttctgcatacataatattgcctatcaaggtagatttgcccgagcagacttcgatcttcttaatctacctgacagtttcttgccatcatttgattttattgatggacatgttaagcctgttctagggagaaagcttaactggatgaaggcagggatcattgagagtgatctggttctaacagtcagtccacattatgtcaaggaactcacttctggcccagataagggtgttgagttggatggtgtccttcgcacaaagcctctagaaattggaatcgtaaatggcatggatgtttatgaatgggatccttcaacagataagtacatcagcgtgaaatatgatgcaacaacggtaactgaagcaagggctctcaataaagagaggttgcaagctgaagttggattgcctgtggactcgagcatccctgttatagtttttgtcgggcgtcttgaagaacagaaagggtctgacatactcattgcagccattccagagttcgtgggcgagaatgtccagataatcgttcttggcacgggaaagaagaagatggaggaggaactaacgcagctggaagtgaaatatccaaacaacgctagaggcatagcgaaattcaatgttccattggcacacatgatgtttgccggggctgacttcattatcgtcccaagcaggtttgagccatgtggtctcattcagctgcaagggatgagatatggagtgattcctatctgttcatccactggaggacttgtcgacacggttgaggagggcgtcaccggattccacatgggttctttcaatgtcgagtgtgaaactgtagacccagccgacgtgacagcagtggcgtcaaccgtcacgcgagccctgaagcagtacgacaccccggcattccatgagatggttcagaactgcatggcgaaagacctgtcctggaaggggcctgcgaagaagtgggaggaggtgcttctgggccttggagtcgaggggagtcgagctggcatcgacgacgcagaggagatcgccccacttgccaaggaaaacgtagccactccgtgagggcttggtggtgcctcgactcggaaacacgcgttggtgataggaagcgtcttctaggatcctcctgggcggccttgtggctggtggagtgaggtgtccagtcagacacggtttcgcctctactactagtctactactactacctcattgtaatataatccttggcattctaaaaaatgccatgcctgctctaaaaaaaaaaaaaaaagggcggccgcacttcccgctttcgttcgggcgacaacgattattgtaatat

SEQ ID NO: 258751 - DNA, 1057 bp, Zea mays
  unsure (1)..(1057): unsure at all n locations
gcacaaagcctcttgaaattggaattgtaaatggcatggatgtttatgaatgggatccttcaacagataagtacaccagcgtgaaatatgatgcaacaacggtaactgaagcaaaggctctcaataaagagaggttgcaagctgaagctggattgcctgtggactcgagcatccctgttatagtttttgtcgggcgtcttgaagaacagaaagggtctgacatactcattgcagccattccagagttcgtgggcgagaatgttcagataatcgttcttggcacgggaaagaagaaaatggaggaggaattaatgcagctggaagtgaaatatccaaacattgctagaggcatagcgaaattcaatgttccattggcacatatgatgtttgctgggtctgacttcattattgtcccaaattcccatctgttcatcacctggaggacttgttgacacggttgagggggggtgtcaccggattccacatgggttctttcaatgtcgagtgtgaaactgtagacctagctgacgtgacggcagtagcgtcaaccatcacacgggcctagaacagtacggcaccccggcgttccaagaaatggttcagaactgcatggcgcaaaacctatcctggaaggtgcctgcgaagaagtgggaagaagtgcttctgggccttggagtcgaggggagtcaagctggcatcgacgacgcagaggagatcgctccacttgccaaggaaaacgtagctactccatgacgcttggtgcctcggaaacacgcgttggtgataggaagcatcttctaggatcctcctggccttgtggctggagtgagttgttcagtcagacacagtttcgcctctacaacatcttcctcctcctggtggtggtccgaactccgaagcaaattccagtgataaaggatgaactaagaggtccatgtttctattgctagaccttttgcctcctaaatagacgatgtactgcgcttgtaacaagaacctcactttcgtgtcaagtaatacccccaggtttcataaaaaaaaaaaaaaaaaanaaaaa

SEQ ID NO: 258752 - DNA, 502 bp, Zea mays
cgaagaagtgggaggaggtgcttctgggccttggagtcgaggggagtcgagctggtatcgacgacgcagaggagatcgccccacttgccaaggaaaacgtagccactccgtgagggcttggtggtgcctcggactcggaaacacgcgttggtgataggaagcgtcttctaggatcctcctgggcggccttgtggctggtggagtgaggtgtccagtcagacacggtttcgcctctactaccacagtaccactactacttcattgtaatataatccttggcattctaaaaaatgccatgcctggtctaattcttctgttcttgcggaacatacacttctcgcttccgttcggtcgacaacggttatgtaaatatagcgaatgctagcgggcagctcgaatcatcccaagtggtagggtcacgatggaattgtttgaaatggctcgttctagtaaaaaaaaaaaaaaaaaaaaaataataaaataaaaaaattggggcggccgc

SEQ ID NO: 258753 - DNA, 672 bp, Zea mays
  unsure (1)..(672): unsure at all n locations
tcctgaaatgtgtacaataatcctgatgaactactaaaacacttgccttaatctgaaatgagtacaataaaacatatataaggaaactcaaataagttaagtcttgcttgtccctcacaccataacatgactgatgaactactaaaacacctgcgaggtctgtcagcgaagccttctcgacaccttctgcttatgctaactccggtgcaaggtagatccttgctatacttgacaaactaaaggatgaaagggagcaacaagaaggaaaatatggggaggaagatgtggatggttcatgtctatcagcagaagaagatggtgactgggatgtagatgagccacatgaggaggacatcatttacgtaaaattgcccattgtcttctaggaacttggtcatcattcatccagaacacagcaggtgtgcttctactgatcgaaaatacatcttccaaataactatgaggacttaaccaagcaccattcaatcttcatttgcttctatagtttgggttgcgttctgcatacataatattgcctatcaaggtagatttgccagagcagacttcgatcttcttaatctacctgacagtttcttaccatcatttgattntattgatggacatgttaagcctgttctagggagaaagattaactggatgaagacagggatc

SEQ ID NO: 258754 - DNA, 779 bp, Zea mays
gaattcggctcgagttcagaatggcttctagcaagctctttgcggttggcctcaccgtcttactaagcattattggactgtgcaatgctattagggtggtaaaccacgccaccgcagatggacaaggcggtggaggtggtggaggcggcgggagcggaaccagctatggctccggatccggctccggctacggcgatgccgaggcctatgacggcagtgcccagtccccaacctctggccacgcatatggcagtggatccggggacggtggtggcgtttggcaaggtgacgacgagtgcgcgtccggttacggggcgggcggcgcatccggtgaaggccatggcgactcaggtaactccaacaccgatggcgctgcgaatgcgagcggagctggcggcgggggcggttctggtgggagcaatgggaatggcagcggatctggtggcggcagtggagttggagaaggcgaaggcgataactatggtccctatggttcgagctacgcaaatagcggtggcgccggaaggggaagcggaggcggtcgtaatggtggattcggcggcggttccggtggtggagcggggagcagtggtggtgccgcgtcaggttatgatgatggcagctacaacggatcaacaccttaattatgttcatttgtttgtaccacactgtcaagcaaccgacacgtactgatagggtttttctgtgcttgtgaaataatttggcctttctgagcgatgcagaagtttgttctaaaaaaaaaaaaaaagggcggccgc

SEQ ID NO: 258755 - DNA, 1304 bp, Zea mays
gaattcggctcgaggcaaagggaggctcggtggcctctcctacttcgccggcgccgagaagaaggacgaccgcgtgctcgtgccggatttggggtcgctcaccagcatccatgacagggcgcgtgagctcttctactacctcaagggtgggcaggtggactacggcgaggagcacagcaaggtttgcggccacaacaggtttgggagaatatatcatacagggcactatcctgtgtgggacgagcacaacccagtgcattttgtggggcactctgctggcgcgcaggttgtgagggtgctgcatcagatgcttgccgacaaggctttccctggtcatgatacttctgaagattgggttgtaagcctgacttccttgtcgggtgcacttaatggaaccacaagaacttactacgatggcatgctggtcgtagatggtaggtccatgaaatctatctgtcttcttcagctctgccggctcggagttattgtctacgattggctagacattccttggctgaagaattactacaattttggttttgaccactatgagatgtcgtggaggaaagtaggcttttcaggtctaattaatctactgctggggcacacgggcccatttgccagcggggattggattctacctgacctcacaatccaaggatccatgaaactaaactctacacttaggacctttcccaatacattctacttcagctatgctacaaagaaaacaagaaaaatatttggaattacagttccttcaagtgttcttggagtgcaccccattctctttctgagagtcctccagatgtgtatgtggcggcaccctcaaaatgcacctctgccttacaaaggatacagggatgaagattgggaagacaacgatggggctttgaacacaatctctatgacacacccccgcattcccatcgagcatccacaccattttgtagtcgatgattctgactgccatcctttgcaacctgggatatggtattacaagattattgaagctgaccacattctattcattgtgaaccgggaaagagctggagtgcagtttgatttgctgtacgatggcatttttcagcgctgcaggaaacatgcctttaggaagagcccacctactgtaccaaacgaaacgagccgatagcaaaactaagctgaagtatgtgtaggtagtacataggaagaaacaaggtgccacgacattttcattaactgtaaattacattgttgattgaacggcaataacatatttgcttctccaattttcggaaaaaaaaaaaaaaaaagggcggccg

SEQ ID NO: 258756 - DNA, 2149 bp, Zea mays
gaattcggctcgagtgaacatgaagcagcctctcgtgctgcccgcgcaccggtcgccccaggaccaggaaggaccccgaggcggaggtgcgccatgggcacaactacgtgccccgcgacgagcagttctcggaggtcaagcagctcacgttcggggccaccacgctgcgctccggcctgcacgcgctgctgccggcgctccgcccgctgctcatcaacaagaaggatctgcgcttcccgcacttccccgccatcgacgacctctacagcgacggcatcccgctgccggcgcagaccgggttcgacgccatccgcaccgtcgtcccgcgcatggtcaagctggtggaggacaccaccgaccacgtcctccgcttcgaggtgccggagatgatagagagggaccggttctcgtggttcaaggacgaggagttcgcgaggcagacgatcgcggggctcaacccgctgtgcatccagctcctgacggagttccccatcaggagcaagctggacccggaggtgtacggcccggcggagtccgccatcaccaaggagatcctggagaagcacatgagcggcggcgccgccatgaccgtggagcaggcgctcgcggcgaagcgtctgttcatcctggactaccacgacgtgttcctgccctacgtgcacagggtgcgcgagctgccggacacgacgctctacggctcccgcaccgtcttcttcctcacggacctgggcacgctgatgccgctggccatcgagctggtgcggcccaaatcgccgacgcagccgcagtggaagcgggtgttcacgcacgggcccgacgccaccgacgcctggctgtggaagcttgccaaggcgcacgtggtgacccacgacacggggtaccaccagctggtgagccactggctgcgcacgcactgctgcgtggagccctacatcattgccgcgaaccggcagctcagccggctgcacccggtgtaccgcctgctgcacccgcacttccgctacaccatggagatcaacgcgctggccagggaggcgctcatcaacgccgacggcatcatcgaggagtccttctggccgggcaagtacgccgtcgagctcagctccgtggcgtacggcgcgacgtggcagttcgacacggaggcgctgcccaacgacctcgtcaagcgcgggctggccgtgcgcggggaggacggggagctggagctcaccatcaaggactacccctacgcccacgacgggctcctggtctgggactccatcaggcagtgggcgtccgagtacgtcaacgtctactacaagtccgacgaggccgtggccgccgaccccgagctgagggcgttctgggacgaggtgcgcaacgtggggcacggcgacaagaaggacgagccgtggtggcccgtgctggacacccgcgacagcctggtggagacgctgaccaccatcatgtgggtcacctccggccaccactcggccgtcaacttcgggcagtaccacttcgccggctacttccccaaccggccgaccaccatccggaagaacatgccggtggaggagggcgggccgggcgaggagatggagaagttcctcaagcagccggagacgacgctgctggacatgctgcccacgcagatgcaggccatcaaggtcatgacgacgctggacatcctctcgtcgcactcgcccgacgaggagtacatgggagagttggcggagccgtcgtggctggaggagcccatggtgaaggcggcgttcgagaagttcggcggcaggatgaaggagatcgagggattcatcgacgagtgcaacaacaacccggagctcaggaaccggtgcggagcagggatcgtgccgtacgaactgctcaagcccttctccaagccgggagtcaccgggaggggcatccccaacagcatctccatttgacccgtccgtcctctccatccaatgggggtttgccttattgcgtgcacgctagctagctgcttggaaataaaaataattaaaataaaaggtctcgtctgtactattgtattgtaccatggatcatatcgtacatgttgtgtcaatgcaaagaggcacgtttgagttaaaaaaaaaaaaaaaaaaaaaaaaaaaaaaagggcggcggctcgcgatctagaacttag

SEQ ID NO: 258757 - DNA, 1176 bp, Zea mays
cttacgcgtccgcccacgcgtccgcccacgcgtgcggtactggctagcttgtttcagtcgtccgatctgatctacagaaaaagcaggggcagggcagctagccatgattcagatgaacatgaagcagcctctcgtgctgcccgcgcaccggggcaatgtcatcggctcgcgcctggcgtcgtcgccctctccggtggcggcggcggcggcggcggccagcaggcggaggggcgtcgtgtcctccccccgctcccggctccagcgccacatgcggctgccgaggatcagctgcagcgccaccgaggaggccagcggcgccgtgtcggccgtcaccgtggagaagatgctgacggtgacggcctcggtgcaggcggcgccggccatcggtcagatgtacttccagcgcgccctcgacgacgccggcgacttcttcggcaagacgctgctgatggaactcgtcagctccgaggtcgacgcaaagacgggtgtggagaagccgcgggtgacggcgtacgcgcacaagacgctgcgggagggccactacgaggcggagttcaaggtgccggcgtcgttcgggccggtgggcgcggtgctggtggagaacgagcaccacaaggaggtcttcatcaaggagatcaagctcgtcaccggcggcgacacagcaccgccgtcaccttcgactgcaactcctgggtgcactccaagttcgacaacccggagaagcgcatcttcttcaccctcaagtcatacctgccgtccgacacgcccaaggggctggaggacctgaggaagaaggacctgcaggcgctgcgcggcgacgggcacggcgagcgcaaggtgttcgagcgcgtctacgactacgacgtgtacaacgacctgggcgacccggacaagaacccggcccaccagcggcccgtgctgggcggcaacaagcagtacccatacccgcgccgctgccgcaccggccgccccaggaccaagaaggaccccgagacggagatgcgcgagggccacaactacgtgccccgcgacgagcagttctcggaggtgaagcagctcacgttcggggccaccacgctgcgctccggcctgcacgcgctgctcccggccatcaggccgatgctcatcaagagggagctgcgctttccgcaacttccgccattgacgacctttaca

SEQ ID NO: 258758 - DNA, 570 bp, Zea mays
aagttcctcaagcaaccggagacgaagctgctggacatgctggccaagcagattcaaggcatcaaggtcatgacgacgctggacatcctctcgtcgcactcgcccgacgaggagtacatgggggagttcgcggagccgtcgtggctggcggagcccatggtgaaggcggcgttcgagaagttcggcggcaggatgaaggagatcgaggggttcatcgacgagtgcaacaacaacctggacctcaagaaccgctgcggcgccgggatcgtgccgtacgagctgctcaagcccttctccaagccgggagtcaccgggaggggcatccccagcagcatctccatctgatccatcctcagcatgcattagtccaattaattaaatcgggggttgtactattattgcatgcagaggctgcttgtcgaataaaacgtactatatgtacgattgtattgtacatgtgtgtcaatgcaacaagaggcacgtttgagactttgagttaataccaattaaactagtaagatggaattgtacaaaaaaaataaaacccacgcgttcgcacaagtgtctgta

SEQ ID NO: 258759 - DNA, 797 bp, Zea mays
cacagagtcacagacagaccagcgctctgcatggccatcattctggtgaccacgcagaaaggaccagccattcccgggcaaagatggtttcagaagccagcgagcttggcattggcacacactatacacactggtcgctgatattttgattccccacgtgcgacacggcatctacccgtcgaggaactccacatctatctctccatgaagctcgctatatatgcatgtgagcttggcattggcacaccacagagcagccacttggatccggtgctcagcggaacagctagctatagcctgtagctagcagctagcttcagtcacaggccggacggtcggctcacacacagctagccgccgccgctgctagcttagccaccagtagtccgatctgatctacaggcagggggccagcaggggcagctagctagctagccgcgcgccggcgccatgatgaacctgaacctgaagcagccgctcgtgctgcccgcgcaccacagcaatgtcgtcggctcgcgcctgtcgtcgtcgtcgccctcggcagccgccgccagcaggaggaccggcggcggcgtgtcctcccggtccggctcccggcggcacgtgcggctgccgaggatcagctgcagcgccaccgaggaggtcagcggcgccgtgtcgtccgtcaccgtggagaggatgctcacggtgacggcgtcggtggaggcgtcgccggccatcgggcagatgtacttccagcgcgccgtcgacgacatcggcgacctcctcggcaagacgctgctgctcgagctcgtcag

SEQ ID NO: 258760 - DNA, 499 bp, Zea mays
gccggctgagctgccggttcgcggcaatgatgtagggctccacgcagcagtgcgtgcgcagccagtaggctcaccagctggtggtaacccgtgtaccgcctcctgcacccgcacttccgctacaccagggagatcaacgcgctggccagggaggcgctcatcaacgccgacggcatcatcgaggagtccttctggccgggcaggtacgccgtcgagctcagctcagcggcgtacggcgccacggggcagttcgacacggaggcgctgcccaacgacctagtcaagcgtgggctcgccgagcgccgggacgacggcgagctggagcccaccatcaaggactacccctacgcgcacgacgggcccaagggccggaacaccaaaaggcaacgggcggacgaatacgacaacgaatacaacaagaccgacgagggcgaagacggcgaccccgagccgaaagggtactgggacaaagggcgcaaacggggccacggcgacaaga

SEQ ID NO: 258761 - DNA, 373 bp, Zea mays
ggttctcgtggttcaaggacgaggagttcgcgaggcagacgatcgcgggagtcaacccgctgtgcatccagctgctgactgagttccccatcaagagcaagctggacccggaggtgtacgggccagcggagtccgccatcaccaaggagatcctggagaagcagatgaacggcgcgctgaccgtggagcaggcgctggcggcgaagcggctgttcatcctggactaccacgacgtgttcctgccctacgtgcacaaggtgcgggagctgcaggacgcgacgctctacgcctcgcgcaccatcttcttcctgacggacctgggcacgcccaccccgctggccatcgagctgacgcgagaacaaagtcgccggca

SEQ ID NO: 258762 - DNA, 1206 bp, Zea mays
gaattcggctcgaggggggagctgctccatggcaagaaaggtggccatctccactgggacactcgctacaagatcgccgtcgaggccgccaaggggctcagctacctgcaccacgattgctcgccgccgatcctgcaccgcgatgttaaatcgaacaacatcctgcttgattccgatttcgaagcacacgttgctgatttcgggctcgccaagttcttgcaggactctggcgcatcacagtgtatgtctgccattgctggctcctatggctatattgccccagagtacgcatacaccctcaaggtggacgagaagagcgacgtgtacagcttcggcgtggtgctcctggagctggtaacgggaaagaagccggtaggcgagttcggggacggcgtggacatcgtccactgggtcaggtcgacgacggcgggcgcgagcaaggagcaggtggtcaaggtcatggaccccaggctgtcgagcgtgccggtgcacgaggtggcgcacgtgttctgcgtcgcgctcctctgcgtggaggagcagagcgtgcagcgccccacgatgcgggaggtggtgcagatgctcggcgagctccccaagccagccgctgccgctgcagctgcagggcaaggagacgaggttcccggcagcggcgacggcgacgaatgttccgccgcgccgtcgggtgctccggcagctgatgaatctgttgaagcgccgcatggcgaagccaccaaagaaccgagctcacagtcttcgccgaccactgatctcatcagcatctgagagctgtgtcgagcttgtttttttttcttctcgttgctatgtttccttccttctccttgcgaagttcagatgtttggatgtttctagattattagggtttggtgttttaggtctcacctgcacttagggtggtctctgagattcagacatcttgtgttcatccatcttcatttaggtaggccccgggattcagacatcttgtgttcatccatcttgtgttcatgcatcttagcctcacttaggacactgctgtgtacagtagtacatatcaagctccctaaatctccattttgctgtcagaactgaaggaccatttagggggggattaaggagcctaggattatggagcagtcaaggtcgttaatgttgctgttaaaaaaaaaaaaaaaaaaaaaaaaaaaaaaaaaaaaaaagggcggccgc

SEQ ID NO: 258763 - DNA, 665 bp, Zea mays
gaattcggctcgagggatagaagcttggagcctcgtgtctccgattttggcctcgcgaggctgcttgtagacagtgctgcccacgttaccaccgtcgtcgcgggcacctttggatacctagcaccagagtacttgcaaaacgggcatgctactgagaaatcagacgtgtatagctttggagtgcttatgctggagctagtgaccggaaagaggccgaccgattcttgcttcatcaagaagggactgaacattgttggctggctgaacaccctaactggggagcaccggctggaggatatcatcgatgagcgatgcggcgatgtggaggtggaagccgtggaagccatccttgacatcgcagccatgtgcaccgacgcagacccggggcagcggccatcgatgagcgctgtcctcaagatgctggaggaggagatcttgtccccctgcatgagcgagctgtgctacgagcagcacctggagctctgagctgaggaggaagatgttgctggctgcgtgcgtgaagcgtcatggatgagactgaagtttttgtactgtagatacaacgatgatggatgagtgtaggtgatgttttgtgtgctcttagggccaatgaagaacagtaagcagcagttcgtgagtgaaaaaaaaaaaaaaagggcggccgc

SEQ ID NO: 258764 - DNA, 416 bp, Zea mays
ggatatcgttgacgagcgatgcggcgacgtcgaggtggaagccgtggaagccatcctggacatcgcagcgatgtgcaccgacgcagacccggcgcagcggccgtccatgagcgctgtcctcaagatgctggaggaagagatcctgtccccctgcatgagcgagctgtgctacgagcagcacctggagctctgagccgaggaagcctgacctgactacgatgcagtgcatgatggatgagactgtgtaggaagcaaaagttttgtagatatgacgatgatgaaccgcgtacgtagtgtaggtgtttgtgagcagctcaaaagtaggacaagtgcagaaccaacaacctgatcggcatgttacatacatagatcttctaatcctttttggcctttttgtctcagttttctttggaggg

SEQ ID NO: 258765 - DNA, 2165 bp, Zea mays
ccccctcggctcccccaaaccccgggccactgctccgctcctcctccttgccgccgtgcggttgagcgccgacgagcaagcccgacgccaccctatggctatggaggtccgccgcagggttccgccgccgcacgggagcgccccacggcgccagcaggcgaccggcggcgaggggcagcgggtgcgtgtgcaggcgggggacgcgctgccgctgccgatccggcacacgaacctcatcttctcggcgctgttcgccgcgtcgctggtgtacctgatgcggcggtggcgggagaagatccgctcctccacgccgctccacgtggtctccctcgccgagatcttcgccatctgcggcctcgtggcgtcgctcatctacctcctcagcttcttcgggatcgccttcgtgcagtccgtcgtctccaacagcgacgacgaggaggacttcatcatcgactcccgccacggacaggcgcgggcgccgccgccgcccgcgccggcggccccgtgtgcgctgctggggagccccgccgccgcgccggagaaaatgccggaggaggacgaggagatcgtggccgccgtcgtggcagggaagatcccgtcctacgtgctggagtctaggctgggagattgccgccgggccgccggcatcaggcgggaggcgctgcgcaggatcaccgggagggagatggacgggctcccgctcgatgggttcgactacgcgtccatcctcggccagtgctgcgagctgccggtgggattcgtgcagcttcccgtgggcgtcgccggcccgctccttctcgacggccgccggctctacgtaccaatggccaccaccgagggctgcctcgtcgccagcaccaaccgcggatgcaaggccattgccgagtccggtggggcctccaggaattcggctcgagctcgagccgcgcgagccccggccgtccggttcccatctgcacgccgcgccgccgagctcaaggcctttttggaggacccagcgaactttgacaccctggctatggtgtttaacaggtcgagcagatttggaaggctgcagggagtgaagtgtgcgattgcagggaggaacctttacatgaggttcagctgcagcacaggggatgccatggggatgaacatggtctccaaaggtgtacagaacgtgctggactacctccaggctgacttccctgatatggatgtcatcagcatatcaggtaacttctgttctgacaagaagtcagctgctgtgaactggatcgatggccgtgggaagtcggtggtttgcgaggcggtaatcaaggaagaagttgtgaaaaaggttctcaagacaaacgtacaggctctcgtagaattgaacgtgatcaagaaccttgccggttcagctgttgctggagctcttgggggtttcaatgcccatgcaagtaacattgtggcagccatcttcattgctactggtcaggaccctgcacagaacgtggagagttcccagtgcatcaccatgttggaagctataaatgatggcaaagatctccacatctctgttactatgccatctattgaggttggcacagttggtggaggcacgcagctggcctcacaatctgcctgcttggacctgcttggcgtcaaaggtgccaacagggaatctccggggtccaacgcgaggctcttggccacggtggttgcgggtgcggtcctagctggggagctgtcccttatctctgcgcaggccgctggccatctggtcaagagccacatgaaatacaacagatccagcaaggatatgtccaagacccttgcagaggaaacagacaaacccaagaaatgctgaataatatcaagtagttgttctatagccctttgggagaaaaggagcagaaagggtcgtacaggatgactttcttgcggcatgctcaggtggaaaggggggaaaaagaccttcaggcgaaaagagataattcagtcgccttgtcatatttaccaggcggtgagacctgttgtggatcctggagtatgacctatttaatttgttgatgttgttgttatagttcctctaccgtacttgaccccgtttgcatcttgttttgaccgtcccatgggcattggagaatctgaccatgggttttgtccaaaaaaaaaaaaaaaaaaaaaaaaagggcggccgc

SEQ ID NO: 258766 - DNA, 752 bp, Zea mays
tcctcgcgtccgcggacgcgtgggttggcgtcaaaggtgccaacagggaatctccggggtccaacgcgaggctcttggccacggtggttgcgggtgcggtcctagctggggagctgtccctcatctctgcgcaggccgctggccatctggtcaagagccacatgaaatacaacagatccagcaaggatatgtccaagacccttgcagaggaaacagacaaacccaagaaatgttgaataatatcaagttgttgttttataaccctttgggagaacggagcgaaaagggtcccacaggatgattccttgcggcatgctcgggtggaaagggaaaaaaacccttctggcgaaaagagagaattcagtcgactcgtcatatttaccaagcggtgagacctgttgtggatcctggagtatgacctatttaattcgttgatgttgtcgttatagttcctctacactacactcgttgaccccgcctgcatctagttttgcccgtccatgggcggagaatctgaccatgggtttgtcccaagcttgcatcacagtggcgcatccagtgacccacgtgatctctgctttgccgcagaaaatttttgcggagcaactgccgggtgctttgtatttcagctttgtaaatttacttttatccagtcgttctgagtccaagccgtcagtgcagtcggtggtgtagttgattaaagtacgaaatgtaaatggaataataaaaataaagaactgtgttttgcattt

SEQ ID NO: 258767 - DNA, 737 bp, Zea mays
ttgtctcgtgggcggacgcgtggggccccatgtgcgctgctggggagccccgtcgccgcgccggagaaaatgccggaggaggacgaggagatcgtggccgccgtcgtggcatggaagatcccgtcctacgtgctggagactaggctgggagattgccgccgggccgccgggatcaggcgggaggcgctgcgcaggatcaccgggagggagatggacgggctcccgctcgatgggttcgactacgcgtccatcctctgccagtgctgcgagctgccggtgggattcgtgcagcttcccgtgggcgtcgccggcccgctccttctcgacggccgccggctctacgtaccaatggccaccaccgagggctgcctcgtcgccagcaccaaccgcggatgcaaggccattgccgagtccggtggggcctccagcgtcgtgctcaaggacgggatgacgcgagccccggccgtccggttcccatctgcacgccgcgccgccgagctcaaggccttcttggaggacccagcgaactttgacaccctggctatggtgtttaacaggtcgagcagatttggaaggctgcagggagtgaagtgtgcgattgcagggaggaacctttacatgaggttcagctgcagcacaggggatgccatggggatgaacatggtctccaaaggtgtacagaacgtgctggactacctccaggctgacttccctgatatggatgtcatcagcatatc

SEQ ID NO: 258768 - DNA, 639 bp, Zea mays
gtttttaaatacaacaggtccagcaaggccctgggattgtttacagacatacccatgtaatgttgaataatatcaacttgttgttttataaccctttgggaggagaacggagcgaaatgggtcccacaggatgattccttgcggcatgctcgggtggaaagggggaaaaaaaagcccttcaggcgaaaagagagaattcagtcgccttgtcatatttaccaggcggtgagacctgttgtggatcctggagtatgacctatttaatttgttgatgtcgttgttatagttcctctaccgtagttgaccccgtttgcgtcttgttttgcccgtcccatgggcattggagaatctgaccatgggttttgtcccaagcttgcatcacactggggggacctctgctttgcggcggtcccgtctcaggaaaaaaaaaatttgcgctggtaactgccgggtgctgtgtcctgtgtatttcagctttgaaatttttatccaatgcttttgagtcgaagagtcagtggactcgatgatgtggttgtaaagaaaaaaaaatgcttttgtgtggaagagtcagtggagtcgatgacgtggttgtaaaaaaaaggtgtgcttcagaacaagagtacatcacgttgcctctcc

SEQ ID NO: 258769 - DNA, 1406 bp, Zea mays
cccacgcgtccgcgcaatctgtaagtgcaaatgagatcaagaaatatacacgtaggtagagcatacgtgtatcctttcctttcttgctagctccatccactccactccactctgctactccacctacctcccggctcccggatccggcgatggagaagatgctccactcagccccggcccacggcaggctcccggagtgcttcatcttcccggccgacaagctcccgcaggccaaggccacctcagcgacggtctccctgcccatcgtggacctctccctcggccgcgacgaggtgcggcgcgccatcctcgaggccggcaaggagatcggcttcttccaggtggtgaaccacggcgtctccctggaggcgatgcaggacatggagacggtgtgccaggagttcttccggctgccggcggaggacaaggccgggctgtactcggaggacacggggagggcgacccggatctactccagcaccatgttcgacacgggcggcgagaagtactggcgcgactgcctccgcctggcctgctccttccccgccgtcggcgacagcgccgcggcctggcccgacaagccccggaggctccgggaggtggtggagaggttcacggtgcagacgcggggcctggggatggagatcctgcgcctgctgtgcgagggcctcggcctccgccccgactacctggaaggggacatcagcggcggcgacgtcgtcctccacgtcaaccactacccgccctgccccgaccccaacgccacgctcggcctgccgccgcactgtgaccgcaacctcctcaccttgctcctccccagcatggtacctggcctcgaggtcgcctacaggggcgactggatccgggtggagcctgtgcccggcgccttcgtcgtcaacttcggatgccagcttgaggttgtgacgaacgggatcttgaagagcatcgagcaccgggtgatgaccaacctgggagtggcgcggacaacggtggccacgttcatcatgcccaccacggactgcctcatcggccccgccgccgagttcctcagcgacgacaacccgccgtgctaccgcaccctcaccttcggcgacttcaagcgcatctacagcgttgtcaagctgggctcgtcgctcaacctcaccacaaatctcaagaccgttcagaaggagctctgattatccatcaaactttgtagcctccctcgaattggcggcgaggaactagctagctagctggcaagatgtagtctgtgtcatcactgtcatgttactgcccggacgtcatgctgatgatagaaatgacggaataaaaatgaaatgccaaatatgcgtgtatggcgcacgcatattcttgctaaaaaaaaaaaaaaaaaaaaaaaaaaaaaaaaagggcggccgccgact

SEQ ID NO: 258770 - DNA, 932 bp, Zea mays
cccacgcgtccgcagagtcaattgagaaatgggaaaagtggaaacagaaccactgccaaccaaacttctggaaaaatgttgatcctggcggtaagtgtggtccataccatcctatcaatttagcctcagttgaagttgagggttctgtaatgaatgaggtagtggggagtcaaggtggtctctgccaggggtattttgaaagtgataatttactggagccaataaagtccaatttgaaggttgttaatcgccacaaccatgacacaatttctatggctgtgattgacaagatgggccacatagcagttgggacatcaaccaatggcgctacatttaaaattccaggaagggtgggcgatggaccaataccaggatcttcttcatatggtgatgatgaagttggcgcttgtggagcaactggtgatggtgatattatgatgcgcttccttccatgctaccaagtggtagagagcatgcgacaagggatggatcctcgagacgctgccacagatgctatatcgagaattgcccgcaaatacccagatttcatcggtgccgtatttgcagtcaacaaggaaggggtgcatgccggggcatgccacggatggacattccaatactccgtacggaattccagcatgcaggatgtggaggtcattacagtatatccttagcaatcacaattcaacgaaaacaaaagtttgctttatcagcaggtaaaatatttactcgtgcgtggtatggtcacgaccgcccccctgttgatgttttaaaaatgttctgtgcggattattccaatgttttcttaaaatcgattgttttgaaactagtagtactgtatgtaccaatctgaccttagttgtttttttccctggaaagtgttgaatgtcttggaaaaaaaaaaaaaaaaaaaaaaaaaagggcggccgccg

SEQ ID NO: 258771 - DNA, 375 bp, Zea mays
aaggaaggggtgcatgccggggcatgccacggatggacattccaatactccgtacggaattccagcatgcaagatgtggaggtcattacagtatatccttagcaatcgcaattcaacgaaaacaaaagtttgctttatcagcatgtttaaaaatgtcccggctgcccccctgttgatgttttaaaaatgttctgtgcggattatttcaatgttttcttaaagtcgattgttttgaaactagtagtactgtatgtaccaatctgaccttagttgttttttccctggaaagtgttgaatgtcttggaaagtcgaaaccttggatcttctctgttggagttggagttgattgtacacaagttagacttggatatagtc

SEQ ID NO: 258772 - DNA, 827 bp, Zea mays
taatacacgcgtccgcccacgaattcggctcgagcgaggagcttcccgcggccgagcagcaggcagccgccgaggcggaggccgcggctcctgctggtgccgaggagcccgtcgcggccgaaccggccgccgaggcggaggctgctgctcctgctggtcccgaggagactcctgcggtcgagcaggaggcagccgccgaggaggaggctgctgctgctcctcctgctggtgccgaggagcccgccgcggccgagcctgtcgccgaggcagaggctgctgctcccgaggagctcgccgcggacgagccggaggctcctgctcctgctggtccccaggagccggccgccgaggcggaggctgctgctcctgaggagcccgagaaggccagcgagtgaggccgtgcgcacgcagcggcggcggccagggcccaggggatcggcgtgcgcgcgtggcggggtagtcgctcgcgcgcgtacatggcagtatgacacgggattttgctgttcagtacgctacggttattactggcgtctctctctgtgtgtgtgtgtgtctcgtacgtagcccggtacgtagctagcagtgactgtcgcgtggacgtgtccggtgcgggctgcgagtgacgtgggctaaataaagtgtgcgtcgggtggtaatggtggtggggcccggtgtcagtggcgcggtgccccatgcctgccgcggctgcagcttgttgtgtcttgtgttggttggttcctgttctttctgtctatctattctcacgcatggcagtttgggtatggtaaaaaaaaaaaaacaaaaaaaaaaaaaaaaaagggcggccg

SEQ ID NO: 258773 - DNA, 1083 bp, Zea mays
tcccacgcgtccgcccacgcgtccgcccacgcgtccctctcctctcctctaggctctagtcctctcgcatccgcagcttccccagccagctagggtttgcagatgacgaccgcggcgcgccccacctgggcgccggccaagggcggcaacgagcaggggggcacccgcatcttcggcccctcccagaagttctcctcccgcgacctcgccgcgcacacctccctcaagccaagaaaagacggtcaacagacccaagaggagttacagaagaggaatctcagggaggaacttgaggaacgtgagcgcaagcactactcttccaaggataagtcctatgccgaagaaagagaccggcggaaaagctctagccatctactcttagaaggttcaaagagagagacagaggataagatagttccacgagaaatcgatgctgatgactccgatgtggagcctaaaagcgatgacgagagcgatgaagatgatgatgacgacgacactgaagctctaatggcagagcttgagaggattaagaaagaaagagccgaggagaagcttagaaaggagcggcaacaagcagaagaggaggccaagatgaaggaggctgaactgatgcggggaaacccgttgattaatatcaacaatgctggctccttcagtgttaagagaaggtgggacgacgacgtggtattcaagaatcaagcacgaggagagaccaagacaccgaaacggttcatcaacgacaccatcaggagtgatttccaccgtaaatttcttcagaggtacatgaagtgacgcttccgtcgttcacaattcagcctggagcccctcatcgttatcatgtttgtgtatgagcgaaagatcattattgtgttgttgtatgaaacaagagtgtaaacatatgtctactacttaacaaagttatgctgagcaatgcatatcctagttgaatgtgacaatgctatgttttctatattttgacgttatttggttgtaatcatatttaagtttgactaggaaagatgagctcagagagcagaaaaaaaaaaaaaaaaaaaaaagggcgccccggatgagtgcgtc

SEQ ID NO: 258774 - DNA, 643 bp, Zea mays
cggactcgtgggctcctgctggtgccgaggagcgcggggcggccgagcctgtcgccgaggcagaggctgctgctcccgaggagctcgccgcggacaagccggaggctcctgctcctgctggtccccaggagccggccgccgaggcggaggttgctgctcctgaggagcccgagaaggccagcgagtgaggccgtgcgcaggcagcggcggccagggcccaggggatcggcgtgcgcgcgtggcggggtagtcgctcgcgcgcgtacatggcacagtatgacacgggattttgctgttcagtacgctacggttactggcgtctgtgtgtgtgtgtgtcgtactcgtacgtagcccggtacgtagctagcagtgactgtcgcgtggacttgtccggtgcgggctgcgagtgacgtgggctaaataaagtgtgcgtcgggtggtaatggtggtggggcccggtgtcagtggcgcggtgccccatgccttggcttggggtggttggttcctgttctttctgtctatctattctcacgcatggcagtttgggtatggtatgggtcgtcttctttggttacgttctgtttgtgtcattgtgtgatgatatgatcttctttatataataatagagccagtcgttcatcag

SEQ ID NO: 258775 - DNA, 547 bp, Zea mays
cccacgcgtacgcggacgcgtgggcggacgcgtgggctagaaggccagcgagtgagtgccgtgcgcacgcagctgcggcggccagtgcccagtggatcggcgtgcgcgcgtggcggggtagtcgctcgcgcgcgtacatggcagtatgacacgggattttgctgttcagtacgctacggttactggcgtctctctctgtgtgtgtgtgtgtctcgtacgtagcccggtacgtagctagcagtgactgtcgcgtggacgtgtccggtgcgggctgcgagtgacgtgggctaaataaagtgtgcgtcgggtggtaatggtggtggggcccggtgtcagtggcgcggtgccccatgcctgccgcggctgcagcttgttgtgtcttgtgttggttggttcctgttctttctgtctatctattctcacgcatggggcagtttgggtatggtatgggtcgtcttctttggttacgttccctgcattctgtttgtgtcattgtgtgatgatacgatcttctttatataataatagagccagtcgttcatcagcc

SEQ ID NO: 258776 - DNA, 505 bp, Zea mays
  unsure (1)..(505): unsure at all n locations
cgagaaggccagcgagttaggccgtgcgcacgcagcggcggcggccagggcccaggccccaggggatcggcgtgcgtacatggcagtatgacacgggattttgctgttcagtacgctacggttactggcgtctctctgtgtgtgtgtgtgtgtgtgtcgtacgtagcccggtacgtagctagcagtgactgtcgcgtggacgtgtccggtgcgggctgcgagtgacgtgggctaaatanagtgtgcgtcgggtggtaatggtggtggggcccggtgtcagtgcgcacggtgccccatgcctgccgcggctgcagcttgctgtgtcttgtgttggttgagttcctgttctttctgtctatctattctcacgcatggcagtttgggtatggtatgggtcgtcttctttggttacgttctgtttgtgtcattgtgtgatgatatgatcctctttatataataatagagccagtcgttaatcagcaaatacaacaaccaaaagaataaa

SEQ ID NO: 258777 - DNA, 508 bp, Zea mays
acgcgcacgcttgcgtttcacgcgtccgatgacacatggtccgtcgacgcaggggctgctgatcctgaggagcccaagaaggccagcgagtgatgccgtgcgcacccatctgctgcggccagggcccaaggggatcggcgtgcgcgcgtggccgggtagtcgctcgcgcgcgtacatggcagtatgacacgggattttgctgttcagtacgctacggttattactggcgtctctctctgtgtgtgtgtgtgtctcgaacgtagcccggtacgtagctagcagtgactgtcgcgtggacgtgtccggtgcgggctgcgagtgacgtgggctaaataaagtgtgcgtcgggtggtaatggtggtggggcccggtgtcagtggcgcggtgccccatgcctgccgctgctgcagcttgttgtgtcttgtgttggttggttcctgttctttctgtccatctattctcatgcatccccgtttgggtttaaataaaaaaaaaaaaataataggaa

SEQ ID NO: 258778 - DNA, 631 bp, Zea mays
gtcgcctctctcctcctttcgcgtcgtctccatcctctcctctccactcctctcctctcgtgtctacagcttcccttgctggctagggtttgcagatgacgacggcgacgtgccccacctaggcgccggccaagggcggcaacgagcacgggggcactcgcattttcggcccctcccagaagtacttgtcccgcgacctcgccgcgcatacctcgctcaagcccagaaaagacggtcaatagacccaagaggagttacagaagaggaatctcagggaggaacttgaggaacgtgagcgcaagcactactcttccaaggataagtcctatgctaaaaaaagagaccggcggaaaagctcaagccagctactcctagaaggttcaaagagagaggcagaggataagatagttccacaagaaattgatgcagatgactccgatgtggagcctaaaagtgacgatgagagagaagacaacacaacatcttccctgacattgtttaggcagaaagtggagcaactgcgagatgaacttaggcgacatcaagattaattgaagcaacagctgcgcaacatgaatattatgctacacagattcaacaacagcatacactcatacaacaactagcacag

SEQ ID NO: 258779 - DNA, 321 bp, Zea mays
cctttgattaatatcaacaatcctggctccttcagtgtcaaaagaaggtggtaccacgacgtggtgttcaagaatcaagcacgtggagagaccaagacgccgaaacggttcatcaacgaccccatcaggagtgacttccaccgtaaatttcttcatagatacatgaagtaatggtattgtcgtgtacaattcagatgtctccgtcctgtttatgtcagtgcattggttctctctcatcgttgttatgtttcgtgtatgagtgaccggccattgttgtgttgtatatgaaacaaaacatctgtcagcatcttaacaatgcct

SEQ ID NO: 258780 - DNA, 738 bp, Zea mays
tgacgatgtgcgtctgcagatgtcgccggcggcgataaaaaataaaaaatcggctaaaggcggcaacgatcaagggggcacccgaatcttcggcccctctcagaagtactcgatccgcgacctcgccgcgcacacctccctcttgcccagaaaagacggtcaacagacccaagaggagttacagaagaggaatctcagggaggaacttgaggatcgtgagcgcttgcactactctttccatggatatgtcctatgcctattgttagagactctttttttaatcttctagccattttcttttatatttgttttttgttagttcctttttttatattttttgtttctctctgtttttgttgtctgttctttttttattttttctctcttttttttttattttttatcttttctttttttttttctttttttttcttttctactttttattctttttattttttattttttatttatttctttatctttttttctattttttttatttattttttctattttttttttcttttcctattttttttttatatctatattttttatttttttcttttttttttttttttttttctgtttttttatttttttatcttattttcttttctttttcttttcctctttctttattttctatctttttctttcttttctttttttttttcttcttttttcttttatttattcttttctattatctttttatattatctactttttttt

SEQ ID NO: 258781 - DNA, 1481 bp, Zea mays
ggacgcggttccggccgctgtcgctgaacgtgcccaagccgctcttccctatcgccggccagcccatggtgcaccaccccatctccgcctgcagccggatccccaacctggcacagatataccttatcgggttctacgaattcggctcgagcgcgctatatgtctcgtctatctccaacgagctcaggatccctgtcaggtacctgcgagaggataagcctcacgggtcagctggagggctctacatctttagagattacatcatggaagacagcccgtcacacatagttctgcttaactgcgacgtctgttctagcttcccccttccagacatgctggaggcccataaaaaatatggaggaatgggtactttactagtcaacaaggtatctgcagagtcagctaaccagtttggcgagttggtagctgatcctgaaacaaacgaactgctgcactatacggaaaagccagagacttttgtgagtgatctcataaattgtggagtatatatatttacccccaatatctttagcgccattgaggatgtcttaaaacagaaaaaagacagagcaaatttgcggcgtgtatctagctttgaagctcttcattcagcaaccaaggctcttccaccagactttgttcggttagatcaagacattttatcccctcgagcaggaaagaaagagctgtacacataccagacacttgatttctgggaacagatcaaaaccccagggatgtctttgagatgctctgggttatatctctctcagtttcgccatacctctcctcatcttttagcctcaggagatggcaaaagaactgccactattgttggcgatgtctatatccatccatctgccaaggtgcatcctacttcaaagattggcccaaatgtctctatatcagcaaatgcacgcgttggagctggtgccaggcttatcaattgcataattctggatgatgttgaaattatggaaaatgctgttgttatacattcaattgtagggtggaaatcatccattggaaaatggtcacgtgtacagggcgaaggtgatcaaaatgccaaacttggcattactattcttggtgaagccgttgatgttgaagatgaagtagtgatagttaacagcatcgtgctcccaaataaaactctcaatgtcagtgtccaagaggagatcatcctataatagccgtcattttttgttttatccctaataaggtctgagtaccaatcacatagtttaagtttattcattctcaccatgtaagcttctattagattgagattattgttttgggtttataccttgcagcatgccactgcacaatcttgacttgctgtgctactttgattagcgagtgtggtgtaaaatgtacgaacaactaacacccgagctgctagcttcagattaaagcaagctgttcaaactaaaaaaaaaaaaaataaaaaaaaaaaaaaaaaaaaaaagggcggccgc

SEQ ID NO: 258782 - DNA, 408 bp, Zea mays
actattcttggtgaagccgttgatgttgaagatgaagtagtgatagttaacagcatcgtgctcccaaataaaactctcaatgtcagtgtccaagaggagatcatcctataatagccgtcattttttgttttatccctaataagcatgccactgcacaatcttgacttgctgtgctactttgattagcgagtgtggtgtaaaatgtacgaacaactaacacccgagctgctagcttcagattaaagcaagctgttcaaactgccgcagctgtaatccatagagacaaaacactattgaagacttctagcccacaagtgaaattggaagtgtaatcaaatcctaatataattgtcataatcatattgttaatctgtataagtgaattgcctaccttttttctaacagctt

SEQ ID NO: 258783 - DNA, 1525 bp, Zea mays; identical to SEQ ID NO: 233

SEQ ID NO: 258784 - DNA, 1323 bp, Zea mays
tggtataacaagtagtagtgtacgattctcccggggagctgggcgatctagatggagatggcggggtctctccctgtgcccagcgtgcaggccatggtggccgctggtcgtcatgcaccagtgccaccaaggtatctccgtccagatctggccgcggatgtcgtcgctgccgacgacgcgacgaccatccccatcatcgactcccagcgactgctgctggtcgacccagaggaatctgcgcgcctccatgcggcctgccaggagaattcggctcgagagctgataaaccacggtgttccggacgatgtgatggaggcgatgaaggccagcacccagtcattcttcgcgcttcctgcggaggccaagcagcagtaccgtcagcaggcaggacagctggaggggtacggccagctgttcgtcgtctccgaggaccagaagctggactgggccgacgtcctctacctcaacacgcagccgcccgagcaccggaacctcagcttctggcctgctggtgagagcttcaggcagacgctggacacctactccgccgccgtcaagcacgtcgccgaccgcctgctgggagccatgtacatgaacctgggcctcctgagcagcatggacatggacccggagcggggtgccgggatacagtcggtgaggatgaactactaccctccctgcgctgaagcggcggacaaggtcctgggcttctctccgcactccgactcggaccttctcaccctcgtcctccaggtcaaccagctccagggcctgcagatcaagaggccgcccgacggcggcggtgcctgggcctggcttcccgtcacgccgctgcagggcgccttcgtcgtcaacgtcggggacgtcctcgagatcttcaccaacgggaggtacaggagcgtcgagcaccgggctctagtcaacgcccacacggagcgcttgtccatcgcggcgttccactctcccagcatccatgccaccatagggccgctgccggagctcctcggggaccaggaggtgcccaagtataagacgctggaccaccaaagcttcattacgctcttcttctccgccaagctccagggcaagagcttcttggaacggatgaagaagctttcgtagagccaatcggacggaccggaaagttaagcaggccgacgtaaagtcggattacatgttatcggttcggccatagcaatatagcacgcatgtatgtccggattaatttggtgaccgacgagactagttttgtctaccaattcacttttacatcgatttttaaatataaaaaacttacaaaaaaaaaaaaaaaagggcggccgc

SEQ ID NO: 258785 - DNA, 700 bp, Zea mays
ggccgctggtcgtcatgcaccagtgccaccaaggtatctccgtccagatctggccgcggatgtcgtcgttgccgacgacgcgacgaccatccccatcatcgacttccagcgactgctgctggtcgacccagaggaatctgcgcgcctccatgcggcctgccaggactggggcttcttccagctgataaacggttgtgttccggacgatgtgatggaggcgatgaaggccagcacccagtcattcttcgcgcttcctgcggaggccaagcagcagtaccgtcagcaggcaggccagctggaggggtacggccagctgttcgtcgtctccgaggaccagaagctggactgggccgacgtcctctacctcaacacgcagccgcccgagcaccggaacctcagcttctggcctgctggtgagagcttcaggcagacgctggacacctactccgccgccgtcaagcacgtcgccgaccgcctgctgggagccatgtacatgaacctgggcctccagctgagcatcatggacatggacccggagcggtgtgccgggatacagtcggtcaaccagctccagggcctgcagatcaagaggccgcccgacggcggcggtgcctgggcctggcttcccgtcacgccgctgcagggcgccttcgtcgtcaacgtcggggacgttcttgagatcttcaccaacgggaggtac

SEQ ID NO: 258786 - DNA, 1327 bp, Zea mays
gaattcggctcgagggaagtacaagttggaatgggtccaggaggtgagcttaggtatccgtcatacccaactgagaagctaaatcagccaggcagttcatctgaacttggggaatttcaatgttatgataagtttatgcaagcttcgttgagtgctcgtgcacagatttttgggttacaacagtggggcaatggcggttcaactggcacagatggttcacagcagaaccttgaagaaacgagtttttttcgcaccgatggaggctattggaatacaccttatggtcacttttttcttaagtggtattcaggaatgcttctcctccatggagagaggttatgcatgatagctgatgcaatcttctctggtactggtgtgaccatctcagggaaggttgctggaatacattggcactattatacttgttcacatccatctgaactgacatctggctactacaatactctattaagagatggctatcttcctatagctcaaatgtttgccaaatacaaagctacattgtgctgcagttgtttcgacctgagggacgcagaaagaacaaattctgagagcagtcccgaaggtactctccggcagcttgcaggtgctgctaaaatgtgcaaccttcctcttaatggtgagaattctgcgacaaggctggatgatgcatcactgaatcaagtgataagaagctcaaggctctactcaggctgtacttcaggaacatctttttcctttaactatgttaggatgaacaaaagcttgtttgagtttcacaattggaatcgatttacaaagtttgttaggcagatgtcagatgccaggacctttctagcaagactgtatgtcaggagagggcagcaatacttgtcttcaatgtcagttgtttgggtggttagtcgggcttgtgcatatacatgaaagttgtcaaaagctattgcggataatctcagccataaatggttccaccactgtggatggaaaaggtttgctcagtatatggctcatttttagttgccagaagggcaggcaggcttatatgctgaaggctgtactgatttcatgcatatgcatgtattagtttcatgcatatgtcattgctgaacaaaagtttatagttatttgttgtaaagtggcagactggcagtgttttgctgccaacaatattgaatcgcacgagggtcctgtttagccattttagaaataattagatggagcttcatgttttcccgttacaatatgaatgctttcaaactatatctgcctatgaaaatatgtatacttcctcttgtcacaaaaaaaaaaaaaaaaaaagggcggccgc

SEQ ID NO: 258787 - DNA, 1126 bp, Zea mays
gctccagctccaaaggcgctcgtcttcctctgccacggctactccgtggagtgcagcgtgacgatgcgcggcaccggcgagcgcctggaattcggctcgagcgccgtctacggcctggactacgagggccacggccgctccgacgggctgcagggctacgtgccggatttcgacgcgctggtgctggactgcgacgagtacttcacctcggtggtggcggcggcggcgcagtcgcagtccaaggacgcccaccaacttccccggttcctgctcggggagtccatgggcggcgccgtggctctcctcctccaccgccggcgccccgagtactggagcggcgccgtgctggtggcgcccatgtgcaagatcgccgacgacatgcggcctcacccgctggtggtcaacatcctcagggccatgaccaccatcatcccgacgtggaagatcgtgcccagcaacgacgtcatcgacgcggcgtacaggagccaggagaagagggacgagatccgcagcaacccttactgctacaaggacaagccgcgactcaagaccgcctacgagctgctcaaagtcagcttggacctcgagcacaacctcctccaccaggtgtcgttgccgttcctgatcgtgcacggcggggcagacaaggtgacggacccgtcggtgagcgagctgctgtaccaatcggcggcgagccaggacaagacgctcaagttctatccgggcatgtggcacgccctcacctctggcgagtcgcccgacaacatccaagccgttttccaagacatcatcgcctggctcgaccacagatcacccgacacggaacaggaggagctggtgtcgtcggaggtggagcagaaggccaagcacgacgaccagcgccaccaggagcagctccaggacggcaacaaatagctagctgcttgcttgcctgctgctttcttctctttacagaacgaaccgtttcatttggtcatgcatggatacacatcatgtctcagtgatacgtaccgactaaattaaattattagatcgaccgcgcttacctagaaattaaacaatcagctgttcgacatcaaaaaaaaaaaaaaaaaaaaaaaaaaaaaaaaaaaaaaagggcggccgc

SEQ ID NO: 258788 - DNA, 1089 bp, Zea mays
  unsure (1)..(1089): unsure at all n locations
atccatccatgtatctgcgctttgcctgcccacagctacccgacgctttatcatcccttctattattaattaattgggaggagtgggagtgatagctgcagcacccagcgcccatcactgagcccatccggaaccctagcctcctcgtcgttgaatccaccacaccacaccatgagcgggagcgcctccaggaagctcttccagaccgccaggtccatcgtcctctccgcttctcaacgctcctccttctccgtcctcgccgccgagggccgcaccgccgcgctcgccaactttggcaggaagatcctccccagcgcctgctcctaccacaggcagggatcccacgccgcgtcgggatggggagccatcgctgccgcagtccccgccgcagtttacatgctccaggaccaggaggctcatgctgcagagatggagcgcactttcatcgccatcaagcccgacggcgtccaaagaggcctgatttctgagattgtgaaccgattcgagagaaaaggctacaagcttgttgccatcaagctgattgtcccatccaaaggattcgctgagaagcactaccatgatctcaaggaaaggcctttcttcaacgggttgtgtgacttcctcagctctggccctgtacttgcaatggtttgggaaggagagggtgtcatcaagtatgggagaaaactaattggtgccacagacccacagaaatctgaaccaggaaccatcaggggcgatcttggcgttgttgtgggaagaaacatcattcatggaagtgatggcccggagacagcaaaggatgagatcgccttgtggtttgaacccaaggagctggtctcttataccagcaatgcggagaagtgggtctatggggtgaattaaccagcgactaaatctcttgaggtttgcttttttcttttcagttttcacataattgccgacagaccaaggcaggatgtaataaagtagctaccgtcacctattacttttgagttggattgattgtggtgcagtaaggcacaaggaaaggaaggaatacaccgtgaaatttgttaaaaaaaaaaaaaaaagaaaaaaaaaaanaaa

SEQ ID NO: 258789 - DNA, 584 bp, Zea mays
cggacgcgtgggcggacgcgtggggtttgggaaggagagggtgtcatcaagtatgggtgaaaactaattggtgccacagacccacagaaatctgaaccaggaaccatcaggggcgatcttgccattgttgttggaagaaacatcattcatggaagtgatggcccagagacagcgaaggatgagatcgctttatggtttgaacccaaggagctggtctcttacaccagcaatgcggagaagtggatctatggggtgaattaacgagagagtcaatctgttttttttcccttcttttgatctcggttttcacataattgccgacagacctaggcacaaggatgtaataaagtcgctaccgtcacttctgagttggattgtgaccttcaggtgtagtaaggcacaaggaaggatggaaaggaaaggaatataccgtgaaatatagagcgtgcactgagtagtcgcgatgttcaaatcaaactatatatcaccgtcactggagtcatgtaatccaagatggcgatgcagatgtttctttggatctaaaaaaaaaaaaaaagggcggctgctcgcgatctagaactagt

SEQ ID NO: 258790 - DNA, 473 bp, Zea mays
  unsure (1)..(473): unsure at all n locations
tcctcgcgtccgcccacgccgccggcgagcgaccgcaccggcacggcgcccatccatccatcgccatcctctagcccagtccaaaggaaccctagccatgagcgccgcctccaagaagctcttccaggccgccaggtccctcgtcctctccgcttctaaccgctccgtcctcgccgccgagggccgcaccgccgcgctcgccacgctcaccaactttggcaggaagaccctccccaccgcctacttatcctaccacaagcagggatcccaccatgccgcgtcggggtggggagccatcgccgccgcagtcccagctgcagtttacatgctccaggaccaggaggctcatgctgcagagatggagcgcaccttcattgccatcaagcctgatggcgtccaaagaggcctgatttctgagattatgagccgatttgagagaaaaggctataagctnggtgccatcaagctgattg

SEQ ID NO: 258791 - DNA, 372 bp, Zea mays
gtcatcaagtatggggaaaactaattggtgccacagacccacagaaatctgaaccaggaaccatcaggggcgatcttggcgttgttgtgggaagaaacatcattcatggaagtgatggcccggagacagcaaaggatgagatcgccttgtggtttgaacccaaggagctggtctcttataccagcaatgcggagaagtgggtctctggggtgaagcaacctgcggcccccctatcggcgttttccttgcaggctctcacgtttcacatgctttacgtcggcccacggcccgatgttctgaactgctggccgcatctccttcctggctgagggacttgatcaactaggaagcgcgtaaataaccaactttatt

SEQ ID NO: 258792 - DNA, 974 bp, Zea mays
gaattcggctcgagcgcccaccagggccgaggtcgcggacgtctccgaagccgtccgccagcgcgccgacgccctgatgctttccggcgagtcggcaatggggaggtacccggacaaggctctcagcgttctgaggagcgtcagcctgaggatcgagaagtggtggagggaggagaagcggcacgaggcgctggagctccggagcgtctcgtcctccttctccgacaagatatcggaggagatctgcaactcagcagctaaaatggctaatggcctgggagtggacgccgtctttgtgttcaccaagaccgggcacatggcctccctgctctcgcggtgccgccccgactgcccggtcttcgccttcacgacgtcgacgtccgtcaggaggcggctgaacctgcagtggggcctgatccccttccgcctcgccttctcggacgacatggagagcaacctgaaccgcaccttctccctgctcaaggccaggggcatgatccagtctggggacctcgtgatcgccctctcggacatgctgcagtccatccaggtgatgaacgtaccctgaggtagaagagccttacctttacctccatgccgcacggtcccgtatcggaaggaacacgcgtgttatcggcaccttggaaggacggtttcttccttccctgcgcctaaatcgctgccctttgttttcgctgtatcagatgctgctatgctatgctaggctctagtctggcccagggaactgtggcaataatctgtggctttcaggctggtgttagaactcttgtactacttgtaggcttaggtgatttttatcgtgcaagtagttggtttgatgtttttgtgtggtataaaagcgactcaagctatgggcctaggcctctttggtataccttttttttctgaagagtttttttagagaatctggattcgttgataaaaaaaaaaaaaaagggcggccgccgaaaaaa

SEQ ID NO: 258793 - DNA, 936 bp, Zea mays
gcgagatccacatgggggacctcggcggcgcatgctcggtcaaggcggaggatggagaagtatggacgttcagtgttagatcatttgaattgcctctcccagaacgaactattaatgtgaactatgatggatttgctgaagatgtgagagttggtgatgagctccttgtggatggtggaatggctcggtttgaggtgattgagaagataggaccagatgttaagtgccgttgcacagatcctggtttattgttgccacgtgccaatcttacattctggcgtgacggcagtatcgtccgtgagaggaatgctatgcttcctacaatttcatcaaaggattggcttgacatagactttgggattgccgaaggtgtagatttcatcgctgtttcatttgtcaagtctgcagaagtaattaggcacttgaaaagctacatagctgcaaggagccgtggaagtgacatggcagtcattgcgaaaatcgagagcatcgactctctaaagaacctggaggagatcatccgagcgtcagacggcgccatggtagccagaggggacatgggggcgcaggttcccctggagcaggtcccctcgatacagcaaaagatcgttcagctctgcaggcagctgaacaagccggtcatcgtcgcctcccagctcctcgagtcgatgatagagtaccccacgcccaccagggccgaggtcgcggacgtctccgaagccgtccgccagcgcgccgacgccctgatgctttccggcgagtcggcaatggggaggtacccggacaaggccctcagcgttctgaggagcgtcagcctgaggatcgagaagtggtggagggaggagaagcgtcacgaggcccttgaacttccgaacgtcttgtccttcttcttcgaccagatatcggaggagatcttcaactcaacggcttaaatgg

SEQ ID NO: 258794 - DNA, 1093 bp, Zea mays
gaattcggctcgagactaaagaaaatggcccttagggttattgctgagagtttatctgaggaagaaatcgcggggttaaaagaaatgttcaaaatgattgacagtgacaacagtggtcatatcacattggaggaactaaaaactggcttgcagagagttggtgctaatttgatggattcggaaatcaatgctctaatggaagctgcagatatcgacaacagtggcacaattgattacggggagttcattgctgcaactttgcatataaacaaagttgaaaaggaggataagctctttgctgctttctcatactttgacaaagacggcagtggttacataactcaagatgagctccaaaaggcatgtgaggagtttggtttaggggatacccgacttgaggacattattggggacatcgatcaggacaatgatggacgaatcgactacaacgagttcgttgcaatgatgcagaagggagataatcctctggggagaaaggggcatcaaagtaatgctagttttggtcttggagatgcacttaagcttcggtaaaataggagcagatgtttaccttcataacgaagttagcattcagagactaagaaaaattgaccaagcaacaactccaaaaccgtgtcccatgcctgtactctggtctccaagcttcaatggtgccctatcaaaattcggggggtcgctgaagcaacctaggagcgtgaacttttgccggaaagcatcgacctcataaaattaacagtagggtcctcatgctcaacatggcatcttttgatttccctcctttctagttcatacgtagtggcaatgaaaccttgaggccaccgtgtaatttaagtaagcatgagaataggtgagattgcttttttctgccccctttattcttccattgtgaatcgacgacaggaagagagtgaaccatcctacgtctgcattccaagactcatgtttcagttatgttcatccgtgttggataggtgtagttcttagtgcctgtaagaatataatattgtattttaggagtctgactagtgaaacaattcttttgtgttaaaaaaaaaaaaaaaagggcggccgc

SEQ ID NO: 258795 - DNA, 2094 bp, Zea mays
  unsure (1)..(2094): unsure at all n locations
agagctatgacgtcncatgcacgcctaccgtagcctggattcctttaaagtcgaccaacccgtcccgcgccccgccgcccgccccgccgccttctgctcgagcgcctcggccgcctcggatccggaccgagcgccggccatggcgctcgccttcgacgagttcgggcgccccttcatcatcctgcgggagcaggagaagaagacgcgcctgcgggggctcgacgcgcagaaggccaacatcggcgcgggcaaggccgtcgcgcggatcctccgcacctcgctcggccccaagggcgcggacaagatgctccagtcccccgacggcgacgtcatcatcacaaatgatggggcgaccatcctggagcagatggatgttgacaaccagatcgcaaagctgatggtggagctgtcccgtagtcaagactacgaaatcggggatggtaccaccggtgtggtagtcatggcaggggcgctccttgagcaggccgagaagcttttagaacgtggtattcaccccattagggttgctgaaggctatgagatggcatcaaaggtagcttttgatcacctagaacgaatctccgaaaagtttgagttcagtgcagacaacattgaacccctggtccagacctgcatgacaactctatcctcaaagattgttaaccgttgcaagcgggcgttggcagagattgctgtcaaagcagtacttgcggttgcagatttggagaggaaggatgttaacttggatctaattaaagtagaaggcaaggttggtgggaagctggaggacactgaacttgtatatggaattattgttgacaaagatatgagccatccacaaatgccaaagagaattgaggatgctaagattgccatcttgacatgcccatttgagcctccgaagcctaagaccaagcataaggttgacattgatactgtcgagaaattccagacactgcgtgagcaagagcagaaatacttcgatgaaatggttcagaagtgcaaagatgctggtgcaaccctggttatttgccagtggggttttgatgatgaagccaatcatttgttgatgcatagaaatctgccagctgtcagatgggttggtggtgttgaattggaattgattgccattgcaacaggaggacgaattgttccgagattccaagagttgagtcctgaaaagcttgggaaggctggattagtcagagagaaatcattcggaacaacaaaggaccggatgctttacattgagcagtgtgccaattctagagctgtaaccattttcatccgtggtggaaacaaaatgatgattgaggagaccaagcgcagtcttcatgatgctctttgtgtggcaaggaatctgatccggaacaactcaatcgtgtacggcggtggctcagcagagatatcttgctcaattgctgttgaaactgctgcagatcggcaccctggagttgagcagtacgctatcaggtcattcgctgatgcattagatgctgttccactagccttggctgaaaacagtggtttgtcgccaattgataccttgaccgcggtaaaagctcagcaagttaaggagagcaacccccactgcggcatagactgcaacgatgtaggcaccaacgacatgaaagagcagaacgtctttgagaccctgattggcaagcagcagcagatcctgctggccactcaggtggtgaagatgatcctgaagatcgacgacgtcatctcaccgtccgagtactgatgaagcctgaaggaaggaggaaaaaaagagaggaacaggtggctatgctggatgagagtttagtaggcagcattgctgatgtgttgattggtttactccttgttcaggcgtgctccttgtatcttatgagctgcctagcacctttttgtgtgagggattgtttgtattgcacgatattgcatcgaggaatacgtatggacgtgttgtcaagaccctaggcaattctcttcagggctgtgagatggttggggtactgatacttttagctgaagctgtcctttttgttttatgaatgctgcaatagtttggcgccaaaaaaaaaaaaaaaaaaaaaaaagggcggccgc

SEQ ID NO: 258796 - DNA, 443 bp, Zea mays
caagtcaaggagagcaacccccactgtggcatagactgcaacgacgttggcaccacggacatgaaagaacagaacgtcttcgagaccctgattggcaagcagcaacagatcttgcttgccacccaggtggtgaagatgatcctgaagatcgacgatgtcatctccccgtccgagtactgacggaaagaaggaacggatggctatgctggatatgcgtaggcggcattgctgatgtgttttgattggtgtacctccttatccaggcttgctgcctaccactcactccctgtgtgacgttttgccgaaattggtttgtattgtgcacgataatatctggaaatagactctagacagtccttagttatctttttattataaaaaaagtcagtgccttctcgtcagggttgagatggttgcagtattgatgcttttgtagtgttttt

SEQ ID NO: 258797 - DNA, 425 bp, Zea mays
tgttgttccactggcgttggccgaaaacagtggtttgtcaccaattgataccttaactgcggtaaaagctcaacaagtcaaggagagcaacccccactgtggcatagactgcaacgacgttggcaccaccgacatgaaagaacagaacgtcttcgagaccctgattggcaagcagcaacagatcttgcttgccacccaggtggtgaagatgatcctgaagatcgacgatgtcatctcaccgtccgagtactgacggaaagaaggaacggatggctatgctggatatgcgtaggcggcattggtgatgtgtcgagagaaggaacggatggctatgctggatatgcgtaggcggcattgctgatgtgttgattggtgtaccttcttgtccaggcttgctgcctaccactcactccctgtgtgacgtt

SEQ ID NO: 258798 - DNA, 438 bp, Zea mays
ctataggctatagccatcaccacactcgcctccctctctccctcccacactccaccacccgcgccgccgcctcctactccgccccggcccctctgatccggaccgagcgccggccatggcgctcgccttcgacgagttcgggcgccccttcatcatcctgcgggagcaggagaagaagacgcgccttagggggctcgacgcgcagaaggccaacatcgcctcggccaaggccgtcgcgcggatcctccgcacgtcgcttggacccaatggcatggacaagatgctccagtcccccgacggcgacgtcatcatcacaaatgatggagcgaccatcctggagcagatggatgttgacaaccagatagcaaagctgatggtggagctgtcccgtagtcaagactatgaaatcggggatggtacccaccgggtggtagtcat

SEQ ID NO: 258799 - DNA, 403 bp, Zea mays
cattgcattttgttcatgagggcgtccaactattgcaaatcatcaaacaaaaatgacagcttaagctgagctataaaaacactacaaaagcatcaatactgcaaacatctcaaccctaacgagaaggcgctgactttttttatataataaaaagataactaaggactgtctagagtctatttccagatattatcgtgcacagtacaaaccaatttcagcaaaacgccacccaggtggcgaagatcatcctgaagatcgacgatgtcatctcaccgtccgagtactgacggaaagaaggaacggatggctacgctggacatgcgtaggcggcattgctgatgcgttttgactggcggacctccttggtccaggcttgctgcctaccactcacacaggaagaaag

SEQ ID NO: 258800 - DNA, 1636 bp, Zea mays
cccacgcgtccgcccacgcgtccgggaacatccatcgatctccccccagcggcgaggagagccggcggccacaggaaggagaaatggcttccgcacacaacgctctccgggtgtttttcatcctagccgtggtatgtgccgtatgcacagcgaaaaggacaggagccaacaaggaagaatcggcggcagcccccggtggcgctgctggaggcagcggcgggacgttcgacatctccaagctcggcgcgaccagcgacggcaagacggactgcacaaaggcagtccaggacgcgtggacgtcagcgtgcgaagcgaccggaagcgccacggtggtgatccccaagggcgactacctggtcggccctctcaacttcactgggccatgcaaggggagcaacatcgccatccagctggatggcaacctgctgggatcaaacgacctggacaagtacacggcgagctggatcgaattgtctcacgttaacaacatcgggatcaccggctcgggcacgctggacggccaggggaccgccgtttatagcaagagcaagaccgacaacgtgaaggcgatgcccaacacactggtgctgtttcacgtgatcaacgccactgtcgccggaatcaaactactcaactccaagttcttccacatcaacatcgacaactcagagagcatcaccgtgaaggacgtgaacatcaccgcgcccgccgacgttgagaacacggacggcgtccacgtcggaggctcctccaagatcagcatcctcaactcgaccatcggcaccggcgacgactgcgtctcgattgggcccgggtgcaacggcgtcttggtggacagcatcacctgcggccccgggcagggcatcagcgtcggctgcctaggccgctacaaggacgagaaggacgtgagcgacatcacggtgcggaactgcgtgctcaagaacaccaccaacggcgtgcgcatcaagtcgtacgtggacgccgagtccgtgctgacggcctcccatctcaccttcgagaacatcaggatggaggaggtggccaaccccatcgtcatcgaccagtacttctgcccgcagaaggtatgccctggcaagcggagcaactcctcgcatgtctccgtcaaggacgtcacgttccgcaacatcaccggcacgtcgtccacgcccgaggccatcagcctgctctgctcggagacgcagccatgcagcggcgtctccctcatcgatgtcaacgtggagtacgccggcaagaacaacaaaaccatggccgtctgcagcaacgccaagggcaccgccaagggaagcatcgaggcactggcttgcctggtctgatgatgaccttccttttgcatgcatgcatggtatctcatccttgatgatgatctagctcactagttctttttaatttccgcttcattcgcttttccaaattcgattgtgtttcagccaagttgtttagcgggacatctcttgtctgatcttcctgctaaatagagttggactcctatatatagaggccttccggcacatataatatacgtcggaccaatattattgtgatcaaaaaaaaaaaaaaagggcggccggacggggataaaaaatttgaatgaaacatagatcacatttcacacaat

SEQ ID NO: 258801 - DNA, 799 bp, Zea mays
gaaataaattaataactaatcagaagctcaggctacactagatgcagacacaagctgagttgattatagaaacgaaacccgacatgaataaatgtttccagcaaatttaactggaaacacacctatacaaaggctgcttctgtatgtacaaatcatctaaaaaaacgttaggctacataaagtagctcaacggtgtcttgtgcctcgacccgccttctccgtagaggtcgttccattggacgagctcattcatatttttgaatccgatgatatactcgcacaaacctgctcatgtgcgtgcttgaaatcactaaactttagggagcgaacgtcgccgctacagcactgaggtggggctggcctattttctgcttcagctaaggttctctccttcttctctctttcaagaatttcccttatgggacgatgtgctgcagttatacacaggttcttcagatcactgcctgaatacccatctgtcaggtttgctagcgcctccagatctacatcatctgccaaatcttcttttgctagtatcacgctaagaatcttctttctgttgggtgcatctggcaagttaaccatcaacctcctggggagcctccaggccctggattgcctcgtctgatcgatgaccttgcatttgcatgcattcttcttccgtttcacttttccatattctattgcgttccagctaagcatcttgtttcttgcagaatatatatatatatctctactacttcaaaccaaaaaaaaaaaaaaaaaaaaaaaaaaaaaaaaagggcggcggacgcgtggg

SEQ ID NO: 258802 - DNA, 428 bp, Zea mays
gagagccaaccccatcatcatcgtccagtacgtctgcccccagaaggtctgccccggcaagcgaagcaactcctcgcatgtctccatcaagaacgtcaccttccgcaacatctccggcacgtcgtccacgcccgaagccgtcagcctgctctgctccgagacgcagccgtgcagcggcgtctcgctcatcgatgtcaacgtcgagtacgccggcaagaacaacaagaccatggctgtgtgcagcaacgccaagggaaccgccaagggaagcctccaggccctggattgcctcgtctgatcgatgaccttgcatttgcatgcattcttcttccgtttcacttttccatattctattgcgttccagccaagcatcttgtttcttttagatatatatatatatatatatatgcatggaaataaatttatgg

SEQ ID NO: 258803 - DNA, 404 bp, Zea mays
atccatccccaatccccaaaggcgaggatagaactagcaaagggaaaatggctgcttccacaaacaacactctcagggtgctgttcaccctaatggttgtatgcgccgcagtatgcacagcgaaaaggaccgtatcaaagacaggagacttggcgccagcccctgctccattaggagcaggaggcgccaccgcagccccagaaggtgcggctagagccagcaggacgttcgacatatcgaagttcggcgcgaccagcgacggcaagacggactcgacacaggtggtccaggacacgtggacgtcagcgtgcggagcgatgggagacgcaacgatgctcatccccaatggcgactacctggtgggccctctctacttcagaggcccgtgcatggaggacattaac

SEQ ID NO: 258804 - DNA, 898 bp, Zea mays; identical to SEQ ID NO: 349

SEQ ID NO: 258805 - DNA, 517 bp, Zea mays
acgccagcgcccctcactgcgcatccgcatcactgcgtgtactcctcctctccccctcactgcggcgcctccacatccgccaatttcgtcaccgcctcctcctcctcctcctcgcccctgtgcctcgacatctcgcatccgctccatctatggaaggccaccacgcgccatggatcgccgctctctaccgccacctcaattgaaggttcaccgctctctacgtggatccgccacctcctcctcggccgccgtcaatggaaggtcccagatctcctctcccattacttctctccccattaccgcgctcgaggtctgccatttttggaggtccgccacctccgcctctgctcgccgtcaatggaaggtcctagatctcctctccctattaccgcgctcgagtcagtgggaggtccgccatttttggaaggtccgccacctcctcctcgacccgcggcaaaaatggcgtgggagatccgccacctcctcctcggcccgcggcaaaaatggtgtgggagat

SEQ ID NO: 258806 - DNA, 540 bp, Zea mays
ctctcatccgctccatctatggaaggccaccacgcgccatggatcgccgctctctaccgccacctcaattgaaggttcaccgctctctacgtggatccgccacctcctcctcggccgccgtcaatggaagaattccagagatgcaattcccgaggccatggagcagcagacaatatcaattgccaaagcagccattacaatagtactcattttagggacttcatttcttgcagctgccaatccaattacaggatgctatgacgctcttaagtgatcatgaacttatacattgaaataatggtgggcctcgagaggccagaaggtggagaggagttcaacaagtactacatcctgtctgctctcctatccgtggattggtgagttagatgtgatgtttgcactgggtattggtatccatcaaccccaaaccaattgcagttccctttagtcatgtcatgtttaatttccctataattctgtactgcatttcatatatatgtatcaaatatggacccctgaaactgaagcagacgttccttt

SEQ ID NO: 258807 - DNA, 539 bp, Zea mays
gcgcatttttggaggtccgccacctccttcttggcctgccgtcaatggaaggtcccagatctccgctccccattactccggtccccattacagcgctcgagtcagtgggagttccgccatttttggaaggtccaccacctcctcctcggcccgcggcaaaaatggcgtgggacatccgccacctcacctcctccaattctcgcgctcgcgcctgatatggaacgtccgtcggagggactcgggcgtcgaggccatggcggagccgcaccccttctcccccctgcctcgcgcgcggcggccgagatggtgctgagcgcctgagcctgccctcctacgggctcactggcacgctctccacggccatcgaattccagagctgcgattcccgaggccatggagcagcagacaatatcaattgccaaagctgccattacaatagtactcattttagggacttcagttcttgcagctgtcaatccaattgcaggatgctatgacgctcttaaggttcgtaaacatgtatttattgatgcaataat

SEQ ID NO: 258808 - DNA, 876 bp, Zea mays
cgtgtatgtagatgggaaggcatggtgtggccaggtggtgtcgctgagcctgtcctcctacgggctcactggcacgctctccacggccatcggggacctcacgttcctgcgtatgctgaacctgagctccaattggttccacggggaggtcccagcgaccatagctcgccttgcgcatctgcaggcgctagacctgagctacaacgccttcactgaattccagagatgcaattcccgaggccatggagcagcagacaatatcaattgccaaagcagccattacaatagtactcattttagggacttcatttcttgcagctgccaatccaattacaggatgctatgacgctcttaagtgatcatgaacttatacattgaaataatggtgggcctcgagaggccaggaggtggagaggagttcaacaagtactacatcttgtctgctctcctatccgtggattgcaggtgagtgcaaacaacttcctgctaaaagttagcaaggaatcggttgatacttattgatggtgcctgaaatatcctatagatgtctttagtagaggatccaaataatggtctgcaaggtttggggaatcggatcgcacaaaactccatctgcttcagaattgagctaagcgcatcctaacatcttgactcctatatcgatcaattatttttgttacacttttgattctttagtttcgtagagggaggaacatcgtgggaatgtgggatgcaggccccacgtaacaccagatattttgaggtagaccgcggcgaggtgcccaagggcagcgcctagatattcttctggatggtcaagttctgtaacgacaatgtggcagaggagatgccctgatcttcgtcagtttgcctact

SEQ ID NO: 258809 - DNA, 1955 bp, Zea mays
cccccttccccccctccgcggctccgccccggcccgtgacgcctcgcttcgcacccctctcgcatctccgccgcatctccgccgcgatcctcccgactagccgcgactgcctcccctccagcggccaggcagaggatggagggggcaggcaaggatggcaacccgttgaggaattatcggattggcaagactctcggaattggctcattcgggaaggtgaaaattgcggagcatatcagcactggacacaaggtggcaatcaagattctcaaccgccgtaaaatcagaggcatggagatggaagagaaagttaaaagagagattaagatattgaggttatttatgcatccacatattatccgcctctatgaggttatagacacaccggctgatatttatgttgttatggagtatgttaagtgtggggaattatttgattacattgttgagaaaggtaggctgcaggaggaagaggctcgccgtttcttccaacagattatatccggtgttgaatattgccatagaaacatggtggtgcatcgtgatctaaagccagaaaacctcctattggattcaaaatgcaatgttaagattgcagattttggcttaagtaatgttatgcgggatggtcattttctgaagacaagttgtggtagcccaaattatgctgctcctgaggtgatatctggtaaactatatgctggacctgaagttgatgtgtggagctgtggggttattctttatgctcttttatgtggtactctgccatttgatgacgagaacataccaaacctttttaagaaaataaagggtggaatatatacccttcccagccatttgtctggtgcagcaagggatttgattccaagaatgctagttgtcgatcctatgaagcggatcaccattcgtgaaattcgcgaacatgattggttcaaaattcttctcccgcgctatttgactgtgcctcctccagatagtgcgcaacaagtcaaaaaggttgatgaggaaactctccgtgaggttttaggtatgggatatgacaagaacctgttggtggaatcaatccaaaaaaggctgcaaaatgaggcaactgttgcatattacttactcttggacaataggctccgtacaaccagtggctatcttggagctgaatgtcaagaagctatggactcctcattctcaaacatcgcatcatatgaaacaccaagttcagcacgtgggaatagacagcaaatatttatggagtctccagttggcttgagaccacatcttccagctgagaggaaatgggctcttggtcttcagtctcgagcacatccaaaagaaataatgtctgaagtgctgaaagctctgcaagaattaaatgtttactggaaaaagataggtcactataacatgaagtgcagatggagtcctggctttcctgctcaaattcataacaatcataacttcagtgcagggtccattgaaactgatagcctgagtgagaggttaagtttaattaagtttgaaattcagctgtacaaaacaagagacgagaaatacctcctcgatttgcaaagagtcagtgggccacagctcctctttctggacttgtgcgcggcctttctaactcaactgagagttctttgatttctggtgtcagctttccatcagttgcattccttgcgtttcactagaggaatgtctaaatcgctcacaaagctgtaaatagtaatctccagtagattggattttctggagtatgtagatggtaggcatgagaagatgttatgcctggcggcgatcttctgaaccagactgtgtggagtaacttatctcctaattctttacggctggccagctgccggtgaattagatcagtgcttttgctggcataatgtctatctacattaataatttcagctattacaacggttaattaaaaaaaaaaaaaaagggcggccaaatga

SEQ ID NO: 258810 - DNA, 385 bp, Zea mays
taaatagtaatctccagtagattggattttctggagtatgtagatggtaggcatgagaagatgttatgcctggcggcgttcttctgaaccagactgtgtggagtaacttatctcctaattctttacggctggccagctgccggtgaattagatcagtgcttttgctggcataatgtctatctacattaataatttcagctattacaacggttaattaaatgctgtgctgcttacaggccaaatgagattatgttttgaaggcaactctttttttttgcattaattgattggagttgtttggcatgcgaagcgagtctgaccgagtatcttgtgtaatcatttatattagcaagcgtgcaccgaagcaatctgctgcatctcctct

SEQ ID NO: 258811 - DNA, 534 bp, Zea mays
gaattcggctcgagaaggaggaagcgcatgtgaacatttgtgcatttgtcggacgttcagatctggactcacgatgctttcggtaaaacttgcctctgctctgatccacctccaccttcaacgacttggcaccctcgaagaccaatcctgcaagcaattctttgttccaagaagacattgaggccctcacaaagaagacacaagatggtgggacaaaagtggttgaagcaaaggctggcaaagggctctgcaacattgtctatggcataagtttagaacatatgaatcgttgtcactgtcagcatgtctattggttacactatagaatatcttgtctgtttattagccttttagaattttatgattactttcttctatgctttgtaactattcaatcagtagatgcttcttgccttcattgatttttctatgaaggactacttgtcattcaaaaaaaaaaaaaaaaaaaaaaaaaaaaaaaaaaaaaaaaaaaaaaaaaaaaaaaaaaaaaaaaaaaaaaaagggcggccgccg

SEQ ID NO: 258812 - DNA, 1637 bp, Zea mays
gcgtgagatcgaggagaagaaggcaagcaggcagagaaagagagagagagagagagatggatgaggagtacgacgtgatcgtgttggggacggggctcaaggagtgcatcatcagcggcctcctctccgtcgatggcctcaaggtccttcacatggacaggaatgactactacggaggagaatcttcgtccctgaatctaaccaagctctggaacaggttcaagggcaacgacagccctcccgagcacctgggcgtcagcaaagagtacaacgtcgacatggtgcccaagttcatgatggcaaacggcgcgctggtccgcgtcctgatccgcaccagcgtgaccaagtatctcaacttcaaggctgttgacgggagctttgtgtacaacaatggcaagatccacaaagtcccggcaaccgacgtggaggccctcaagtcgaacctgatgggcctgttcgagaagcggctcgcccagaagttcttcatatacgtgcaggactacgaggtgggcgaccccaagtcccacgagggcctggacctcaacatggtcaccaccagggaagtcatctccaaatacggattggaggatgatacggtggactttatcgggcatgcgctagcacttcaccgggacgacagctaccttgacgagcctgcaatcgacactgtcaagaggatgaagctctatgcagaatcactcgcacgctttcaaggagggtccccttacatctaccctctatacggtctgggagagctccctcaggcctttgcccgcctgagcgctgtttacggtggcacgtacatgctgaacaagccagaatgcaaggtcgagtttgatgagagtggaaaagcgtatggagtcacttctgaaggggagaccgccaagtgcaagaagatcgtctgcgatccttcgtatttgccagacaaggtgaagaaggttggaagggtggcccgcgcgatatgcatcatgaagcatcctatcccggacaccaaggactcgcactccgtgcagatcatcctccccaagaagcagctaaagcgcaaatccgacatgtacgtgttctgctgctcctacgcccacaacgtcgcgcccaaaggcaagttcatcgccttcgtctccaccgaggccgagaccgacaagcctgagatcgagctcaagcccgggatcgacctgcttggccctgtagaggagaccttcttcgacatctacgacagatatgaacccgtcaacaaccctgacgacgactgctgtttcctcacaaatagctatgactccaccacccattttgagacgacggtcaaggatgtgctcgccttgtacaacaagatcacgggaaaggagcttgatctctcagtcgatttgaacgcggctagtgctactgagcaagaagctgcttgaacaccccggcggcctctttttttgcagctctacacaatagctatttcttcgatttttttttaaaaatgttccatagatggataagtttattgaagaaatccattattgtatgttttttggagttccattttttgtcacatgcatgtaatgaacaacggtggcaatgatttataaaggttccattattcgctggcgaaaaaaaaaaaaaaaaaaaaaaaaaaaaaaaagggcggccgc

SEQ ID NO: 258813 - DNA, 1808 bp, Zea mays
ggtgatcgaggttgtggagcgcagcctcgccacgcccacggcgctgctgcggggcatcgcggacgccatggtcgccgagatggagcgcggcctgcgcggggacatccacgcgcagctcaagatgctcattagctacgtcgacagcctccccaccggagatgaacatgggctgttttatgcactggatcttggagggaccaacttccgtgtgctgcgagtccagctaggaggaaaggagaaacgtgttgtcaaacaacagtatgaggaggtttccattccaccacatttgatggtcgggacttccatggaactatttgatttcattgctgctgcattggctaaatttgtcggtactgaaggtgaagatttccacctcccagagggtaggcagagagaacttggtttcacgttttccttcccggtgaaccaaacatcaatatcatcaggaacactcatcaagtggacaaagggcttttccatcaatggcacggttggtgaagatgttgtttctgagttgagcagggccatggagaggcaggggctagatatgaaagttacggcattagtcaatgatacagtcggcacattggctggtgggagatatatggataccgatgtagttgcagctgtaatattgggcactggtacaaatgcagcatatgtggagcatgcaaatgcaattcctaaatggacggggttactgcctaaatctggaaacatggtaattaatacggaatggggaagctttaaatccggcaagcttcctctctcagaatacgacaaagccatggactttgaaagtttgaaccctggagagcagatatacgaaaaaatgatttctggcatgtatctgggagagattgttcgaagaattttactcaagttggcacatgacgcttctctatttggagatgttgttccaactaagctggagcagccatttatattgaggacgccagatatgtcagccatgcatcatgactcttcgcatgacctcaaaactcttggatctaaactgaaggatatagttggggtcgcagatacttccctggaagtaagatacattactcgtcacatctgcgaccttgtcgcagagcgtggagcacgcttggctgccgcaggtatatatagcatcctgaagaagataggccgggacaaagtaccaagcagtggcagtaaaatgccaaggactgtaattgccttggatggtgggctctatgagcattacaagaagttcagcagctgcgtcgaagcaactcttacagacttgctcggcgaagaggcctcttcctccgtggttgccaagctggccaacgatggctctggcattggagctgctctccttgcagcctcacactcccagtatggcgagagtgactagtcttgaaaaccggtgtggatcgaacttcgagtgtagctctcatgtttatctttttttcccttcaaaacatccctaatattccggctctcctcggggaatttttcggcttcctttcttggctattctgtggatgcacttaaggctctgcagcgggatatagctagtatagagccaatcagtttggaggttatctaatggcataagatttggacggcaggagcatagaaatggaagctgaacaatgccattcatgttctgcccaatttttcttccccttgcatggtgttgtaaaccaatcaaaaaatttaacctttttttttgtgttggcaataaagaggaggacacgataatttgaccaaaaaaaaaaaaaaaagggcggccgccgaaaaaaaaaaaaaaaaaaaaaaaaaaaaaaaaaaaaaaaaaa

SEQ ID NO: 258814 - DNA, 1414 bp, Zea mays
gcggcatcctcggcctcggtgatctcggttgccaggggatgggaattcccgttggcaggctctccctctacactgccctcggaggtgttcgaccgtcagcttgcctgcccatcacaattgatgtcggcaccaacaacgaggccttgctcaaggacgagttctacatcggcctccgccagaggcgtgccaccggcgaggagtaccatgaacttcttgaagagttcatgaccgccgtcaagcaaaactacggcgagaaggtcctcacccagttcgaagacttcgccaaccacaacgcctttgacctgctcgagaagtacagggagagccatctcgtcttcaacgacgatatccagggaacagcctccgtggtcctcgctggcctcctggcggcgctcaaggtggtcggcgggacacttgcggaccacacttacctgttcctcggcgccggcgaggccgggaccggcattgccgagctcattgctctcgagatgtccaaacatactgggtctccgatcgaagagtgccgcccgaagatctggctgatggactccaagggcctgatcgtggtgtcacggaaggactcggaattcggctcgaggaagccatgggcgcacgagcacgagcccgtggcgaccctgctggaggccgtgcagtccctgaagccgacggtgctgatcggcacctcgggcaagggcggcaccttcaccaaggaggtggtggaggcgatggcgtcccagaacgagaagccggtcatcttcgcgctgtcgaacccgacctcgcactcggagtgcacggcggagcaggcctacacctggaccaagggccgcgcggtgttcgcgagcggcagccccttcgacagcgtggagctggacggcaaggtgctggtgccggggcagtccaacaacgcctacatcttcccggggttcggcctcggcgtcgtcatctccggcgccatccgcgtccgcgacgacatgctgctggccgcctcggaggcgctggcggagcaggtaaccgaggagcacttcgccaaggggctcatcttcccgcccttcaccaacatccgcgccatctccgcgcgcatcgccgccaaggtggctgccaaggcctacgagctcggcctcgccagccgcctgccacgccctgacgatctcgtcaagtacgctgagagctgcatgtacacccccatctaccgcagctaccggtaaggaaaggaccatggccggggcggcggcctgagcaaaaggaaaggaaacgggtaaattatgagtcagtgagtgaataaagggtcgatgcgatatttgttgcagctagaggagtgagtttacacatactttcatttctatacactgtatttctgtgtaccgtatacggcataccatacaacactaaaaaaaaaaaaaaagggcggccgccg

SEQ ID NO: 258815 - DNA, 1745 bp, Zea mays
ctcgagcgtctcgtccaccccggcgcgcggcgggctcaagcgcccgttcccgccgccgtcgcctgccaagcacatccgcgctctcctcgcgcggcggcacggctcggtgaagcccaacgaggtgcccattcccgagggcggcgagccggagctcggcctggacaagagcttcggcttctccaagcacttcttcgctaagtacgaactcggcgaggagatcggccgcggccacttcggctacacgtgctccgccaaggccaagaagggcgagcacaagggccaggacgtcgccgtcaaagtcatccccaaggccaagatgacaacagctatcgccattgaagatgtgagaagagaagtgagaatactgagttctctgacaggccacagtaacctagtgcagttctacgatgctttcgaggatgaagataacgtgtatatagttatggaattatgtaaaggaggtgaactgctggacaggatattggctagaggtggaaagtactctgaagaggatgcgaaggtcgttatggtacaaattttgagtgttgtatcattttgccatcttcaaggtgttgttcatcgtgatctgaagccggagaattcggctcgaggaaaactctcccttgaaggtcatagattttggcttgtctgactttgtgaagccagatgaaagactaaacgacattgttggaagcgcatactatgttgctccagaggtcctccacagatcttatgcctacatcttgctctgtgggagtaggcctttctgggcgcgcacggagtcgggaatcttccgagctgtcttgaaggcggaaccgagttttgatgaggccccatggcccactctcacggctgaagctaaagattttgtaaaaaggcttcttaacaaggattaccgcaagagaatgacggctgcacaagctctcagtcatccatggatccgtaattctcaacaagtgaaggttcctttggatatgataatctataagctaatgagagcgtacatcagctcgtcttcgctgcggaagtctgctttgagggccctagccaagacgctgacgacggaccaactcttttatgtgagggagcagtttgaattgctgggcccgaacaagaatggttacatctcattgcaaaatctgaaatcggctctagcgaagaactccacggatgcaatgaaggactccagggttgtcgattttgttaacaccgtgtgcgctcttcagtacaggaaactggatttcgaagagttcgccgcttccgccatcagcgtctaccagatggaagccctggagacctgggagcagcacgcgaggcgcgcgtacgagctgttcgacaaggaaggaaaccggcccattgtgatcgaggaacttgcgtcggagctcggacttggcccgtcagtgcctctccacgttgtcctccaagactgggtcagacacgccgacgggaagctgagcttcctggggttcatcaagctcttgcacggggtctcgtcgcgctcgatcccaaaggcctagcattgtacaccatccatccatcgtcgttgttgttgtagttgtactgaagtaaagctgttgtgtagacgagtgtacagatgaggatagggaaaagaaatgaacatgatggaagactggaagggccgtaagatttgcggctgctgtttgtcaatgccaaattgccattgcctgcagctgcaaaaaaaaaaaaaaaaaaaaaaaaaaaaaaaaaaaaaaaagggcggccgc

SEQ ID NO: 258816 - DNA, 548 bp, Zea mays
ttaaattttgagtgttgtatcattttgccatcttcaaggtgttgttcatcgtgatctgaagccggagaatttccttttctcttcaaaggatgaaaactctcccttgaaggtcatagattttggcctgtctgactttgtgaagccagacgaaagactaaatgatattgttggaagtgcatactacgttgctccagaggtgctccaccgatcttacggcaccgaggcagatatgtggagcatcggagtaatcgcctacatcttgctatgcgggagccgacctttctgggcgcgcacggagtcaggaatcttccgagctgtcttgaaggcggaaccgagtttcgatgaggccccatggcccactctcacagctgaagctaaagatttcgtaaaaaggcttcttaacaaggattaccgcaagaggatgacggccgcgcaagctctgagccatccgtggatccgtaatgctcaacaagtgaaagttcccttggatatgatcatctataagctaatgagagcgtacatcagctcgtcttcgctgcggaagtctg

SEQ ID NO: 258817 - DNA, 567 bp, Zea mays
ggggaccaggcgtccggtttaacacggtgtgcactcttcatttcaggaagctggacttcgaagagttcgcgggttgcgtcatcagtgtttaccagatggaagccttggagacgtgggagcagcacgcgcggcgtgcgtacgagctgttcgacaaggaaggaaaccgacccatcgtgatcgaagagcttgcatcggaactggggcttggcccgtcggtgcctctccacgttgtcctccaggactgggtccggcacgccgacgggaagctgagcttcctggggttcatcaagctcttgcacggggtctcgtcgcgctcgatccccaaggcctagcattgtacaccatccatccctgcatatctatatccatcgaccgagggagacgagtgatggctgagccagtctctggctgcaggtgcgtgcgtgtgtgttcagtgttctgttccacggtggacggcctgaacccaaacccaaagaccaagaaaaatgcctgacaatagtcctgtttaaaaagagtaaggcagcccagggtctggggcctgtgcacaacttgtacaacatccttggc

SEQ ID NO: 258818 - DNA, 1437 bp, Zea mays
agaattcggctcgaggttgctcgtcgcgctaaaggtttaggaatgcatgtgattgcacatgatccatacgcttctgctgatcgggcccgtgcaattggagttgagctagttagtatggaggaggccatgacaactgctgacttcatctcattgcacatgcctcttacccctgcaacaaacaagatgctcaacgatgaggcctttgctaagatgaagtatggtgttcgcattataaatgttgcacgcggtggtgtgattgatgaagatgctctagtcagggctcttgattcaggaatagtagcacaggctgctcttgatgtgttcactaaagaacctccagctcctgataacaagttggtgctgcacgagaatgttactgtcacacctcaccttggtgccagcacagtggaggcacaggaaggggtggctattgagatagctgaagctgtcattggagctctgaaaggggaacttgcagcttctgcagtcaacgctccaatggttcctgctgaggtgctgtcagagcttgcaccttttgttgtgctcgcagaaaagcttgggcgcttggctgtgcaactagttgctggtggtggtggtatcaagtctgtgaaagtgacctatgcatctgcgcgggcccctgatgatcttgacacgagacttctccgtgcaatgatcaccaagggattgattgaaccaatctccagcgtttttgtcaatctggtaaatgccgacttcaccgcaaagcagaggggagttcgcatcacggaggagaggatcctgctggacggctcacctgaaacacctatcgactacattcaagttcagattgccaatgtcgagtccaaatttcccagtgcgatatctgagactggagagatcactgtggagggcagagtgaaggatggtgttcctcatctaacaaaggttggagcattccaggtggatgtgagcttggaaggaagcctgatcctttgcaggcaggttgatcagccaggtatgattgggtcggtaggaagtgtcttgggtgaggagaacattaatgtcagtttcatgagtgtcggaaggattgctcctcgcaagcatgctgtcatggcaatcggtgttgatgaggaaccaagcaaggtcacactgagaaagattggggagattccagcaatcgaagagtttgttttcctcaagctttaggcaactaagcgcaaatgtatgtttcaagttgcaagcatgctgtgcaattttgatgtagcttagcaatatagaggacggatggttctccttaaataagcttttaggattatttttgtagtggcgctcttgaatttggtgcaatattgatgccatcttttgaacggggtgttattctcagctactgtttcccaggttataaaaaataatatgtactccacgttccaatcaaaaaaaaaaaaaaagggcggccgc

SEQ ID NO: 258819 - DNA, 582 bp, Zea mays
  unsure (1)..(582): unsure at all n locations
tttcccagtgcgatatctgagactggagaaatcacttgnagggcagagtaaggatggtgttcctcatctaacaaaggttggagcattccaggtggaatgtgagcttggaaggaagcctcatcctctgcaggcaggttgatcaaccgggtatgattgggtcagttggaagcgtcttgggtgaggagaacgttaaatgtcagtttcatgagtgtcggaagaattgctcctcgcaagcatgctgtcatggcaattggtgttgatgaggaaccaagcaagggcacactgacgaagatcggggagattccagcgatcgaagagtttgttttcctcaagctctaggcgcgaatgtatgtttgaagttgcaagcatggtgtgcaattttgatgtagctagcaatccggaggacggatggttctccttgaaataagcttttaggagtatttttgtagtggcgctcttgaatatggtctggtatcgatgcctacttttgaacggggtgtttattaataaaaacttatatatcaatgcttggctcattggttgattcaaaaaaaaaaaaaaaaaaaaaagcccacgcgtccg

SEQ ID NO: 258820 - DNA, 1521 bp, Zea mays
gaattcggctcgaggcaccagaaacagaaaggtagtagatcaaggaacgccagtgcggcgacaatgaccggcagtggaagcacgggcgccaatggcaagagccagagctccagggccaaggcaatgctgctcgccttgggcaagagctttcctgaccaagttctgcctcaggagaaggttgtggagagctacctccaagaaagcagctgcgacgatcccgccaccagggccaagcttcagcgcctttgcacgactacaacagtgaagacaaggtacactgttatgtccaaggagctattggataagcacccagagctgaagatggagggtactccgacactgacaccccgccttgacatctgcaatgccgcggtgatcgaccttggtgctgccgcagctcgcgctgcccttgacgaatggggtcgccctgcagctgatattacccacctcatctacatctcatcaagtgaccttcgtctcccagggggcgaccttcacctggctgctcgccttggccttagcccaaacaccgtgcgcacttcccttctcttccttggctgctccggtggtgctgctgccctccgcactgccaaggacattgctgagaacaatccagggagccgtgtcctagtaacagctgctgagaccactgtgctaggcttccggccaccaagttatgaccgtccttatgaccttgttggtgctgcgctgtttggtgatggtgcatcagccgtgattataggagcaggtcccatgacaccagcagaaaatcctttcttggagcttgagttctccacgcaggagttcctacctgggactgataaggtaattgatggcaaaatctcagaggaaggaattaattttaaactagggcgtgatttgcctgagaagattgaaagccgcatagaaggtttctgcaggactctcatgaacaaggtagggataaaggatttcaacgatatattttgggctgtgcatcctggtggaccagcaatattgaacaggcttgagttctgccttaaacttcagccagagaagctcaagattagcagaaaagccttaatgaactatggaaatgtgagcagcaatacaatcttctatgtgctggagtacttgagggacgagttaaagaaaggggcaataagtgaagagtggggattgatcttggcttttggcccaggcatcacctttgaaggactgctagttcgaggtgtaaagaaaaccttcacaagctaatataatggtgggtacatggcaagcataaagattaattatatatacagaaacatcacataaagagcatagatgtctcggtggaagctgagcaccacatagcacatcgctaatattttactgtatttgtgttcttcatctatcaaacagtgtaaggtacttgagtttgcttcctagacattgtagaaataaggcactatacagcctgttgtagtgttgttccactgtactatgcaatgattgcaggattactttaaaaaaaaaaaaaaaaaaaaaaagggcggccgc

SEQ ID NO: 258821 - DNA, 566 bp, Zea mays
gtaaacggcgacgaagacaatcctctaccaagaagaagactggtcgagtgagagagatggacggcggcaaaggcagcgggattggtggcaatgtcgtaggaggaggcggtgatggcaagatcggcggcggcgctgtcaagggaggaggctccaactccgtgggaggcgcaggctctatcaactcaggtggcggcgttgcgggacatggtgatggtgcagggaagtcgggctccggcggcgacggcatgatgaaggctcccggcggcggcggttgctacatcccccgctccgacttcgaagccaacccgaaggagttcttccagggcctccaccagcagggaggaggaggcaaaaagtagatccatcgagctagatgctagcaagctagctgcttgttgcatggcaagctagcgtgggatttgtgatcctgaatgaatgtatggaccgtcgtcagtctccgtagcctctaaataaaatgttaagctgctcgatcgtttctgggtatcatttgctcgcatgtatacgatacaagtttattatatatcattatcaggccatttaaaaca

SEQ ID NO: 258822 - DNA, 1968 bp, Zea mays
atccaatcttgcatccgaattcggctcgaggctcctccatggccatggccatggcccgaccttgtgctttccttctcttcttcctagttcttttctcctacgacggatccggtcctgggagcagcaggaggactaggaggagtggcgtcgcgcaggccacgcagagagtcttcctgtatccacaggctcccaaggtctcctccatcgtgagcagcaagtacaggaccgcgtaccacttccagcctcccaagaactggatcaacgatccaaatggaccaatgtactacaatggtatctaccaccagttctaccagtacaacccaaacggctcgctctggggcaacatagtctgggcgcactcggtctccacagatctcgtgaactggatccggctcgcgccggcgatagagcggacgactccgagcgacatcaatggctgctggacaggttcagccaccatcctaaagagcggccggcctgccatcatatacaccggcgccgacaccgagaagcgtcaggtccagaacgtggcgttccccaagaacctgtccgatccgtacctgcgggagtgggtgaagccacacgacaacccggtgatccagccggtcggacgagggctgaacccaggccagttcagagacccgacgaccggctggatcggcccggacgggctgtggaggatagccgtcggggccgaggtcgacggccacagcgcggcgcttctgtacgagagcgaggacttcgtgcgctgggacagagtggaccacccgctctactcctccaacgcctccgccatgtgggagtgcccggacttcttcgcggcgatgccgggcgagaactccgggctggacatgtcggctgcggtcccggatggcgccaagcacgtcctcaagatgagccttgacggctctgacaagtacatggtcggcgtctatgatctgaaaggtgacgcctttgtgccggataccgtgatcgaggaccggaggctgtggtcaaggattgactacggcaactactacgcttccaagtcgttcttcgactcgaagaaagggaggagggtcatatggggctggacgaatgagacggacagttcgtcagacgacgtcgccaaaggatgggctggaatccatgcaattcccaggactatatggttggataaagacagcaagcagctgctgcaatggccggtcgaagagatcgagtcgctccgaggaaaacaagtcagacaccaaggcctggagctcaggaagggggatctgtttgagattaaggaaattgacactctgcaggcagatgtggagatagatttcgagctcacatccataggcagtgccgacccttttgacccttcctggctcttggacatcgagaagcagtgccgggaagcgggcgcgtcggctcatggcccgttcgggctcgtggttcttgcttctgagagcatggaagagcacacctccgtgcacttcagagtgtactacagatcacaggagaagcacatggttcttatgtgcgccgatctgaggaaatcgtccttgagaccggagctgtacacgccagcctacggaggcttctttgagctggacctggagaaggaaaagacggtggtatctctgagaactttgatcgatcgctctgcggtggagagcttcggtggaggcggcagggtgtgcatcatggccagggtctatccggcggcgctcgtcgacgacggcggcactcgcatgtacgcgttcaacaatggcactagcaccgtcagagtgccccggctagaagcgtggagcatgaggagggcacaggttaacaagggatgaggaggaacacaaggccatttgatagctagaggagaggaacagagcatgggcacatgaattaaacacacactgctggtttaatttgctggaattaatcaatcaatcaatcaacaaacacacgaagattaaatcaaaaaaaaaaaaaaagggcggccgc

SEQ ID NO: 258823 - DNA, 1511 bp, Zea mays
ggatttacactaccaacaaagttttgcttcgccgggcacagaggtaaaagtatggtttggaaaggttgaagatctgccagtttacttcttgggaccacaaaatggcatgttttgggttggatgtgtctatgggaagaatgatgagagtagatttggcttcttctgtcattctgctctggagtttctgctccaaaaaggatcttctcctgatatcatacattgtcatgactggtcaagtgctcccgttgcttggctatacaaggaacagtatgctcttaatgggatgggaaatggtcggattgtatttaccatccacaatcttgagtttggagcgcatcacattggcaaggcaatggcacattgtgacaaagctacaactgtatccgatacatactcgaaggaagtggccggacatggagctattgcacctcactactataaattccatggaattcgaaatggaattgatcctgatatttgggatccatatactgacaaatttattccggtccattatacatcagagaatgttgttgagggcaagagtgctgcaaaaaaggcattgcagcagatgcttggattacagcaaactgatacccctgttgttggaatcatcactcgtctaacagttcagaagggaatccaccttatcaaacatgcaatgcatcgagctcttgaacgcaatggacaggtggttttactgggttctgcaccagatcctcgcatacaaagtgactttacaaatttggccagtaagctgcatggtgaataccatggccgagtgaagctatgtctaacctatgacgagccactgtcacatttgatatatgctggcgcagacttcattctcgttccttccatcttcgaaccttgtggtctaacacagcttattgctatgcgctatggatccatcccagttgttcggaaaactggaggcctgtacgacaccgtttttgatgtcgacaatgataaggatcgggctcaagcacaaggtctcgagccaaatggattcagtttcgaaggagctgatagcagtggtgtggattatgctctcgacagagccataaccacattttatgatgcacgcgactggttcaattccctttgcaagagggtaatggagcaagattggtcatggaacagacctgccctagactacatggagttgtaccattctgctcgcaaaagctgatagcttttaccactagggaaatcaggctcgttttgcccaggttagaagcatctcagcctcaggccttgtgcaaattcatttgtgcactgggaagaaaagagtaccgactggccttgagcatgcccgccgtctaaggatgcaacacacaccgtgtatagttagagaatgctactcgtcgtacgtttcatgcatgtgttttgtgtatacacctcatgtagcttgcaaaacaacagtacgacgtatcccggccgtctaccatgcctgagggcgtatataggctataggcttatgcaaaaaaaaaaaaaaaaagggcggccgc

SEQ ID NO: 258824 - DNA, 1560 bp, Zea mays
tctactcgtccgcccacgcgtccgccaccagtccaccaccactgctcgcactcactccaccgctgcccacttcttgtttgtattgtatccagactccagaggaagccgagagggccaatgaggcaaggcatgagctccccttccgccgccgcggcgctcgtgctcctcctggccctgctcgccggaggccagtgccgagaggcccagctcgacgccgcggacgccggcaccggcacggagaactacaccgccagcgacgccgccgtgtactggggcccctggcagagggcccgggccacctggtacggccagcccaacggcgccggccccgacgacaacggtggcgcgtgcggattcaagcacaccaaccagtaccccttcatgtccatgggctcctgcggcaaccagccattgttcaaggacggcaagggctgcggctcctgctacaagattcggtgcaggaaggacccgtcctgctccgggcggacggagacggtgatcatcaccgacatgaactactacccggtgtccaagtaccacttcgacctcagcggcacggcgttcggcaggctggccaagcccggcctcaacgacaagctccgccactcgggcatcatcgacatcgagttcaccagggtgccgtgcgagttccctggcctcaagatcgggttccacgtggaggagtactcgagccccgtctacttcgcggtggaattcgggtggagggacggcgacggcgacgtggtgcaggtggacctgatggagtccaagacggcgcgcggcccgccgacggggcggtggacgccgatgcgcgagtcctggggctccgtctggcgcatggacaccaaccaccgcatgcagccgcccttctccatccgcatccgcaacgagtccggcaagacgctcgtcgccaacaacgtcatcccggccaactggcgccccaacaccttctaccgctccttcgtccagtacagctaaccgatcgggatccgtgccctgcccgcaattggagctggctggctggggcgctactcggctcggtcaccatcgtctacagtactatactatgctctactaccactagactgctgctgttactactagtctactaccaccaagtacggcggaacggaacagctagtcgtcgtcggcggccttgggaggggaggtgtctccggtcaccgtgccgttgcagttgtatcgtgatcatggtcctgggagttgttgcatccggggcgcgctttttaggtcaggcgtcgtgtgcgatgtttgtggggtcaggctggcatgtcatgccgtgcgtgaccctgattgcgagccggcaagcaagaagacaaaaaaactaaagccgtgtgggaaaatggaggaggcaggcgtacaagctacgctctcccgcccactgttgcttttataatttatcatcatcatcatcttcattccgatcggtgattaatcgaaaagtatattgtaatgtataaacgccattttcctttcgtcaaaaaaaaaaaaaaaaaaaaaaaaaaaaacaaaaaaaaaaaaaaaaagggcggccgccgacaa

SEQ ID NO: 258825 - DNA, 1659 bp, Zea mays
gtgttgagttgggctaggacggctgcgaggccccggctcgatcgactagccagtccaggccatgtgcgccccaaccaacatggcacgttctccctcgctcctcctctctgctgctaactgcgtacacacacagacctctccctctccctcccctcccgttagctagcgggccgacgcccatctggcctataaattggcccacacggcaccacccacccaccactgctcgcactcactcacagtcgccgccgctgcccagtgcccactgctcgccgctagaggaatctgagagagagaggggaaagggcgaaggaggcgcaggcaggcatgggctccccttcctccctccccgccgcggcggcgctcgtgctcctggccctgctcgccggagcccagtgccgcgaggcccagttcgacgccgcggacgccggcgcggagaacttcaacaccagcgaggccgccgtgtactggggcccctggcagaaggcccgggccacctggtacggccagcccaacggcgccggcccggacgacaacggtggtgcgtgcggcttcaagcacaccaaccagtaccccttcatgtccatgggctcctgcggaaaccagccattgttcaaggacggcaagggatgcggctcctgctacaagattcggtgcaggaaggacccgtcctgctccgggcggacggagacggtgatcatcaccgacatgaactactacccggtgtccaagtaccacttcgacctcagcggcacggcgttcggcaggctggccaagcccggcctcaacgacaagctccgccactcgggcatcatcgacatcgagttcaccagggtgccgtgcgagttccctggcctcaagatcgggttccacgtggaggagtactcgagccccgtctacttcgcggtgctggtggagtacgaggacggcgacggcgacgtggtgcaggtggacctgatggagtccaagacggcgcgcgggccgccgacggggcgctgggcgccgatgcgcgagtcctggggctccgtctggcgcatggacaccaaccaccgcatgcagccgcccttctccatccgcatccgcaacgagtccggcaagacgctcgtcgccaggaacgtcatcccggccaactggaggcccaacaccttctaccgctccttcgtccagtacagctagctagctagctggtttgcgcccctagttcaccacccaccactactaccaccgccacccactagactactgcttctgctaccaaatactacggcggaacggaacggctggttgccgccgccgccgtcgtccttggaaaggttgaggcgtctcttggtcatccgtatcgttaccgttgtcatggtcctttgagtcgttgcaaccctgattgcaagccggcaagggggaaaaaaccaacaaagccgtgtgggaaaatggaggaggcaggcgtacaatgtacgctctcccgcccactgttgctttataatctctatatcatcatcatcttcttcttctccattccgatcggtgattaatcgaaaagtatattgtaatgtataaacaccatttcctgtttcccggagctgagctaccctgttcacacccctgtgcagggttgaggctccgcatgttaattgttctttcgtcaaaataaaaaaaaaaata

SEQ ID NO: 258826 - DNA, 1231 bp, Zea mays
gcagcaagagccacaagcaaggcggagggggacgagcccatgccgtgccgacgacaccgtctccgtatccgtctccgtctccggcggctggcaacaacagcagcagcgacgacgggtggctgaacgcccgtgcgacatggtacggtgccccgaacggggctggtccggacgacaacggcggcgcgtgcggcttcaagggcgtgaacatgccacctttctcggcgatgacgtcgtgcggcaacgagccaatcttcaaggacggcaaaggatgcgggtcctgctaccagatccggtgcaaggcccaccctgcgtgctccggcgtggcggagacggtgatcatcacggacatgaactactacccggtggccccctaccacttcgacctgagcggcactgccttcggggccatggcaaaagacgagcacaacgacgagctaaggcacgcaggaatcatcgacatccagttcaagagggttccctgccagtaccctggtctgacggtgaccttccacatcgagcgtggctccaaccccaactacctggcggtgctggtggagtacgagaacggcgacggcgacgtggtgcaggtggacctgatggagtccagccccgacgacggcgagcccaccggcgtctgggagcccatgcgcgagtcctggggctccatatggaggatggacacccgccggccgctgcaggggcccttctcgctgcgcgtcaccaacgagtccggcaagacgctggtggcggaccaggtcattccggcagactggcagcccgacaacgtctacagctccatcgtccagttcgagtagcagtatatgccatgcgtcgtacatatagatatatatacactacacacacaacgcggtgtcagcagtaatttaagcaagtatatgcatcatcattaattccatggacggatcggatcgatgatatatatgtacgtaaagataatagacaggcataagacgacgtctctacctagctagctatagctgctgaatacatacatatacttgtcgatcgagacgtcgcttgtgacgtccgtccagtgcattatgaatcatcttcgatcgatctgttgttggattatacatgccatatatggacgtcacaagcgacgtctcgatcgacaagtatatgtatgtattcagcagctatagctagctaggtagagacgtcgtcttatgcctgtctatctttacgtacatatatacggacgcgtggg

SEQ ID NO: 258827 - DNA, 680 bp, Zea mays
  unsure (1)..(680): unsure at all n locations
ttttcgcgtccgcccacgcgtccgcttcgacctcagcggcacggcgttcggcaggctggccaagcccggcctcaacgacaagctccgtcactcgggcatcatcgacatcgagttcaccagggtgccgtgcgagttccctggcctcaagatcgggttccacgtggaggagtactcgagccccgtctacttcgcggtgctggtggagtacgaggacggcgacggcgacgtggtgcaggtggacctgatggagtccaagacggcgcgcgggccgccgacggggcgctgggcgccgatgcgcgagtcctggggctccgtctggcgcatggacaccaaccaccgcatgcagccgcccttctccatccgcatccgcaacgagtccggcaagacgctcgtcgccaggaacgtcatcccggccaactggaggcccaacaccttctaccgctccttcgtccagtacagctagctagctggtctgcgcccctagttctttctactactcggggccgctcggtcaccactactaccaccaccacccactagactactgcttctgctaccaaatactacggcggaacggaacggctggttgccccccccgtcgtccttggaaaggttgaggcgcctcttggtcctccgtaaaacccaaaaaaaaaaaaaaaaaaaaaaaaaataaanaaaaa

SEQ ID NO: 258828 - DNA, 635 bp, Zea mays
catcccggccaactggaggcccaacaccttctaccgctccttcgtccagtacagctagctagctggtctgcgcccctagttctttctactactcggggccgctcggtcaccactactaccaccaccacccactagactactgcttctgctaccaaatactacggcggaacggaacggctggttgccgccgccgtcgtccttggaaaggttgaggcgtctcttggtcatccgtatcgttgccgttgtcatggtccttggagtcgttgctaccctgattgcaagccggcaaggggggaaaaaaccaacaaagccgtgtgggaaaatggaggaggcaggcgtacaatgtacgctctcccgcccactgttgctttataatctctatatcatcatcatcatcatcatcttcattccgatcggtgattaatcgaaaagtatattgtaatgtataaacgccattttcctttcggcagtgcctttttttcctggttgtggatgttttgtttgagcattcagccctgctgtgctgaagccaaacgcaagtaatgtgctgaagccaaacgcaagtacaccagtaatgtccataatgagaatgtgaaagaaaaaaaaacgatagccatataaactcccgtttgacg

SEQ ID NO: 258829 - DNA, 1227 bp, Zea mays
gcggccgcccttttttttttttttttcacaatagaaactcattggtttcctttaccggttcagagagtgagatctgtctgtttgtagtttacagaggattacaatacaaaagaagtatagcttttctgtttctcccaccctctcgagcagaacgcaaactgcggaaatgtttcatgacttccacttatcagattaaaaacactgaaccatcttttctacatagagcagcaaaccctgccattacgaatctacacgacctgaagcgtccgactgagtacctctgaactaggctgtgctccctttttctctgacgtgcaattgcaacacgcacctggttttattcgcccaacagtttgctctcacgcctacagagacgacttcggcctgacggacgaaggcctgtgcccatacgaatacacgcctactccacgcttcttcccaagccggccagcatcgacgtactgaacgaggagagggcaggggctgtacttgctatctcccaggccgctgtggagtacccgaagtactgagaggcagacgtccaggccgatgaagtcggcgagctgcagagggcccatcgggtggttcgtgcccagcttcatccctgcgtcgatgtcctctttggttgccactccggtgtacagagcccagaaggcctcgttgatcatcggcatgaggatgcggttcacgatgaatcctgggtaatcttgcgagcatataacggacttcccgagtctttcggagaaagatctgaccgcagcaaacacctcatctgacgtatcggctcctcggataatctcgatcagtttcattaccggaggagggttgaagaagtgcatgcctatcacctgagaggggcgtttggtagctgaagccaggcgggttatggagatggagctcgtgttgcaggcgaggatggccgagggcttcgtgaccttatccagctccacgaatagcttcttcttgacgtcttcgttctccacgacggcctcgatcacaagatccgcgtccctgagatcctgcacggcggagacgcaccttatccgctttattgagtcctcgcacgcggcctgggagagctggcccttggcggcgaggcgccgtagggaggcggagatggagacgacggcacgggagagggcagtggggtcggcgtcgaggagaagtaaggcgcatccgcctccaaaggcgcccccgcgtccgcccacgcgtccgcccaagcaaccg

SEQ ID NO: 258830 - DNA, 1399 bp, Zea mays
gcaaacaagattttgctgatgatgtcattcactcaacctttccgatcaaggcgattagccgtcttagcctcgagaaagaggattgattcatcgttcatagcaataagaaggtctggctcagtgacagacatacaatccatccaacatttgggtacatgataatccagggtggggggggactaggctaacttagtacagtagcacaaaattaaagaggttctgcatagtaccatagctttgtttcttaccatttcattcattccattattactgattgagagacatgagacgacggaaatgcaatccaaggcagatggatggatggagatgactacggaaagaaagggttcactcggatctggcggcgtatcgttccaccttggggtcgttgaggttgatgccgaccatggcctccccgagccccgtgctgacgtcggccaggatggtggggtcgctgtagtgggtgactgcctggacgatggcgcgggcgcggcgcgcggggtcgccgctcttgaagatgcccgagccgacgaagacgccgtcgcatccgagctgcatcatgagcgcggcgtcggcgggcgtggcgacaccccccgcggcgaactgcacgacggggaggcggcccagctgcttggtctgcatgacgaggtcgtagggcgcggcgatgcgcttggcgtaggcgaagacctcgtcgtcgtccatgctgcggagcgcgcggacgtcgcccatgacggagcgcacgtggcgcacggcctcgacgacgttgcccgtgccggcctcccccttggtgcggatcatggcggcgccctcgcgcaccctgcggagcgcctcgccgaggtcgcggcagccgcagacgaaggggacgcggaagttgtgcttgttgatgtggtgcgcgtcgtcggcgggggtgagcacctcgctctcgtccacgtagtcgacgcccagggcctccaggatctgggcctccacgaagtgcccgatgcgggccttggccatgaccgggatggtgacggcgcgcttgatgtcgcggatgaggcccgggtccgacatgcgcgccacgccgccctgcgcgcggatgtcggcggggacccgctccagcgccatcacggcgcacgcgccggcctcctccgcgaggcgcgcctgctccggggtcaccacgtccatgatgaccccgccccggagcatctgcgccagccccaccttgacggagaaagtcgccgacttgggctgcttggacggctccagcagctccgcgccgttgctgccgtacaccgtcaccacgccgctgccgtcggacgccatgggtttggttcgcttgtgcctagccttgtgtggaatggaatggattggtttcctcgatccgggtgcctttgtatcctctctcggcaaggttccagta

SEQ ID NO: 258831 - DNA, 502 bp, Zea mays
gaagaagtgcatgcctatcacctgagaggggcgtttggtagctgaagccaggcgggttatggagatggagctcgtgttggaggcgaggatggccgagggcttcgtgaccttatccagctccacgaatagcttcttcttgacagcttcgttctccacgacggcctcgatcacaagatccgcgtccctgagatcctgcacggcggagacgcaccttatccgctttattgagtcctcgcacgcggcctgggagagctggcccttggcggcgaggcgccgtagggaggcggagatggagatgacggcacgggagagggcagtggggtcggcgtcgaggagaagtacggcacagcctccggcggcggcgagctgggcgatgcccgagcccatctgccccgcgcctattacgcccaccgccgcgatctcactcgctgtcgccattgttctgttttgtttcgtttgcaaggaagcgggcggtcgggcttgtcgctctggttggtaagtg

SEQ ID NO: 258832 - DNA, 2001 bp, Zea mays
gccttccgtcatatagtgcagccgcacgaccaggcttctcaccctccttctcggccgccgcccaagcagcagcagggccagcagcaccccaacaaccgccccaacaagcccaagcagcagcagcagcccccacctccacgtcctccgccgccacaccaggctccccccgccgcctcccccgccgacccgggcgcggccaccgtcggccgcgtgctgggccggccgatggaggacgtgcgcgcgtcctacacgttcggccgggagctgggccggggccagttcggcgtcacctacctggccacgcacaagcccaccggccgccggtacgcgtgcaagtccatcgcgacgcggaagctcgcgcacagcgacgacattgacgacgtgcgccgggaggtgcagatcatgcaccacctcacgggccaccgcaacatcgtcgagctccggggagcatacgaggacaggcactcggtcaaccttgttatggagctctgcgagggcggggagctcttcgaccgcatcatagccaagggccactacaccgagcgagccgccgcctcgctctgccgcgagatcgtcgccgtcgtccacagctgccactccatgggggtcttccatcgggatctcaagcccgagaacttcctgttcctcaataacaaggaggactccccgctcaaggccacggacttcggcctctccgtcttcttcaattcggctcgggcgtttaaggatcttgtgggaagtgcatattatgttgctcctgaggtactgaaacggaaatatggggcagaggctgacatatggagtgctggggtcattctttacatccttctgtctggtgttcctcctttttgggcagagaatgaggatggcatatttgatgctgtcttgcgcggtcacatcgatttctcttctgacccttggccttcaatatccaatggtgcaaaggatttggttaagaagatgctgcgacaagacccaaaagaacgcctgactgctgctgaaattttgaaccacccatggattagagaggatggagaggccccagataagccacttgacattactgtcattggtagaatgaaacagttcagggcaatgaacaagctcaagaaagttgcattgaaggttgtggctgagaacttatcagatgaagagattatgggcctaaaagaaatgttcagatccctggatacagataacagtgggacaattactcttgaagagctaagatctggtttaccaaaacttggtacaaaaatttctgaatcagaaattaaacaattgatggaggcggctgatgttgatggaaatggtaccattgattatgcggagtttatatcagccacaatgcatttgaatagattggagaaggaagaccacatactcaaagcttttgaatatttcgataaggatcacagcggatacataaccgtagatgagttggaagaagctttgaagaagtatgatatgggagatgacaaaactataaaagaaatcattgctgaagtagatacagatcatgatggaagaattaattaccaggagtttgttgccatgatgaggaacaacagccctgagattgttccaaatcggaggcgcatgttctaactgtcatggacaatcacattgaatactttcaagaacaatctgcccttagacataatctttgtcccattttctttttggaacagccgttaagaagactccttaatttgagatccatgtctctgctgcccggacctgtttgtcccaaaatagggtggtgttatagtgattcgtacttgatgctttgagcttcatggactcttgcgtggcaatgtttatccccattgtacgtctggttgttctgctgcttcgatctgaggctttctttaggtgtaaacggatatctgaattattaggataaatttaatattttaaaatagatatgtatgaaatttgatgttaaaaaaaaaaaaaaaaagggcggccgctcgcgatctagaactcaccacggtcacg

SEQ ID NO: 258833 - DNA, 282 bp, Zea mays
tttttaaaggcaacactctgaagatgcagagccccgagtacagtgggactaaacattgccacccatgagcccatgatgctccaaacatcgaagtacgagtcactataacaccacctattgtggtacaaatatgtcccggctgcagagaaattgatcttaacaaatattgagtcctcacagttgttcccaaaagaaaatggggccaggattatgtctaagggtgcatgttctaactgtcatgtacaattttattgaatactttcaagaccaatatgcaccctt

SEQ ID NO: 258834 - DNA, 2882 bp, Zea mays
tcgttaccatctgcaccagctcggcacctcacgctcgcagcgctaggagcctaggagcagctgcccgtctatttattggtccctctcccgtcccagagaaaccctccctccctccattggactgcttgctccctgttgaccattgggtattctgaaccatcgagccatggctgccaagctgactcgcctccacagtcttcgcgaacgccttggtgccaccttctcctcccatcccaatgaactgatagcactcttttccaggtatgttcaccagggcaagggaatgcttcagcgccatcagctgcttgcggagtttgatgccctgtttgatagtgacaaggagaagtatgcaccctttgaagacattcttcgtgctgctcaggaagcaattgtgctccccccatgggttgcacttgctatcaggccaaggcctggtgtctgggattacattcgggtgaatgtaagtgagctggctgtggaggagctgagtgtttctgagtacttggcattcaaggaacagctggtggatggacaatccaacagcaactttgtgcttgagcttgattttgagcccttcaatgcctcctttcctcgtccttccatgtcgaagtccatcggaaatggagtgcaattccttaaccgacacctgtcgtccaagttgttccaggacaaggagagtttgtaccccttgctgaacttcctcaaggctcataactacaagggcacgacgatgatgttgaatgacagaatccaaagccttcgtggtctccaatcatccctgagaaaggcagaggagtatctactgagtgttcctcaagacactccctactcggagttcaaccataggttccaagagcttggcttggagaagggttggggtgacactgcgaagcgtgtactcgacacactccacttgcttctcgaccttcttgaggcccctgatcctgccaacttggagaagttccttggaactataccaatgatgttcaacgttgttatcctttctcctcatggctacttcgctcagtccaatgtgcttggataccctgacactggcggtcaggttgtgtacattctggatcaagtccgtgctttggagaatgagatgcttctgaggattaagcagcaaggccttgatatcactccgaagatcctcattgttaccaggctgttgcctgatgctgctgggactacgtgcggtcagcggctggagaaggtcattggtactgagcacacagacatcattcgcgttccgttcagaaatgagaatggcatcctccgcaagtggatctctcgttttgatgtctggccatacctggagacatacactgaggatgtttccagtgaaataatgaaagaaatgcaggccaagcctgaccttatcattggcaactacagcgatggcaacctagtcgccactctgctcgcgcacaagttgggagtcactcagtgtaccatcgctcatgccttggagaaaaccaaataccccaactcggacatctacttggacaaattcgacagccagtaccacttctcttgccagttcacagctgaccttattgccatgaaccacaccgatttcatcatcaccagcacattccaagaaatcgcgggaagcaaggacaccgtggggcagtacgagtcccacatcgcgttcactcttcctgggctctaccgtgtcgtccatggcatcgatgttttcgatcccaagttcaacattgtctcccctggagcagacatgagtgtttactacccgtatacggaaaccgacaagagactcactgccttccatcctgaaatcgaggagctcatctacagcgacgtcgagaactccgagcacaagttcgtgctgaaggacaagaagaagccgatcatcttctcgatggcgcgtctcgaccgcgtgaagaacatgacaggcctggtcgagatgtacggcaagaacgcgcgcctgagggagctggcgaacctcgtgatcgttgccggtgaccacggcaaggagtccaaggacagggaggagcaggcggagttcaagaagatgtacagcctcatcgacgagtacaagttgaagggccatatccggtggatctcggcgcagatgaaccgcgtccgcaacggggagctgtaccgctacatttgcgatacgaagggcgcattcgtgcagcctgcgttctacgaagcgttcggcctgactgtgatcgagtccatgacgtgcggtctgccaacgatcgcgacctgccatggtggccctgctgagatcatcgtggacggggtatctggcctgcacattgacccttaccacagcgacaaggccgcggatatcctggtcaacttctttgacaaatgcaaggcagatccgagctactgggacaagatctcacagggcggcctgcagagaatctatgagaagtacacctggaagctctactccgagaggctgatgaccctgaccggcgtgtacgggttctggaagtacgtgagcaacctggagaggcgcgagacccgccgctacatcgagatgttctacgccctgaagtaccgtagcctggcaagccaggttccgctgtccttcgattagtacggggaaagaagaagaagaagaagcccaggccggagaaccatcgcctgcatttcgatctgtttcaccgcaattcgcattgttagtcgtgtattggagttatgtgtacttggtttccaagaactttggttccttctcgttttttttccttgtttgagcgtttttgggcagcgctggcctggttcctagtatggtgggaattggctgcaccttttgcttcgaataaaaatgcctgctcgttcacctgtcaaaaaaaaaaaaaaaaaaaaaaaaggcggccgggcggccgcccgggaatccggacggt

SEQ ID NO: 258835 - DNA, 3084 bp, Zea mays
cacacgcgtccgcggacgcgtggccgttcaccccgtccatttgatttgcgttcactgcgttgcgtttccttggaggggattgttctctcctctcctttggattggaggtccctccttcttctcctctctctctcagaggaaggcctgaggatccaggaagaggacagcaatgggggaaggtgcaggtgaccgtgtcctgagccgcctccacagcgtcagggagcgcattggcgactcactctctgcccaccccaatgagcttgtcgccgtcttcaccaggctgaaaaaccttggaaagggtatgctgcagccccaccagatcattgccgagtacaacaatgcgatccctgaggctgagcgcgagaagctcaaggatggtgcttttgaggatgtcctgagggcagctcaggaggcgattgtcatccccccatgggttgcacttgccatccgccctaggcctggtgtctgggagtatgtgagggtcaacgtcagtgagctcgctgttgaggagctgagagttcctgagtacctgcagttcaaggaacagcttgtggaagaaggccccaacaacaactttgttcttgagctggactttgagccattcaatgcctccttcccccgtccttctctgtcaaagtccattggcaatggcgtgcagttcctcaacaggcacctgtcatcaaagctcttccatgacaaggagagcatgtaccccttgctcaacttccttcgcgcccacaactacaaggggatgaccatgatgttgaacgacagaatccgcagtctcagtgctctgcaaggtgcgctgaggaaggctgaggagcacctgtccaccctacaagctgataccccatactctgaatttcaccacaggttccaggaacttggtctggagaagggttggggtgattgcgctaagcgtgcacaggagactatccacctcctcttggacctcctggaggccccagatccgtccaccctggagaagttccttggaacgatccccatggtgttcaatgtcgttatcctctcccctcatggttacttcgctcaagctaatgtcttgggttaccctgacaccggaggccaggttgtctacatcttggatcaagtgcgcgctatggagaacgaaatgctgctgaggatcaagcagtgtggtcttgacatcacgccgaagatccttattgtcaccaggttgctccctgatgcaactggcaccacctgtggccagcgccttgagaaggtccttggcaccgagcactgccatatccttcgcgtgccattcagaacagaaaacggaatcgttcgcaagtggatctcgcgatttgaagtctggccgtacctggagacttacactgatgacgtggcgcatgagattgctggagagcttcaggccaatcctgacctgatcatcggaaactacagtgacggaaaccttgttgcgtgtttgctcgcccacaagatgggtgttactcactgtaccattgcccatgcgcttgagaaaactaagtaccctaactccgacctctactggaagaagtttgaggatcactaccacttctcgtgccagttcaccactgacttgattgcaatgaaccatgccgacttcatcatcaccagtaccttccaagagatcgccggaaacaaggacaccgtcggccagtacgagtcacacatggcgttcacaatgcctggcctgtaccgcgttgtccacggcattgatgtgttcgaccccaagttcaacatcgtgtctcctggcgcggacctgtccatctacttcccgtacaccgagtcgcacaagaggctgacctcccttcacccggagattgaggagctcctgtacagccaaaccgagaacacggagcacaagttcgttctgaacgacaggaacaagccaatcatcttctccatggctcgtctcgaccgtgtgaagaacttgactgggctggtggagctgtacggccggaacaagcggctgcaggagctggtgaacctcgtggtcgtctgcggcgaccatggcaacccttccaaggacaaggaggagcaggccgagttcaagaagatgtttgacctcatcgagcagtacaacctgaacgggcacatccgctggatctccgcccagatgaaccgcgtccgcaacggcgagctgtaccgctacatctgcgacaccaagggcgccttcgtgcagcctgctttctacgaggctttcgggctgacggtggttgaggccatgacctgcggcctgcccacgtttgccacagcctacggcggtccggccgagatcatcgtgcacggcgtgtctggctaccacatcgacccttaccagggcgacaaggcgtcggccctgctcgtggacttcttcgacaagtgccaggcggacccgagccactggagcaagatctcccagggcgggctccagcgtatcgaggagaagtacacctggaagctctactcggagaggctgatgaccctcaccggcgtgtacgggttctggaagtacgtgtccaacctggagaggcgcgagacccggcggtacctggagatgctgtacgcgctcaagtaccgcaccatggcgagcaccgtgccgctggccgtggagggagagccctccagcaagtgatgcgcgacggcggccacagacctgatcgatcgatgagcgagagggagcactcggagtgtcgtgtcttttcccttgccatttctttctttttttcccttcccggaggcgaaaaaaagagtctgcttttgctaggcggcgggcgttcgttgctgctctttgcttcaagagttaaatttacctaccttgtcaaggtcttgttccatcattgatccgggtgtcgcttttagtagtctgatggactgttagtagtttgcgttgcgtcggttgagagggaacgttggtggtggtggtgtgtgtgcagtcaggcgtggtgctccctttgtttcctggatgggatgttgctccttgaataataatcgtagtggccttggagcccttttcctgaaataagagcagcatcctagtgcttacattaacagctgtaaaaaaaaaaccaaaaaaaaaaaaaaaaaaaagggcggccg

SEQ ID NO: 258836 - DNA, 1878 bp, Zea mays
  unsure (1)..(1878): unsure at all n locations
gtccgacgtcccaccggcccccgctctcgttttcccccgccggaacaagcacgctcaagcgctgcgcaacggattggccctgctaacgttcgccccgggcaagggcaaggcccccagcgcccaccgcaaggttaagttacgccagtggggcacctggcggccttctccccaagaagagcagcagcagacacctccgccacctccaccctcgaatcgttccccaccatggcgtcgcagggatcctccgtcttcgccgcactcgagcaggccccggaggaccccatcctcggagtgaccgttgcctacaacaaggatcccagccccgtgaaggtcaacctcggggtcggcgcctaccggaccgaggaagggaagcccctagtgctgaacgtggtcaggcgcgccgagcaaatgttgatcaataatccgtcacgtgtcaaggagtacctaccaatcaccggtctggctgaattcaataagctgagcgctaagcttatctttggcgctgacagccctgctattcaggagaatagggttgctaccgtgcagtgcctatcgggtactggttctttaagagtcggaggtgaatttcttgcaaggcactatcacgagcgcactatctacatcccacaaccaacctggggaaatcacccaaaagtcttcaccctatctggcttgaacgttaggagctaccgctattatgatcctgcaacatgcagccttcacttcgaaggactcctggaagacctcggttctgctccttcaggttcaattgtactgctgcatgcctgtgctcacaaccctactggagtagatcctaccatcgaacagtgggaacagattaggcagctgatgagatcaaaatcactgcttccgttctttgacagtgcctatcaaggctttgcaagtggaagtcttgacaaagatgctcagtcagtgcgtatgtttgttgctgatggtggtgaacttctcatggctcagagctacgctaagaacatgggattgtatggagagcgtgttggcgctttgagcattgtatgtaaaagtgccgatgtagctgttagggttgaaagtcaactcaaacttgtcatcaggcctatgtattcaaaccctcctcttcatggtgcctctatcgttgctaccatactcagggacagcgagatgttcaacgaatggactctggaactgaaggccatggctgataggatcattaacatgaggcaacaactatttaatgcgctgaaatccagaggaacccctggtgattggagccatatcattaagcaaattgggatgtttactttcactgggctgaatagcgaacaagtcgcattcatgaggcaggaataccacatttatatgacatctgatgggaggatcagcatggccggtttgagcatgaggactgtgccccatcttgcagatgccatacacgctgcagttactcaactgaaatgaggatagtatcgcagctttcgtgaataaaacctgaatcacccacaacaatgttctaagtactcagccagtggtatttactggttgacctactgtagtttgcgtcggaatagatatgtttttttactcttcgtggggcagttttgtactggtggattcataaggactctgattatggtgcgttcggaacttataataataagcacatgaaattttgcttcaggtgcagtgatgctgtctcattaagttatcagttattaggttgctgtcttattaagttatcaggtcgcagctgggttgaagcggagcacctgtcttgatttatctcttctcttttctagagagcttctgtcattcgtgtgcccttttaaaacaaaatgctctatcaannnnnnnnaaaaaaaaaaaaaaaaaaaagggcggccg

SEQ ID NO: 258837 - DNA, 445 bp, Zea mays
  unsure (1)..(445): unsure at all n locations
agaatttcttgcaaggcactatcacgaggttaaacttttcttgctcctatctgttttgctgcttcctgattataatgcatgactgctaaatcatacaaatatattccagcgcactatctacatcccacaaccaacctgnggaaatcacccaaaagtcttcaccctatctggcttgaacgttaggagctaccgctattatgatcctgcaacatgcagccttcacttcgaaggactcctggaagacctcggttctgctccttcaggttcaattgtactgctgcatgcctgtgcccacaanccctactggagtagatcctaccatcgaacagtgggaacagattaggcagctgatgagatcaaaatcactgcttccgttctttgacagtgcctatcaaggcttgcagtggaagtcttgacaaagatgctcagtcagtgcgtatgtttg

SEQ ID NO: 258838 - DNA, 584 bp, Zea mays
cccacgcgtccgcgcatctgttttactcccacgggcactcggaaatctgctgtacccttatctagttaggaggagtggtagtaaaaaaaatccccactacaagctttggattgctcaggtacacctggaagctctactccgagaggctgatgaccctgaccggcgtgtacgggttctggaagtacgtgagcaacctggagaggcgcgagacccgccgctacatcgagatgttctacgccctgaagtaccgtagcctggcaagccaggttccgctgtccttcgattagtacggggaaagaagaagaagaagaagaagcccaggccggagaaccatcgcctgcatttcgatctgtttccccccaattcgcattgttagtcgtgtattggagttatgtgtacttggtttccaaaaacttgggtcccttccggtttttttccctggtttaagggtttttggccagcccgggccgggtccctagtaggttgggaatgggtgcccccttttgcttcgaataaaaaagcctgctcgttcacctgtcccatcaaattgtttaaaaaaaaaaaaaaaaaaaaaagaacggccg

SEQ ID NO: 258839 - DNA, 600 bp, Zea mays
gtcatgggaatgtgctggatggtcacacggattgatgtggtaggcaggcaggcaggcagccggcacaggaggtggacggagacggacaggggaccggtggcgttccgcgtcccgagcttgccacgacccgatgtgcgattggggctctcagtaatggcggattgcttgagattgtaggtgggggataaatcggaggcgaaaaaaaagagtctgcttttgctaggcggcgggcgttcgttgctgctctttgcttcaagagttaaatttacctacccggtcaaggttttgttccatcattgatccgggggtcgcttttttagtagtttgatggactgttagtagtttgcgttgcgtcggttaaaagggaacgttggtggtggtggtgtgtgtccaatcaggcgtggtgctccctttgtttcctggatgggatgttgccccttgaataataatcgtagtggccttggagcccttttcctgaaataaaagcagcatcctagtgcttacctttgcagctgtaattggtgtttgcctcaggatttttgctccaaaaaaaaaaaaaaaaaaaaaaaaaaaaaaaaaaaaaaaaaaaaaaaaaaaaaa

SEQ ID NO: 258840 - DNA, 739 bp, Zea mays
gcgttttcgcgtccggtcagatccgagctactgggacaagatctcacagggcggcctgcagagaatctatgagaagtacacctggaagctctactccgagaggctgatgaccctgaccggcgtgtacgggttctggaagtacgtgagcaacctggagaggcgcgagacccgccgctacatcgagatgttctacgccctgaagtaccgtagcctggtaagccgtttgatgcctgcctctgcctctgcctctgcctgccagagaggatcacgtgttcgttcccattccagcagtcttaaacgagtgaatgaactactgacgcatctgtttctggaatccaggcaagccaggttccgctgtccttcgattagtacggggaaagaagaagaagaagaagcccaggccggagaaccatcgcctgcatttcgatctgtttcaccgcaattcgcattgttagtcgtgtatcgcagctatgtgcacttggcttccaatccaagaactttgggtccttctcgttttctttccttgtttgagcgtttttgggcagcgctggcctggttcctagtatggtgggaattggctgcaccttttgcttcgaataaaaatgcctgctcgttcacctgtcttccagagtgcaatgcgatgttctgttgcccaggtcgtgtggttctgactgatggcgatgttgtgttcttctgttaatcgcctgtttaacgtggtaggctgatgcttcttgttgag

SEQ ID NO: 258841 - DNA, 258 bp, Zea mays
cacacgcgtccgcccacgcgtccgcccacgcgtccgatcatcaccagtaccttccaagagatcgccggaaacaaggacaccgtcggccagtacgagtcacacatggcgttcacaatgcctggcctgtaccgcgttgtccacggcattgatgtgttcgaccccaagttcaacatcgtgtctcctggcgtcggacctgtcaatctccgggtgaagggaggtcagcctcttgtgcgactcggtgtacgggccacgcgtctg

SEQ ID NO: 258842 - DNA, 1394 bp, Zea mays
cggcggccgccctttttttttttttttgagcaacgaaaccaaatatatatagcgagctacaacctcaatagcatgcatatccaacagcaaatacattggtcgcgacttcagagtcgcacacctctcaataaatataaatacaactataattaacacaaacagggaaaacagagcacaattgaatttactacaccaactgcacataaccactgcgtgcttaaagttcattggcaatctttagttcccaacaagtacagattattcatcggtcttggatgaccaggcaccagactactcactgaaaaaaaaacccgccatcactctataaacaggtacagttctggagctccagcatcaacttattgtttccagggcgattgaatgattggatgagcatggaaagaggcgatcaaaagatgatgtcgtcgtccttctcccctccagcagccagcagatttgccgcagcccccacggagatgcccctcttcagcgcgagatcctcggcgagctgttcctctgcgaatagcctggcgttggccatctggcgctcgatctccctcttcttatagccctggatcttcttgagcctgaaaaagtcctcgcgctcgagttcgtcgagctcccccttgatgtagctgatggtgttctcgatcctgggcttcacgacattctcgagcgcgttgacgcgacggttggtggtcttgatggcctcgtcgagcgtgaggaaggaggtctggagcgaggcgagctcgacgagcacctcgatggccttgacgtgcgcggcgcggcaggcggcgacctgctgcccaccgcgggcgagacccgtaaggctcggagacgcgttggagggccccccggatgccgcggcggggtcgacgaagtgagtgaacttggggagcttgaccccggcgacattctcctggtgggatcggacgcggacggaggcggcgcggatggactggaggacgacgtgacggacgccgtcgccggcgacgtacttggcctcggcgagggagaaggaggaggcgcgcatcgtctcgcccatggactccttggcggcgacgatcttcttgaggatggcgcggaactggaccgtgagcgcgtcggacttcttcttcaacagcgcgtggccgcgggtggcgccgacgagccgcgccttcatgacgccgagcatcgtcaccgtcggcacgacgttgagccgctggttttgccccgccatcgctgcgccgcccgccgccggctagatcgccgcgaatccggggaaggaagaaaggggagcggatcgcgggcctgtgtcgagtgtcgactcgtgtggctggatcggggacacggcggtgtactgcttgatgtgaaggtgggttgtgttggatcggcgacgagctcgagccgaattc

SEQ ID NO: 258843 - DNA, 563 bp, Zea mays
tcagaaacaggcagataagcacacaacgaaacgaccctattcaacccagggactacagcaacagatgagcaacgaaaccaaatatatatatagcgagctataacctcaatagcatgccatatccaacagcaaataatacatcggtcgcgacttcagagtaggtgtagtacagcaatccgcgcacaccccgcaaataaatataaatacaactataatgaacacaaacagggaaaacagagcacaattgaatttactacaccagctgcacataaccactgcgtgctaaagttcattggcaatctttagtccccaacaagtacagattattcatcggtcttggatgaccaggcaccagactactcactgaaaaaaaaacccgccatcactctataaacaggtacagttctggagctccagcatcaacttattgtttccagggcgattgaatgattggatgagcatggaaagaggcgatcaaaagatgatgtcgtcgtccttctcccctccagcagccagcagatttgccgcagcccccacggagatgcccctcttgagcgcgagat

SEQ ID NO: 258844 - DNA, 497 bp, Zea mays
  unsure (1)..(497): unsure at all n locations
ggttataaaatgcaaaagcaaatacgtcccagactgcaacttctgagtgcaggtccaattgaataataaatatataatataatacggtactggaaggtacacgacaggaaatacggtccaattgaattttctacacgagctgcacataacgctccgtaaaagttacttggcactgtttggtttccaggtacagattattgagggtctcggatggctagactccagactacttactgaatcaaaatctccatcattctataaacagatacaattctggagctccagcatcaacttattgtttctgccacgattgaatgactggatggccatggaaggagtggtcagaagatgatgtcgtcgtccttctccccaccagcaaccagcaggtttgccgcagcccccanggagatacccctcttaagcgcgagacccccggcaagctgttcctccgcaaatagcctggcgacggccatctggcgctcgatcccacgcgtccg

SEQ ID NO: 258845 - DNA, 462 bp, Zea mays
gtcgacgaagtgggtgaacttggggagcttgaccccggccacgttctcctggtgggagcggacgcggacggatgccgcgcggacggactggaggatgacgtggcggacgccgtcgccagcgacgtacttggcctcggcgagggagaaggaggaggcgcgcatcgtctcgcccatcgactccttggcggcgacgatcttcttgaggatggcccggaactggaccgtcagcgcgtcggacttcttcttcagcagcgcgtggccgcgggtcgcgccgacgagccgggccttcatgacgccgagcatcgtcaccgtcggcacgacgttgagccgctggttctgcccagccatcgcgcccgccccgattagatccgctggccgacggcgagtatacgggagggaaaggccgaaagggggctgaccgctggtcgtatctctcgtgtatgccggctgctaatttcggga

SEQ ID NO: 258846 - DNA, 1478 bp, Zea mays
ctgcccctccccgcgccgttctttttggttccccactccccagtccccgccgccgccgaaacccgcagatggaggtcgtcgtcgccgcgaagcagaaggcgaagaaacacatacacctcttctactgctcagaatgcgaggagctcgccctcaagatcgccgccagctccgacgccatcgagctccaatccatcaactggcggagcttcgacgacgggttcccgaacctgttcatcaacaaggcgcacgacatccgtgggcagcacgtggcgttcctggcctccttcagctcgccgtcggtcatattcgagcagatctccgtcatcttcgcgctgcccaagctattcatcgcctcattcacgctcgtgctgcctttcttccccacgggctcattcgagcgcgttgaggaggagggcgatgtcgccaccgcgttcaccctcgcgcgcattctctcgatgatccccaagtcgcgcggcgggcctaccagcgtcgtcatctacgacatccacgcgctccaggagaggttctacttcggggacgacgtcctgccatgcttcgagacagggatcccgctcctgctgcagcgcctccgccagctcccggacgcagaaaatatcaccattgcctttccagatgacggtgcgtggaagcggttccacaagctgttacagcactttccaatgatagtctgtaacaaggttcgggaaggtgacaagagaatagttcgtataaaggaaggactacctgaaggccgtcatgttgttattgttgatgatttagtgcaatctgggggaactcttagagaatgccagaaagttctagctttgcatggcgctgcaaaagtcagtgcttatgtgactcatgctgtgtttcctaagcagtcatatgaacgtttcatggcgtctagttctgctgggccaggtgaccaatttgcttacttctggatcacggactcatgcccacacacagtaaaagctattgggcaaagacctccatttgaggttctgagcctcgctggctcaattgcagatgctcttcagatatgagcgtacactggtagatgggcatgggcttggattgttgatgcccaccagattgaaacttgtactatgaggtggaatgctcccgcttttcctaaatgtaagagttggtttccagttcctggaaaagcaaataatgtgtagtaagttaagtacctgaaggttccataaacagccctgtggtttgtaataaaatcaggcattggatactcaattgttgacagctgtgtatttgtcaatgttcacttctgtttgaagtgcgcgagaccagtgctttactttcctgacccgtcggagtatcggtttagcaacttcaggtactgggctttgttgtgaacaaatagtgcaatgtaactgaacatgaacctaattgaatttctattagattggaaaaaaaaaaaaaaaaaagggcggccgcatggtcatattggcaccatg

SEQ ID NO: 258847 - DNA, 475 bp, Zea mays
ggaactcttagagaatgccagaaagttctagcttcacatggcgcttcaaaagtaagtgcttatgtgacccatgctgtgttccctaagcagtcatacgaaaatttcatggcgtctaactctgctgggccaggcgaccagctcgcttacttctggatcacggactcatgcccgcacacaataaaacccatcgggcaaagacctccgtttgaggttctcagccttgctggctcgattcctgacgctcttcagatatgagcgcgtacactgactggtagacggggggcttgaaccgtgggatgcccgtcagatcgagaacttgtaccgtgagatgagctgctcctgctttttttccctaaatgtaggagtttgttccggttccttgaaaaaagcaaataatgtggagcaagttttaagtacctgaaggttccacaaacagcgctgtgaattgatgataaaatcaggcattgggatactc

SEQ ID NO: 258848 - DNA, 456 bp, Zea mays
ccggaccggaatcggaagggtccggcccacgcgtccgcgcccccccgcggccgagaaaccgccgatggtggtcgtcgccgccgccgccgccgcgaagcagcaaggcgaagaagcatatacacctcttctactgctccgaatgcgaggagctcgctctcaaggtcgccgccagctccgacgtcatcgagctccagtctatcaactggcggagcttcgacgacgggttcccgaacctgttcatcaacaaggcccgcgacatccgggggcagcacgtggcgttcctggcctccttcagctcgccggcggtcatattcgagcaagtctccgtcatcttcgcgctgcccaagctcttcatcgcctcggtcacgctcatcctgcccttcttccccacgggctccttcgagcgcgtcgaggaggagggcgacgtcgccaccgcgttcaccctcgcgcacattc

SEQ ID NO: 258849 - DNA, 1185 bp, Zea mays
cggaggaaccttggaaggaattggaaaggaaaaaaccgaacctaatcaaggtaaaattgttccaaccggagattcggcggccgccaatccggtaaccgttgcaaccttggttgcgggggtcccaaaaaacccaaaatttggtggtggcttcggaggaattttggaaggaattggaaatgccaaaaccggaactgttgccggcgttcctattggaggatcctccggtggcgccgatgctggcgctggcgctaccgtaagtgctggtgtctcgggaggcgctaaagttggtggtggcgttggaggaaacgcgggaggaagtggcaaggcgtatacaggaaccggtgccgatgcgggtgtttccggtggaggatccggtggcgtcgatgctggtgtctccggaggcgccaaagttgacggcaacattggaggaaaagcgggagggagtggaaatgcatatactggagctgatgcaggtacaagtgtttcaggtggaggatccggtggcgccagtgcaggtaccagtgctaccgtgggtgctggtgtctccggaggtgccaaagttggtggtggcgtaggaggaaatgcaggaggaagtggcaacgtctatactggaaccggtgccgatgcaggcgtttctggtggaggatccggtggcgccgacggtggtattggagctaacataggtgctggtgtcttcggaggcgtcaaatttggtggcggcgccggaggaagtgtaggaggaagtggcagtgctgctgcaggtgcttctggagggagtaaatcatcggggggtggctcagattttggatatggttcagcgagcaaggagttatagaggatgatgaccactcaccaccgtaagatcgatatgatccgtcccaaggaatttattcctgccctttttgttatcgcgtgttgttttattaccacgcaccagtcaatagtgtggaggcaatatacattgattccccttgactggacaatacaaagataaccttatgtatttcatttttgcttacttaacattgccatgtaaaccagaatagctgaggcttattctcatgataaacatgacatttattttacggcttcatcttgaaaaaaaaaaaaaaagggcggccgcaaaaaaaaaaaaaaaaaaaaaaaaaaaaaaaaaaaaaaaaaaaaaaaaaaaaaggggcggcc

SEQ ID NO: 258850 - DNA, 1228 bp, Zea mays
cggacgcgtgggcggacgcgtgggcaagtacaagaattcggctcgagggcacaacgtgttctgggacgaccagaactcgcagatgcagtgggtgaagcccctcaaccttgcgcagctcaaggcagccatgcagaagcggctcaagtccgtcgtgtcacgctacgccggcaaggtcatccactgggacgtggtgaacgagaacctgcacttcaacttcttcgagacgaagctgggccccatggcgtcggcacagatctaccagcaggtggggcagctggaccgcaatgccatcctattcatgaacgaattcaacacgctggagcagcccggcgatcccaaccctgtgcccgccaagtacgtggccaagatgaaccagatccgcggctacgccggcaacggtggcctcaagctcggcgtcggcctcgagagccacttcagcacacccaacatcccgtacatgaggagctcgctggacacgctcgccaagctgaagctgcccatgtggctcaccgaggtggatgtcgtcaagagccccaaccaggtcaagtacctggagcaggtgctcagggaaggcttcgcccaccccaacgtcgacggcatcgtcatgtgggcagcgtggcatgccaggggctgctacgtcatgtgcctcacggacaacagcttcaagaacctccccgtgggcgacctcgtcgacaagctcatcgccgagtggaagacgcaccgcgcgtccgccaccaccgatcacaatggggcggtggagctccacctgcccctaggcgactttaagttcaccgtaagccacccatctttgaaagccgctgctgttcaaaccatgaccgtcgacaattcggcgtcggcgtcccagcataccatcaacgtcaagtcctaggagacgacatcaggcactctgtggcggatctttaattaatttcttctttatttttcattctggtgaataaataggtcccaaagagagagataaaaggagaaggaaaggagacgtggcagcatggccacgttagtgattttttgttcggtgatttttttttgtaagctatatatagatagagagtagtcatttttaagttattaattatatagttgcaaatgcgcacgttaatggttgtcaatagctttgtcacatctatatggattcctagtaatacacataaacattacagatctttgaactaaaaaaaaaaaaaaaaaaaaaaaaaagggcggccgc

SEQ ID NO: 258851 - DNA, 1463 bp, Zea mays
gcttggtctaaacattcaagaagcacatgcattttcaacaaatgatggctactcacttgatgtctttgttgttgtcggttggcatgatgaggaaacagaggatttagtagaagcagtgcagaaggaaattggcaggattgaagagacacaagcatggtcttcatctcattcatggtctactccagttgaaaacatgcagattgctgagatttcagcagctggccgtgttgagataccaacagatggtgctagtgaatgggaaattgatgtaaagcttctcaagtttgggaataaagtagcatcaggatcatatggtgacctttaccggggtacatattgcagtcaagatgttgctattaaagtgctgaaacctgagagaataaatgcagacatgcaacgtgaatttgctcaggaagtatatattatgaggaaggtccgtcacaagaatgttgtgcaatttattggggcttgcactaaacccccaaacctatgtatagtcacagaatttatgtccggtggaagtgtgtatgattacctccataaacataaaggtgttttcaaacttcctgctttagttggagttgcgacggatgtgtcaaaaggcatgagctacttacaccagaataatattattcatcgtgatttgaaaactgcaaaccttctgatggatgaaaatgggactgttaaagttgctgattttggtgttgcacgtgttaaagctcaatctggagttatgactgcagaaactggtacttaccgttggatggccccagaggtcattgagcacaaaccctatgatcacaaggctgatgtttttagttttggaattttgatgtgggaactactcacagggaagattccttatgagtacctgactccactacaagccgctgttggtgtggtgcagaagggattacggcctacaattccaaagcatactcacgcaaagctttccgagcttcttcagaaatgctggcagcaggaccctacccaaagaccagacttctccgaaatattagaaactcttcagagaatagcagaggaggtcggagaggagcacgatgggaagcacaaggacagaacactgggtggtttcttttcggctttgagggggcggagccattgagacacagtcgaagacttttaataataaaaatgtacatggcctcggtccgtcctttgaaggacctgagctacaaccagtgcagtgcctgttcctcgcacgtcagcaccagtacacagaaatacagacctgctgtgcagctgcagttgactgaagcggcaatttttatttagctgcagccatcgctttccgcctatccgcttgttattcctgagttccattacgcaatgtataacataggtgaggaagcttgggaactgtatcatcagtctgatttcccaatcctgctgtagatggaaaaaaataataagccagattcaggccccggcatgattctttt

SEQ ID NO: 258852 - DNA, 911 bp, Zea mays
gcgcccacgcgtccgcacacgcgtgcgcacacgcgtgcgaccacgcgtccgaccactcgtccggaaacaacaagactgacagcgacgatgatgccacagctgcgtagcctcgtcgcgctggtcctcgtggccacggccatagccgccgctcccggcgttgggtttgtcgtcaccggccgcatctactgcgacaactgccgcgccgggttcgagacaaacgtgtcccacgccatccaaggcgcgacggtggagatggagtgccgccacttcgagtcgcagcaggtccacgacaaggcggaggcgacgacgggccccggcggctggtacaggatggagatcagcggcgaccaccaggacgagatctgcgacgtgcgcctgctcaagagccccgaggcggactgcgccgagatcgaccactcccgcgaccgctgccgcgtcccgctcacccgcaacgacggcatcaagcagagcggcgtccgctacgccaaccccatcgccttcctccgcaaggagccgctccccaactgcggcgagctgctccgcgcctacgacctctacaacgagacgtccgagaattcctaagcgtccaaacaaaagttctctcgctcgctttttttttaaaaaaaaatcccatatacatatagcacatttgtttcggtttgttgatgcgcgcatgcatgctagcagacatctttcctaaaaaaatttaaataatttccatctcgcattattttagtagctaccattcatgttttctgagtagttgtataaatgctaccaccgtcatcttttgtacccggccggaacaaacgaaaaacacactatctatgctgtgttgtgaattcaattcttgaccatcttctctataaaaaaaaaaaaaaaaaaaaaaaaaaaaaaaaaagggcggccgc

SEQ ID NO: 258853 - DNA, 702 bp, Zea mays
  unsure (1)..(702): unsure at all n locations
gcagcataccataccgcgcggaccgggccgggagaaacaaaactgacaaggacgatatggtgcgtacctcgtcgcgctgatcctcgtcgccacggccgtagccgccgtggccacagccgcaccctcgccggggtttgtcgtcaccggccgcgtctactgcgacaactgccgcgccgggttcgagaccaacgtctcccacgccatcgaaggcgcgacggtggagatggagtgccgtcacttcgagtcgcaggaggtccacgacaaggcggaggcgacgacggacgccggcgggtggtacaggatggagatcagcggtgaccaccaggacgagatctgccaggtgctgctgctcaagagccccgaggcggactgcgccgagatcgagcgcacccgcgaccgctgccgcgtcccgctcacccgcaacgacggcatcaggcagagcggcatccgatacgccaaccccatcgccttcttccgcaaggagcctctcagcaactgtggcgagctccttcgcgcttacgacctcttcaacgagacgtccgagaattcctaagcgtcattttgttnttcttttttaatttcctctgccatagcacatttgttcgactgatcgacgttatattagcagacgtgcagctatcctaaaaataaaaataattttcatctccaatgttttagtagctaccatattaatatatatta

SEQ ID NO: 258854 - DNA, 1744 bp, Zea mays
atggattggtccacccggttccggacccgaaacccgtcgccggccgtgtgccactgtgccggccacagggggagtcaagcggatagggtatttctccggaccatggcgtcggcggccccggtggaggagccgacggcggcggccgaggcgaaggggcggctgaccggtgactccttcatccggcgccacctcaggaccctcgccccgtatcagcccatcctgccctttgaggtgttatctgctcgccttgggcgtagaccagaggacataatcaagttggatgcaaatgagaatccatatggtccacccccggaggtcgctgcagcactaggtagtctcaagttcccctatgtgtaccctgatcctgaaagccgccaattgcgtgctgcccttgctgaagattctggacttgaatctgattacatacttgctggatgtggcgcagatgaactaattgatttaattatgagatgtgtgcttgaaccaggcgacaaaattgttgattgccctccaacattcacaatgtatgagttcgacgcttcagtcaatggtgcacttgttatcaaggttccaagactgcccgattttttccctagatgttgatctcattgtcgaagtggttgaacaggaaatgccaaaatgcatatttctgacatccccaaataatccagatggcagtgtaatcaatgatgaggatcttttaaagatacttgatctcccaatacttgtagtgctggatgaagcttatattgagttttcaagccttcagtcaagaatggcatgggttaagaagcatgataatttgattgttctccgaacatttagcaaacgggcaggtttagctggtcttcgtgtgggttatggtgcatttcctctgagcattatcgagtatttgtggcgggccaagcagccctataatgtttctgtggccgcagaagtttcagcatgtgcagctttacagaatccaacttatctggagaatgtgaaaaatttactggtaaaagaaagggagaggttgtttaatcttctcaagggaataccattcctgaagccatttcccagtcattctaacttcattctctgcgaggtcacgtcaggaaaggatgcaaagaaaataaaggaagaccttgcgaagatgggagtgatgatccgccactatgacaagaaggaactgaaaggctatattcgtatctcggttgggaaacccgagcacactgatgcactaatgaagggcctgaatgcacttcgattgtgagagcttttgcacacgatcaagcttttgcacactatcaagcttttgcacaccatcacatcaatgtaaacagtgtattcctttgcggatatatatccgtcaggctggatgcagtctataagaggagattgcatcactccaacgcatgtgaagcccaaacagacaagggtcgtgtgggtttcactatccttttgtttaccatgttgaagtctgtttttgttattcagcgacataacagctattcacaagattatcttgttcagaacaagtgtagcagttgaattcctggtaggtggtttctgatgttgggttgagacttgagagaactgaacattgtgtaggtataaataaaggccaacagagcaatgctgttgtcttaaaaaaaaaaaaaaagggcggccgcccgttgcaaatttcgaccaaataaagggatgaaatgaaagcttggaaacggaacagattctcatcaaaaaaaaaaaaattttaattaat
